(19) United States
(12) Patent Application Publication
(10) Pub. No.: US 2007/0060743 A1
(43) Pub. Date: Mar. 15, 2007

(54) Novel nucleic acids and polypeptides

(76) Inventors: Y. Tom Tang, Ranwick Court, San Jose, CA (US); Chenghua Liu, Ranchero Way #14, San Jose, CA (US); Radoje T. Drmanac, Greenwich Place , Palo Alto, CA (US)

Correspondence Address: NUVELO, INC, 201 INDUSTRIAL ROAD, SUITE 310, SAN CARLOS, CA, 94070, US

(21) Appl. No.: 10/276,817

(22) PCT Filed: May 16, 2001
(86) PCT No.: PCT/US01/14827

§ 371 Date: Jun. 18, 2004

(51) Int. Cl. C07H 21/02; C12P 21/06; C07K 14/47; C07K 16/18

(52) U.S. Cl. 536/23.1; 530/350; 435/69.1; 435/320.1; 435/325; 530/388.1

(57) ABSTRACT

The present invention provides novel nucleic acids, novel polypeptide sequences encoded by these nucleic acids and uses thereof.

### 1. TECHNICAL FIELD

[0001] The present invention provides novel polynucleotides and proteins encoded by such polynucleotides, along with uses for these polynucleotides and proteins, for example in therapeutic, diagnostic and research methods.

### 2. BACKGROUND

[0002] Technology aimed at the discovery of protein factors (including e.g., cytokines, such as lymphokines, interferons, circulating soluble factors, chemokines, and interleukins) has matured rapidly over the past decade. The now routine hybridization cloning and expression cloning techniques clone novel polynucleotides “directly” in the sense that they rely on information directly related to the discovered protein (i.e., partial DNA/amino acid sequence of the protein in the case of hybridization cloning; activity of the protein in the case of expression cloning). More recent “indirect” cloning techniques such as signal sequence cloning, which isolates DNA sequences based on the presence of a now well-recognized secretory leader sequence motif, as well as various PCR-based or low stringency hybridization-based cloning techniques, have advanced the state of the art by making available large numbers of DNA/amino acid sequences for proteins that are known to have biological activity, for example, by virtue of their secreted nature in the case of leader sequence cloning, by virtue of their cell or tissue source in the case of PCR-based techniques, or by virtue of structural similarity to other genes of known biological activity.

[0003] Identified polynucleotide and polypeptide sequences have numerous applications in, for example, diagnostics, forensics, gene mapping; identification of mutations responsible for genetic disorders or other traits, to assess biodiversity, and to produce many other types of data and products dependent on DNA and amino acid sequences.

### 3. SUMMARY OF THE INVENTION

[0004] The compositions of the present invention include novel isolated polypeptides, novel isolated polynucleotides encoding such polypeptides, including recombinant DNA molecules, cloned genes or degenerate variants thereof, especially naturally occurring variants such as allelic variants, antisense polynucleotide molecules, and antibodies that specifically recognize one or more epitopes present on such polypeptides, as well as hybridomas producing such antibodies.

[0005] The compositions of the present invention additionally include vectors, including expression vectors, containing the polynucleotides of the invention, cells genetically engineered to contain such polynucleotides and cells genetically engineered to express such polynucleotides.

[0006] The present invention relates to a collection or library of at least one novel nucleic acid sequence assembled from expressed sequence tags (ESTs) isolated mainly by sequencing by hybridization (SBH), and in some cases, sequences obtained from one or more public databases. The invention relates also to the proteins encoded by such polynucleotides, along with therapeutic, diagnostic and research utilities for these polynucleotides and proteins. These nucleic acid sequences are designated as SEQ ID NO: 1-8051. The polypeptides sequences are designated SEQ ID NO: 8052-16102. The nucleic acids and polypeptides are provided in the Sequence Listing. In the nucleic acids provided in the Sequence Listing, A is adenosine; C is cytosine; G is guanine; T is thymine; and N is any of the four bases. In the amino acids provided in the Sequence Listing, * corresponds to the stop codon.

[0007] The nucleic acid sequences of the present invention also include, nucleic acid sequences that hybridize to the complement of SEQ ID NO: 1-8051 under stringent hybridization conditions; nucleic acid sequences which are allelic variants or species homologues of any of the nucleic acid sequences recited above, or nucleic acid sequences that encode a peptide comprising a specific domain or truncation of the peptides encoded by SEQ ID NO: 1-8051. A polynucleotide comprising a nucleotide sequence having at least 90% identity to an identifying sequence of SEQ ID NO: 1-8051 or a degenerate variant or fragment thereof. The identifying sequence can be 100 base pairs in length.

[0008] The nucleic acid sequences of the present invention also include the sequence information from the nucleic acid sequences of SEQ ID NO: 1-8051. The sequence information can be a segment of any one of SEQ ID NO: 1-8051 that uniquely identifies or represents the sequence information of SEQ ID NO: 1-8051.

[0009] A collection as used in this application can be a collection of only one polynucleotide. The collection of sequence information or identifying information of each sequence can be provided on a nucleic acid array. In one embodiment, segments of sequence information is provided on a nucleic acid array to detect the polynucleotide that contains the segment. The array can be designed to detect full-match or mismatch to the polynucleotide that contains the segment. The collection can also be provided in a computer-readable format.

[0010] This invention also includes the reverse or direct complement of any of the nucleic acid sequences recited above; cloning or expression vectors containing the nucleic acid sequences; and host cells or organisms transformed with these expression vectors. Nucleic acid sequences (or their reverse or direct complements) according to the invention have numerous applications in a variety of techniques known to those skilled in the art of molecular biology, such as use as hybridization probes, use as primers for PCR, use in an array, use in computer-readable media, use in sequencing full-length genes, use for chromosome and gene mapping, use in the recombinant production of protein, and use in the generation of anti-sense DNA or RNA, their chemical analogs and the like.

[0011] In a preferred embodiment, the nucleic acid sequences of SEQ ID NO: 1-8051 or novel segments or parts of the nucleic acids of the invention are used as primers in expression assays that are well known in the art. In a particularly preferred embodiment, the nucleic acid sequences of SEQ ID NO: 1-8051 or novel segments or parts of the nucleic acids provided herein are used in diagnostics for identifying expressed genes or, as well known in the art and exemplified by Vollrath et al., Science 258:52-59 (1992), as expressed sequence tags for physical mapping of the human genome.

[0012] The isolated polynucleotides of the invention include, but are not limited to, a polynucleotide comprising any one of the nucleotide sequences set forth in SEQ ID NO: 1-8051; a polynucleotide comprising any of the full length protein coding sequences of SEQ ID NO: 1-8051; and a polynucleotide comprising any of the nucleotide sequences of the mature protein coding sequences of SEQ ID NO: 1-8051. The polynucleotides of the present invention also include, but are not limited to, a polynucleotide that hybridizes under stringent hybridization conditions to (a) the complement of any one of the nucleotide sequences set forth in SEQ ID NO: 1-8051; (b) a nucleotide sequence encoding any one of the amino acid sequences set forth in the Sequence Listing (e.g., SEQ ID NO: 8052-16102); (c) a polynucleotide which is an allelic variant of any polynucleotides recited above; (d) a polynucleotide which encodes a species homolog (e.g. orthologs) of any of the proteins recited above; or (e) a polynucleotide that encodes a polypeptide comprising a specific domain or truncation of any of the polypeptides comprising an amino acid sequence set forth in the Sequence Listing.

[0013] The isolated polypeptides of the invention include, but are not limited to, a polypeptide comprising any of the amino acid sequences set forth in the Sequence Listing; or the corresponding full length or mature protein. Polypeptides of the invention also include polypeptides with biological activity that are encoded by (a) any of the polynucleotides having a nucleotide sequence set forth in SEQ ID NO: 1-8051; or (b) polynucleotides that hybridize to the complement of the polynucleotides of (a) under stringent hybridization conditions. Biologically or immunologically active variants of any of the polypeptide sequences in the Sequence Listing, and “substantial equivalents” thereof (e.g., with at least about 65%, 70%, 75%, 80%, 85%, 90%, 95%, 98% or 99% amino acid sequence identity) that preferably retain biological activity are also contemplated. The polypeptides of the invention may be wholly or partially chemically synthesized but are preferably produced by recombinant means using the genetically engineered cells (e.g. host cells) of the invention.

[0014] The invention also provides compositions comprising a polypeptide of the invention. Polypeptide compositions of the invention may further comprise an acceptable carrier, such as a hydrophilic, e.g., pharmaceutically acceptable, carrier.

[0015] The invention also provides host cells transformed or transfected with a polynucleotide of the invention.

[0016] The invention also relates to methods for producing a polypeptide of the invention comprising growing a culture of the host cells of the invention in a suitable culture medium under conditions permitting expression of the desired polypeptide, and purifying the polypeptide from the culture or from the host cells. Preferred embodiments include those in which the protein produced by such process is a mature form of the protein.

[0017] Polynucleotides according to the invention have numerous applications in a variety of techniques known to those skilled in the art of molecular biology. These techniques include use as hybridization probes, use as oligomers, or primers, for PCR, use for chromosome and gene mapping, use in the recombinant production of protein, and use in generation of anti-sense DNA or RNA, their chemical analogs and the like. For example, when the expression of an mRNA is largely restricted to a particular cell or tissue type, polynucleotides of the invention can be used as hybridization probes to detect the presence of the particular cell or tissue mRNA in a sample using, e.g., in situ hybridization.

[0018] In other exemplary embodiments, the polynucleotides are used in diagnostics as expressed sequence tags for identifying expressed genes or, as well known in the art and exemplified by Vollrath et al., Science 258:52-59 (1992), as expressed sequence tags for physical mapping of the human genome.

[0019] The polypeptides according to the invention can be used in a variety of conventional procedures and methods that are currently applied to other proteins. For example, a polypeptide of the invention can be used to generate an antibody that specifically binds the polypeptide. Such antibodies, particularly monoclonal antibodies, are useful for detecting or quantitating the polypeptide in tissue. The polypeptides of the invention can also be used as molecular weight markers, and as a food supplement.

[0020] Methods are also provided for preventing, treating, or ameliorating a medical condition which comprises the step of administering to a mammalian subject a therapeutically effective amount of a composition comprising a polypeptide of the present invention and a pharmaceutically acceptable carrier.

[0021] In particular, the polypeptides and polynucleotides of the invention can be utilized, for example, in methods for the prevention and/or treatment of disorders involving aberrant protein expression or biological activity.

[0022] The present invention further relates to methods for detecting the presence of the polynucleotides or polypeptides of the invention in a sample. Such methods can, for example, be utilized as part of prognostic and diagnostic evaluation of disorders as recited herein and for the identification of subjects exhibiting a predisposition to such conditions. The invention provides a method for detecting the polynucleotides of the invention in a sample, comprising contacting the sample with a compound that binds to and forms a complex with the polynucleotide of interest for a period sufficient to form the complex and under conditions sufficient to form a complex and detecting the complex such that if a complex is detected, the polynucleotide of interest is detected. The invention also provides a method for detecting the polypeptides of the invention in a sample comprising contacting the sample with a compound that binds to and forms a complex with the polypeptide under conditions and for a period sufficient to form the complex and detecting the formation of the complex such that if a complex is formed, the polypeptide is detected.

[0023] The invention also provides kits comprising polynucleotide probes and/or monoclonal antibodies, and optionally quantitative standards, for carrying out methods of the invention. Furthermore, the invention provides methods for evaluating the efficacy of drugs, and monitoring the progress of patients, involved in clinical trials for the treatment of disorders as recited above.

[0024] The invention also provides methods for the identification of compounds that modulate (i.e., increase or decrease) the expression or activity of the polynucleotides and/or polypeptides of the invention. Such methods can be utilized, for example, for the identification of compounds that can ameliorate symptoms of disorders as recited herein. Such methods can include, but are not limited to, assays for identifying compounds and other substances that interact with (e.g., bind to) the polypeptides of the invention. The invention provides a method for identifying a compound that binds to the polypeptides of the invention comprising contacting the compound with a polypeptide of the invention in a cell for a time sufficient to form a polypeptide/compound complex, wherein the complex drives expression of a reporter gene sequence in the cell; and detecting the complex by detecting the reporter gene sequence expression such that if expression of the reporter gene is detected the compound that binds to a polypeptide of the invention is identified.

[0025] The methods of the invention also provides methods for treatment which involve the administration of the polynucleotides or polypeptides of the invention to individuals exhibiting symptoms or tendencies. In addition, the invention encompasses methods for treating diseases or disorders as recited herein comprising administering compounds and other substances that modulate the overall activity of the target gene products. Compounds and other substances can effect such modulation either on the level of target gene/protein expression or target protein activity.

[0026] The polypeptides of the present invention and the polynucleotides encoding them are also useful for the same functions known to one of skill in the art as the polypeptides and polynucleotides to which they have homology (set forth in the sequence listing). If no homology is set forth for a sequence, then the polypeptides and polynucleotides of the present invention are useful for a variety of applications, as described herein, including use in arrays for detection.

### 4. DETAILED DESCRIPTION OF THE INVENTION

### 4.1 Definitions

[0027] It must be noted that as used herein and in the appended claims, the singular forms “a”, “an” and “the” include plural references unless the context clearly dictates otherwise.

[0028] The term “active” refers to those forms of the polypeptide which retain the biologic and/or immunologic activities of any naturally occurring polypeptide. According to the invention, the terms “biologically active” or “biological activity” refer to a protein or peptide having structural, regulatory or biochemical functions of a naturally occurring molecule. Likewise “immunologically active” or “immunological activity” refers to the capability of the natural, recombinant or synthetic polypeptide to induce a specific immune response in appropriate animals or cells and to bind with specific antibodies.

[0029] The term “activated cells” as used in this application are those cells which are engaged in extracellular or intracellular membrane trafficking, including the export of secretory or enzymatic molecules as part of a normal or disease process.

[0030] The terms “complementary” or “complementarity” refer to the natural binding of polynucleotides by base pairing. For example, the sequence 5′-AGT-3′ binds to the complementary sequence 3′-TCA-5′. Complementarity between two single-stranded molecules may be “partial” such that only some of the nucleic acids bind or it may be “complete” such that total complementarity exists between the single stranded molecules. The degree of complementarity between the nucleic acid strands has significant effects on the efficiency and strength of the hybridization between the nucleic acid strands.

[0031] The term “embryonic stem cells (ES)” refers to a cell that can give rise to many differentiated cell types in an embryo or an adult, including the germ cells. The term “germ line stem cells (GSCs)” refers to stem cells derived from primordial stem cells that provide a steady and continuous source of germ cells for the production of gametes. The term “primordial germ cells (PGCs)” refers to a small population of cells set aside from other cell lineages particularly from the yolk sac, mesenteries, or gonadal ridges during embryogenesis that have the potential to differentiate into germ cells and other cells. PGCs are the source from which GSCs and ES cells are derived The PGCs, the GSCs and the ES cells are capable of self-renewal. Thus these cells not only populate the germ line and give rise to a plurality of terminally differentiated cells that comprise the adult specialized organs, but are able to regenerate themselves.

[0032] The term “expression modulating fragment,” EMF, means a series of nucleotides which modulates the expression of an operably linked ORF or another EMF.

[0033] As used herein, a sequence is said to “modulate the expression of an operably linked sequence” when the expression of the sequence is altered by the presence of the EMF. EMFs include, but are not limited to, promoters, and promoter modulating sequences (inducible elements). One class of EMFs are nucleic acid fragments which induce the expression of an operably linked ORF in response to a specific regulatory factor or physiological event.

[0034] The terms “nucleotide sequence” or “nucleic acid” or “polynucleotide” or “oligonucleotide” are used interchangeably and refer to a heteropolymer of nucleotides or the sequence of these nucleotides. These phrases also refer to DNA or RNA of genomic or synthetic origin which may be single-stranded or double-stranded and may represent the sense or the antisense strand, to peptide nucleic acid (PNA) or to any DNA-like or RNA-like material. In the sequences herein A is adenine, C is cytosine, T is thymine, G is guanine and N is A, C, G or T (U). It is contemplated that where the polynucleotide is RNA, the T (thymine) in the sequences provided herein is substituted with U (uracil). Generally, nucleic acid segments provided by this invention may be assembled from fragments of the genome and short oligonucleotide linkers, or from a series of oligonucleotides, or from individual nucleotides, to provide a synthetic nucleic acid which is capable of being expressed in a recombinant transcriptional unit comprising regulatory elements derived from a microbial or viral operon, or a eukaryotic gene.

[0035] The terms “oligonucleotide fragment” or a “polynucleotide fragment”, “portion,” or “segment” or “probe” or “primer” are used interchangeably and refer to a sequence of nucleotide residues which are at least about 5 nucleotides, more preferably at least about 7 nucleotides, more preferably at least about 9 nucleotides, more preferably at least about 11 nucleotides and most preferably at least about 17 nucleotides. The fragment is preferably less than about 500 nucleotides, preferably less than about 200 nucleotides, more preferably less than about 100 nucleotides, more preferably less than about 50 nucleotides and most preferably less than 30 nucleotides. Preferably the probe is from about 6 nucleotides to about 200 nucleotides, preferably from about 15 to about 50 nucleotides, more preferably from about 17 to 30 nucleotides and most preferably from about 20 to 25 nucleotides. Preferably the fragments can be used in polymerase chain reaction (PCR), various hybridization procedures or microarray procedures to identify or amplify identical or related parts of mRNA or DNA molecules. A fragment or segment may uniquely identify each polynucleotide sequence of the present invention. Preferably the fragment comprises a sequence substantially similar to any one of SEQ ID NO: 1-8051.

[0036] Probes may, for example, be used to determine whether specific mRNA molecules are present in a cell or tissue or to isolate similar nucleic acid sequences from chromosomal DNA as described by Walsh et al. (Walsh, P. S. et al., 1992, PCR Methods Appl 1:241-250). They may be labeled by nick translation, Klenow fill-in reaction, PCR, or other methods well known in the art. Probes of the present invention, their preparation and/or labeling are elaborated in Sambrook, J. et al., 1989, Molecular Cloning: A Laboratory Manual, Cold Spring Harbor Laboratory, NY; or Ausubel, F. M. et al., 1989, Current Protocols in Molecular Biology, John Wiley & Sons, New York N.Y., both of which are incorporated herein by reference in their entirety.

[0037] The nucleic acid sequences of the present invention also include the sequence information from the nucleic acid sequences of SEQ ID NO: 1-8051. The sequence information can be a segment of any one of SEQ ID NO: 1-8051 that uniquely identifies or represents the sequence information of that sequence of SEQ ID NO: 1-8051. One such segment can be a twenty-mer nucleic acid sequence because the probability that a twenty-mer is fully matched in the human genome is 1 in 300. In the human genome, there are three billion base pairs in one set of chromosomes. Because 4²⁰ possible twenty-mers exist, there are 300 times more twenty-mers than there are base pairs in a set of human chromosomes. Using the same analysis, the probability for a seventeen-mer to be fully matched in the human genome is approximately 1 in 5. When these segments are used in arrays for expression studies, fifteen-mer segments can be used. The probability that the fifteen-mer is fully matched in the expressed sequences is also approximately one in five because expressed sequences comprise less than approximately 5% of the entire genome sequence.

[0038] Similarly, when using sequence information for detecting a single mismatch, a segment can be a twenty-five mer. The probability that the twenty-five mer would appear in a human genome with a single mismatch is calculated by multiplying the probability for a full match (1÷4²⁵) times the increased probability for mismatch at each nucleotide position (3×25). The probability that an eighteen mer with a single mismatch can be detected in an array for expression studies is approximately one in five. The probability that a twenty-mer with a single mismatch can be detected in a human genome is approximately one in five.

[0039] The term “open reading frame,” ORF, means a series of nucleotide triplets coding for amino acids without any termination codons and is a sequence translatable into protein.

[0040] The terms “operably linked” or “operably associated” refer to functionally related nucleic acid sequences. For example, a promoter is operably associated or operably linked with a coding sequence if the promoter controls the transcription of the coding sequence. While operably linked nucleic acid sequences can be contiguous and in the same reading frame, certain genetic elements e.g. repressor genes are not contiguously linked to the coding sequence but still control transcription/translation of the coding sequence.

[0041] The term “pluripotent” refers to the capability of a cell to differentiate into a number of differentiated cell types that are present in an adult organism. A pluripotent cell is restricted in its differentiation capability in comparison to a totipotent cell.

[0042] The terms “polypeptide” or “peptide” or “amino acid sequence” refer to an oligopeptide, peptide, polypeptide or protein sequence or fragment thereof and to naturally occurring or synthetic molecules. A polypeptide “fragment,” “portion,” or “segment” is a stretch of amino acid residues of at least about 5 amino acids, preferably at least about 7 amino acids, more preferably at least about 9 amino acids and most preferably at least about 17 or more amino acids. The peptide preferably is not greater than about 200 amino acids, more preferably less than 150 amino acids and most preferably less than 100 amino acids. Preferably the peptide is from about 5 to about 200 amino acids. To be active, any polypeptide must have sufficient length to display biological and/or immunological activity.

[0043] The term “naturally occurring polypeptide” refers to polypeptides produced by cells that have not been genetically engineered and specifically contemplates various polypeptides arising from post-translational modifications of the polypeptide including, but not limited to, acetylation, carboxylation, glycosylation, phosphorylation, lipidation and acylation.

[0044] The term “translated protein coding portion” means a sequence which encodes for the full length protein which may include any leader sequence or any processing sequence.

[0045] The term “mature protein coding sequence” means a sequence which encodes a peptide or protein without a signal or leader sequence. The “mature protein portion” means that portion of the protein which does not include a signal or leader sequence. The peptide may have been produced by processing in the cell which removes any leader/signal sequence. The mature protein portion may or may not include an initial methionine residue. The methionine residue may be removed from the protein during processing in the cell. The peptide may be produced synthetically or the protein may have been produced using a polynucleotide only encoding for the mature protein coding sequence.

[0046] The term “derivative” refers to polypeptides chemically modified by such techniques as ubiquitination, labeling (e.g., with radionuclides or various enzymes), covalent polymer attachment such as pegylation (derivatization with polyethylene glycol) and insertion or substitution by chemical synthesis of amino acids such as ornithine, which do not normally occur in human proteins.

[0047] The term “variant”(or “analog”) refers to any polypeptide differing from naturally occurring polypeptides by amino acid insertions, deletions, and substitutions, created using, e.g., recombinant DNA techniques. Guidance in determining which amino acid residues may be replaced, added or deleted without abolishing activities of interest, may be found by comparing the sequence of the particular polypeptide with that of homologous peptides and minimizing the number of amino acid sequence changes made in regions of high homology (conserved regions) or by replacing amino acids with consensus sequence.

[0048] Alternatively, recombinant variants encoding these same or similar polypeptides may be synthesized or selected by making use of the “redundancy” in the genetic code. Various codon substitutions, such as the silent changes which produce various restriction sites, may be introduced to optimize cloning into a plasmid or viral vector or expression in a particular prokaryotic or eukaryotic system. Mutations in the polynucleotide sequence may be reflected in the polypeptide or domains of other peptides added to the polypeptide to modify the properties of any part of the polypeptide, to change characteristics such as ligand-binding affinities, interchain affinities, or degradation/turnover rate.

[0049] Preferably, amino acid “substitutions” are the result of replacing one amino acid with another amino acid having similar structural and/or chemical properties, i.e., conservative amino acid replacements. “Conservative” amino acid substitutions may be made on the basis of similarity in polarity, charge, solubility, hydrophobicity, hydrophilicity, and/or the amphipathic nature of the residues involved. For example, nonpolar (hydrophobic) amino acids include alanine, leucine, isoleucine, valine, proline, phenylalanine, tryptophan, and methionine; polar neutral amino acids include glycine, serine, threonine, cysteine, tyrosine, asparagine, and glutamine; positively charged (basic) amino acids include arginine, lysine, and histidine; and negatively charged (acidic) amino acids include aspartic acid and glutamic acid. “Insertions” or “deletions” are preferably in the range of about 1 to 20 amino acids, more preferably 1 to 10 amino acids. The variation allowed may be experimentally determined by systematically making insertions, deletions, or substitutions of amino acids in a polypeptide molecule using recombinant DNA techniques and assaying the resulting recombinant variants for activity.

[0050] Alternatively, where alteration of function is desired, insertions, deletions or non-conservative alterations can be engineered to produce altered polypeptides. Such alterations can, for example, alter one or more of the biological functions or biochemical characteristics of the polypeptides of the invention. For example, such alterations may change polypeptide characteristics such as ligand-binding affinities, interchain affinities, or degradation/turnover rate. Further, such alterations can be selected so as to generate polypeptides that are better suited for expression, scale up and the like in the host cells chosen for expression. For example, cysteine residues can be deleted or substituted with another amino acid residue in order to eliminate disulfide bridges.

[0051] The terms “purified” or “substantially purified” as used herein denotes that the indicated nucleic acid or polypeptide is present in the substantial absence of other biological macromolecules, e.g., polynucleotides, proteins, and the like. In one embodiment, the polynucleotide or polypeptide is purified such that it constitutes at least 95% by weight, more preferably at least 99% by weight, of the indicated biological macromolecules present (but water, buffers, and other small molecules, especially molecules having a molecular weight of less than 1000 daltons, can be present).

[0052] The term “isolated” as used herein refers to a nucleic acid or polypeptide separated from at least one other component (e.g., nucleic acid or polypeptide) present with the nucleic acid or polypeptide in its natural source. In one embodiment, the nucleic acid or polypeptide is found in the presence of (if anything) only a solvent, buffer, ion, or other component normally present in a solution of the same. The terms “isolated” and “purified” do not encompass nucleic acids or polypeptides present in their natural source.

[0053] The term “recombinant,” when used herein to refer to a polypeptide or protein, means that a polypeptide or protein is derived from recombinant (e.g., microbial, insect, or mammalian) expression systems. “Microbial” refers to recombinant polypeptides or proteins made in bacterial or fungal (e.g., yeast) expression systems. As a product, “recombinant microbial” defines a polypeptide or protein essentially free of native endogenous substances and unaccompanied by associated native glycosylation. Polypeptides or proteins expressed in most bacterial cultures, e.g., E. coli, will be free of glycosylation modifications; polypeptides or proteins expressed in yeast will have a glycosylation pattern in general different from those expressed in mammalian cells.

[0054] The term “recombinant expression vehicle or vector” refers to a plasmid or phage or virus or vector, for expressing a polypeptide from a DNA (RNA) sequence. An expression vehicle can comprise a transcriptional unit comprising an assembly of (1) a genetic element or elements having a regulatory role in gene expression, for example, promoters or enhancers, (2) a structural or coding sequence which is transcribed into mRNA and translated into protein, and (3) appropriate transcription initiation and termination sequences. Structural units intended for use in yeast or eukaryotic expression systems preferably include a leader sequence enabling extracellular secretion of translated protein by a host cell. Alternatively, where recombinant protein is expressed without a leader or transport sequence, it may include an amino terminal methionine residue. This residue may or may not be subsequently cleaved from the expressed recombinant protein to provide a final product.

[0055] The term “recombinant expression system” means host cells which have stably integrated a recombinant transcriptional unit into chromosomal DNA or carry the recombinant transcriptional unit extrachromosomally. Recombinant expression systems as defined herein will express heterologous polypeptides or proteins upon induction of the regulatory elements linked to the DNA segment or synthetic gene to be expressed. This term also means host cells which have stably integrated a recombinant genetic element or elements having a regulatory role in gene expression, for example, promoters or enhancers. Recombinant expression systems as defined herein will express polypeptides or proteins endogenous to the cell upon induction of the regulatory elements linked to the endogenous DNA segment or gene to be expressed. The cells can be prokaryotic or eukaryotic.

[0056] The term “secreted” includes a protein that is transported across or through a membrane, including transport as a result of signal sequences in its amino acid sequence when it is expressed in a suitable host cell. “Secreted” proteins include without limitation proteins secreted wholly (e.g., soluble proteins) or partially (e.g., receptors) from the cell in which they are expressed. “Secreted” proteins also include without limitation proteins that are transported across the membrane of the endoplasmic reticulum. “Secreted” proteins are also intended to include proteins containing non-typical signal sequences (e.g. Interleukin-1 Beta, see Krasney, P. A. and Young, P. R. (1992) Cytokine 4(2):134-143) and factors released from damaged cells (e.g. Interleukin-1 Receptor Antagonist, see Arend, W. P. et. al. (1998) Annu. Rev. Immunol. 16:27-55)

[0057] Where desired, an expression vector may be designed to contain a “signal or leader sequence” which will direct the polypeptide through the membrane of a cell. Such a sequence may be naturally present on the polypeptides of the present invention or provided from heterologous protein sources by recombinant DNA techniques.

[0058] The term “stringent” is used to refer to conditions that are commonly understood in the art as stringent. Stringent conditions can include highly stringent conditions (i.e., hybridization to filter-bound DNA in 0.5 M NaHPO₄, 7% sodium dodecyl sulfate (SDS), 1 mM EDTA at 65° C., and washing in 0.1×SSC/0.1% SDS at 68° C.), and moderately stringent conditions (i.e., washing in 0.2×SSC/0.1% SDS at 42° C.). Other exemplary hybridization conditions are described herein in the examples.

[0059] In instances of hybridization of deoxyoligonucleotides, additional exemplary stringent hybridization conditions include washing in 6×SSC/0.05% sodium pyrophosphate at 37° C. (for 14-base oligonucleotides), 48° C. (for 17-base oligos), 55° C. (for 20-base oligonucleotides), and 60° C. (for 23-base oligonucleotides).

[0060] As used herein, “substantially equivalent” can refer both to nucleotide and amino acid sequences, for example a mutant sequence, that varies from a reference sequence by one or more substitutions, deletions, or additions, the net effect of which does not result in an adverse functional dissimilarity between the reference and subject sequences. Typically, such a substantially equivalent sequence varies from one of those listed herein by no more than about 35% (i.e., the number of individual residue substitutions, additions, and/or deletions in a substantially equivalent sequence, as compared to the corresponding reference sequence, divided by the total number of residues in the substantially equivalent sequence is about 0.35 or less). Such a sequence is said to have 65% sequence identity to the listed sequence. In one embodiment, a substantially equivalent, e.g., mutant, sequence of the invention varies from a listed sequence by no more than 30% (70% sequence identity); in a variation of this embodiment, by no more than 25% (75% sequence identity); and in a further variation of this embodiment, by no more than 20% (80% sequence identity) and in a further variation of this embodiment, by no more than 10% (90% sequence identity) and in a further variation of this embodiment, by no more that 5% (95% sequence identity). Substantially equivalent, e.g., mutant, amino acid sequences according to the invention preferably have at least 80% sequence identity with a listed amino acid sequence, more preferably at least 85% sequence identity, more preferably at least 90% sequence identity, more preferably at least 95% identity, more preferably at least 98% identity, and most preferably at least 99% identity. Substantially equivalent nucleotide sequences of the invention can have lower percent sequence identities, taking into account, for example, the redundancy or degeneracy of the genetic code. Preferably, nucleotide sequence has at least about 65% identity, more preferably at least about 75% identity, more preferably at least about 80% sequence identity, more preferably at least about 85% sequence identity, more preferably at least about 90% sequence identity, and most preferably at least about 95% identity, more preferably at least about 98% sequence identity, and most preferably at least about 99% sequence identity. For the purposes of the present invention, sequences having substantially equivalent biological activity and substantially equivalent expression characteristics are considered substantially equivalent. For the purposes of determining equivalence, truncation of the mature sequence (e.g., via a mutation which creates a spurious stop codon) should be disregarded. Sequence identity may be determined, e.g., using the Jotun Hein method (Hein, J. (1990) Methods Enzymol. 183:626-645). Identity between sequences can also be determined by other methods known in the art, e.g. by varying hybridization conditions.

[0061] The term “totipotent” refers to the capability of a cell to differentiate into all of the cell types of an adult organism.

[0062] The term “transformation” means introducing DNA into a suitable host cell so that the DNA is replicable, either as an extrachromosomal element, or by chromosomal integration. The term “transfection” refers to the taking up of an expression vector by a suitable host cell, whether or not any coding sequences are in fact expressed. The term “infection” refers to the introduction of nucleic acids into a suitable host cell by use of a virus or viral vector.

[0063] As used herein, an “uptake modulating fragment,” UMF, means a series of nucleotides which mediate the uptake of a linked DNA fragment into a cell. UMFs can be readily identified using known UMFs as a target sequence or target motif with the computer-based systems described below. The presence and activity of a UMF can be confirmed by attaching the suspected UMF to a marker sequence. The resulting nucleic acid molecule is then incubated with an appropriate host under appropriate conditions and the uptake of the marker sequence is determined. As described above, a UMF will increase the frequency of uptake of a linked marker sequence.

[0064] Each of the above terms is meant to encompass all that is described for each, unless the context dictates otherwise.

### 4.2 Nucleic Acids of the Invention

[0065] Nucleotide sequences of the invention are set forth in the Sequence Listing.

[0066] The isolated polynucleotides of the invention include a polynucleotide comprising the nucleotide sequences of SEQ ID NO: 1-8051; a polynucleotide encoding any one of the peptide sequences of SEQ ID NO: 8052-16102; and a polynucleotide comprising the nucleotide sequence encoding the mature protein coding sequence of the polypeptides of any one of SEQ ID NO: 8052-16102. The polynucleotides of the present invention also include, but are not limited to, a polynucleotide that hybridizes under stringent conditions to (a) the complement of any of the nucleotides sequences of SEQ ID NO: 1-8051; (b) nucleotide sequences encoding any one of the amino acid sequences set forth in the Sequence Listing; (c) a polynucleotide which is an allelic variant of any polynucleotide recited above; (d) a polynucleotide which encodes a species homolog of any of the proteins recited above; or (e) a polynucleotide that encodes a polypeptide comprising a specific domain or truncation of the polypeptides of SEQ ID NO: 8052-16102. Domains of interest may depend on the nature of the encoded polypeptide; e.g., domains in receptor-like polypeptides include ligand-binding, extracellular, transmembrane, or cytoplasmic domains, or combinations thereof; domains in immunoglobulin-like proteins include the variable immunoglobulin-like domains; domains in enzyme-like polypeptides include catalytic and substrate binding domains; and domains in ligand polypeptides include receptor-binding domains.

[0067] The polynucleotides of the invention include naturally occurring or wholly or partially synthetic DNA, e.g., cDNA and genomic DNA, and RNA, e.g., mRNA. The polynucleotides may include all of the coding region of the cDNA or may represent a portion of the coding region of the cDNA.

[0068] The present invention also provides genes corresponding to the cDNA sequences disclosed herein. The corresponding genes can be isolated in accordance with known methods using the sequence information disclosed herein. Such methods include the preparation of probes or primers from the disclosed sequence information for identification and/or amplification of genes in appropriate genomic libraries or other sources of genomic materials. Further 5′ and 3′ sequence can be obtained using methods known in the art. For example, full length cDNA or genomic DNA that corresponds to any of the polynucleotides of SEQ ID NO: 1-8051 can be obtained by screening appropriate cDNA or genomic DNA libraries under suitable hybridization conditions using any of the polynucleotides of SEQ ID NO: 1-8051 or a portion thereof as a probe. Alternatively, the polynucleotides of SEQ ID NO: 1-8051 may be used as the basis for suitable primer(s) that allow identification and/or amplification of genes in appropriate genomic DNA or cDNA libraries.

[0069] The nucleic acid sequences of the invention can be assembled from ESTs and sequences (including cDNA and genomic sequences) obtained from one or more public databases, such as dbEST, gbpri, and UniGene. The EST sequences can provide identifying sequence information, representative fragment or segment information, or novel segment information for the full-length gene.

[0070] The polynucleotides of the invention also provide polynucleotides including nucleotide sequences that are substantially equivalent to the polynucleotides recited above. Polynucleotides according to the invention can have, e.g., at least about 65%, at least about 70%, at least about 75%, at least about 80%, 81%, 82%, 83%, 84%, more typically at least about 85%, 86%, 87%, 88%, 89%, more typically at least about 90%, 91%, 92%, 93%, 94%, and even more typically at least about 95%, 96%, 97%, 98%, 99%, sequence identity to a polynucleotide recited above.

[0071] Included within the scope of the nucleic acid sequences of the invention are nucleic acid sequence fragments that hybridize under stringent conditions to any of the nucleotide sequences of SEQ ID NO: 1-8051, or complements thereof, which fragment is greater than about 5 nucleotides, preferably 7 nucleotides, more preferably greater than 9 nucleotides and most preferably greater than 17 nucleotides. Fragments of, e.g. 15, 17, or 20 nucleotides or more that are selective for (i.e. specifically hybridize to any one of the polynucleotides of the invention) are contemplated. Probes capable of specifically hybridizing to a polynucleotide can differentiate polynucleotide sequences of the invention from other polynucleotide sequences in the same family of genes or can differentiate human genes from genes of other species, and are preferably based on unique nucleotide sequences.

[0072] The sequences falling within the scope of the present invention are not limited to these specific sequences, but also include allelic and species variations thereof. Allelic and species variations can be routinely determined by comparing the sequence provided in SEQ ID NO: 1-8051, a representative fragment thereof, or a nucleotide sequence at least 90% identical, preferably 95% identical, to SEQ ID NO: 1-8051 with a sequence from another isolate of the same species. Furthermore, to accommodate codon variability, the invention includes nucleic acid molecules coding for the same amino acid sequences as do the specific ORFs disclosed herein. In other words, in the coding region of an ORF, substitution of one codon for another codon that encodes the same amino acid is expressly contemplated.

[0073] The nearest neighbor or homology result for the nucleic acids of the present invention, including SEQ ID NO: 1-8051 can be obtained by searching a database using an algorithm or a program. Preferably, a BLAST which stands for Basic Local Alignment Search Tool is used to search for local sequence alignments (Altshul, S. F. J. Mol. Evol. 36 290-300 (1993) and Altschul S. F. et al. J. Mol. Biol. 21:403-410 (1990)). Alternatively a FASTA version 3 search against Genpept, using Fastxy algorithm.

[0074] Species homologs (or orthologs) of the disclosed polynucleotides and proteins are also provided by the present invention. Species homologs may be isolated and identified by making suitable probes or primers from the sequences provided herein and screening a suitable nucleic acid source from the desired species.

[0075] The invention also encompasses allelic variants of the disclosed polynucleotides or proteins; that is, naturally occurring alternative forms of the isolated polynucleotide which also encode proteins which are identical, homologous or related to that encoded by the polynucleotides.

[0076] The nucleic acid sequences of the invention are further directed to sequences which encode variants of the described nucleic acids. These amino acid sequence variants may be prepared by methods known in the art by introducing appropriate nucleotide changes into a native or variant polynucleotide. There are two variables in the construction of amino acid sequence variants: the location of the mutation and the nature of the mutation. Nucleic acids encoding the amino acid sequence variants are preferably constructed by mutating the polynucleotide to encode an amino acid sequence that does not occur in nature. These nucleic acid alterations can be made at sites that differ in the nucleic acids from different species (variable positions) or in highly conserved regions (constant regions). Sites at such locations will typically be modified in series, e.g., by substituting first with conservative choices (e.g., hydrophobic amino acid to a different hydrophobic amino acid) and then with more distant choices (e.g., hydrophobic amino acid to a charged amino acid), and then deletions or insertions may be made at the target site. Amino acid sequence deletions generally range from about 1 to 30 residues, preferably about 1 to 10 residues, and are typically contiguous. Amino acid insertions include amino- and/or carboxyl-terminal fusions ranging in length from one to one hundred or more residues, as well as intrasequence insertions of single or multiple amino acid residues. Intrasequence insertions may range generally from about 1 to 10 amino residues, preferably from 1 to 5 residues. Examples of terminal insertions include the heterologous signal sequences necessary for secretion or for intracellular targeting in different host cells and sequences such as FLAG or poly-histidine sequences useful for purifying the expressed protein.

[0077] In a preferred method, polynucleotides encoding the novel amino acid sequences are changed via site-directed mutagenesis. This method uses oligonucleotide sequences to alter a polynucleotide to encode the desired amino acid variant, as well as sufficient adjacent nucleotides on both sides of the changed amino acid to form a stable duplex on either side of the site of being changed. In general, the techniques of site-directed mutagenesis are well known to those of skill in the art and this technique is exemplified by publications such as, Edelman et al., DNA 2:183 (1983). A versatile and efficient method for producing site-specific changes in a polynucleotide sequence was published by Zoller and Smith, Nucleic Acids Res. 10:6487-6500 (1982). PCR may also be used to create amino acid sequence variants of the novel nucleic acids. When small amounts of template DNA are used as starting material, primer(s) that differs slightly in sequence from the corresponding region in the template DNA can generate the desired amino acid variant. PCR amplification results in a population of product DNA fragments that differ from the polynucleotide template encoding the polypeptide at the position specified by the primer. The product DNA fragments replace the corresponding region in the plasmid and this gives a polynucleotide encoding the desired amino acid variant.

[0078] A further technique for generating amino acid variants is the cassette mutagenesis technique described in Wells et al., Gene 34:315 (1985); and other mutagenesis techniques well known in the art, such as, for example, the techniques in Sambrook et al., supra, and Current Protocols in Molecular Biology, Ausubel et al. Due to the inherent degeneracy of the genetic code, other DNA sequences which encode substantially the same or a functionally equivalent amino acid sequence may be used in the practice of the invention for the cloning and expression of these novel nucleic acids. Such DNA sequences include those which are capable of hybridizing to the appropriate novel nucleic acid sequence under stringent conditions.

[0079] Polynucleotides encoding preferred polypeptide truncations of the invention can be used to generate polynucleotides encoding chimeric or fusion proteins comprising one or more domains of the invention and heterologous protein sequences.

[0080] The polynucleotides of the invention additionally include the complement of any of the polynucleotides recited above. The polynucleotide can be DNA (genomic, cDNA, amplified, or synthetic) or RNA. Methods and algorithms for obtaining such polynucleotides are well known to those of skill in the art and can include, for example, methods for determining hybridization conditions that can routinely isolate polynucleotides of the desired sequence identities.

[0081] In accordance with the invention, polynucleotide sequences comprising the mature protein coding sequences corresponding to any one of SEQ ID NO: 1-8051, or functional equivalents thereof, may be used to generate recombinant DNA molecules that direct the expression of that nucleic acid, or a functional equivalent thereof, in appropriate host cells. Also included are the cDNA inserts of any of the clones identified herein.

[0082] A polynucleotide according to the invention can be joined to any of a variety of other nucleotide sequences by well-established recombinant DNA techniques (see Sambrook J et al. (1989) Molecular Cloning: A Laboratory Manual, Cold Spring Harbor Laboratory, NY). Useful nucleotide sequences for joining to polynucleotides include an assortment of vectors, e.g., plasmids, cosmids, lambda phage derivatives, phagemids, and the like, that are well known in the art. Accordingly, the invention also provides a vector including a polynucleotide of the invention and a host cell containing the polynucleotide. In general, the vector contains an origin of replication functional in at least one organism, convenient restriction endonuclease sites, and a selectable marker for the host cell. Vectors according to the invention include expression vectors, replication vectors, probe generation vectors, and sequencing vectors. A host cell according to the invention can be a prokaryotic or eukaryotic cell and can be a unicellular organism or part of a multicellular organism.

[0083] The present invention further provides recombinant constructs comprising a nucleic acid having any of the nucleotide sequences of SEQ ID NO: 1-8051 or a fragment thereof or any other polynucleotides of the invention. In one embodiment, the recombinant constructs of the present invention comprise a vector, such as a plasmid or viral vector, into which a nucleic acid having any of the nucleotide sequences of SEQ ID NO: 1-8051 or a fragment thereof is inserted, in a forward or reverse orientation. In the case of a vector comprising one of the ORFs of the present invention, the vector may further comprise regulatory sequences, including for example, a promoter, operably linked to the ORF. Large numbers of suitable vectors and promoters are known to those of skill in the art and are commercially available for generating the recombinant constructs of the present invention. The following vectors are provided by way of example. Bacterial: pBs, phagescript, PsiX174, pBluescript SK, pBs KS, pNH8a, pNH16a, pNH18a, pNH46a (Stratagene); pTrc99A, pKK223-3, pKK233-3, pDR540, pRIT5 (Pharmacia). Eukaryotic: pWLneo, pSV2cat, pOG44, PXTI, pSG (Stratagene) pSVK3, pBPV, pMSG, pSVL (Pharmacia).

[0084] The isolated polynucleotide of the invention may be operably linked to an expression control sequence such as the pMT2 or pED expression vectors disclosed in Kaufman et al., Nucleic Acids Res. 19, 4485-4490 (1991), in order to produce the protein recombinantly. Many suitable expression control sequences are known in the art. General methods of expressing recombinant proteins are also known and are exemplified in R. Kaufman, Methods in Enzymology 185, 537-566 (1990). As defined herein “operably linked” means that the isolated polynucleotide of the invention and an expression control sequence are situated within a vector or cell in such a way that the protein is expressed by a host cell which has been transformed (transfected) with the ligated polynucleotide/expression control sequence.

[0085] Promoter regions can be selected from any desired gene using CAT (chloramphenicol transferase) vectors or other vectors with selectable markers. Two appropriate vectors are pKK232-8 and pCM7. Particular named bacterial promoters include lacI, lacZ, T3, T7, gpt, lambda PR, and trc. Eukaryotic promoters include CMV immediate early, HSV thymidine kinase, early and late SV40, LTRs from retrovirus, and mouse metallothionein-I. Selection of the appropriate vector and promoter is well within the level of ordinary skill in the art. Generally, recombinant expression vectors will include origins of replication and selectable markers permitting transformation of the host cell, e.g., the ampicillin resistance gene of E. coli and S. cerevisiae TRP1 gene, and a promoter derived from a highly-expressed gene to direct transcription of a downstream structural sequence. Such promoters can be derived from operons encoding glycolytic enzymes such as 3-phosphoglycerate kinase (PGK), a-factor, acid phosphatase, or heat shock proteins, among others. The heterologous structural sequence is assembled in appropriate phase with translation initiation and termination sequences, and preferably, a leader sequence capable of directing secretion of translated protein into the periplasmic space or extracellular medium. Optionally, the heterologous sequence can encode a fusion protein including an amino terminal identification peptide imparting desired characteristics, e.g., stabilization or simplified purification of expressed recombinant product. Useful expression vectors for bacterial use are constructed by inserting a structural DNA sequence encoding a desired protein together with suitable translation initiation and termination signals in operable reading phase with a functional promoter. The vector will comprise one or more phenotypic selectable markers and an origin of replication to ensure maintenance of the vector and to, if desirable, provide amplification within the host. Suitable prokaryotic hosts for transformation include E. coli, Bacillus subtilis, Salmonella typhimurium and various species within the genera Pseudomonas, Streptomyces, and Staphylococcus, although others may also be employed as a matter of choice.

[0086] As a representative but non-limiting example, useful expression vectors for bacterial use can comprise a selectable marker and bacterial origin of replication derived from commercially available plasmids comprising genetic elements of the well known cloning vector pBR322 (ATCC 37017). Such commercial vectors include, for example, pKK223-3 (Pharmacia Fine Chemicals, Uppsala, Sweden) and GEM 1 (Promega Biotech, Madison, Wis., USA). These pBR322 “backbone” sections are combined with an appropriate promoter and the structural sequence to be expressed. Following transformation of a suitable host strain and growth of the host strain to an appropriate cell density, the selected promoter is induced or derepressed by appropriate means (e.g., temperature shift or chemical induction) and cells are cultured for an additional period. Cells are typically harvested by centrifugation, disrupted by physical or chemical means, and the resulting crude extract retained for further purification.

[0087] Polynucleotides of the invention can also be used to induce immune responses. For example, as described in Fan et al., Nat. Biotech. 17:870-872 (1999), incorporated herein by reference, nucleic acid sequences encoding a polypeptide may be used to generate antibodies against the encoded polypeptide following topical administration of naked plasmid DNA or following injection, and preferably intramuscular injection of the DNA. The nucleic acid sequences are preferably inserted in a recombinant expression vector and may be in the form of naked DNA.

### 4.3 Antisense

[0088] Another aspect of the invention pertains to isolated antisense nucleic acid molecules that are hybridizable to or complementary to the nucleic acid molecule comprising the nucleotide sequence of SEQ ID NO: 1-8051, or fragments, analogs or derivatives thereof. An “antisense” nucleic acid comprises a nucleotide sequence that is complementary to a “sense” nucleic acid encoding a protein, e.g., complementary to the coding strand of a double-stranded cDNA molecule or complementary to an mRNA sequence. In specific aspects, antisense nucleic acid molecules are provided that comprise a sequence complementary to at least about 10, 25, 50, 100, 250 or 500 nucleotides or an entire coding strand, or to only a portion thereof. Nucleic acid molecules encoding fragments, homologs, derivatives and analogs of a protein of any of SEQ ID NO: 8052-16102 or antisense nucleic acids complementary to a nucleic acid sequence of SEQ ID NO: 1-8051 are additionally provided.

[0089] In one embodiment, an antisense nucleic acid molecule is antisense to a “coding region” of the coding strand of a nucleotide sequence of the invention. The term “coding region” refers to the region of the nucleotide sequence comprising codons which are translated into amino acid residues. In another embodiment, the antisense nucleic acid molecule is antisense to a “noncoding region” of the coding strand of a nucleotide sequence of the invention. The term “noncoding region” refers to 5′ and 3′ sequences which flank the coding region that are not translated into amino acids (i.e., also referred to as 5′ and 3′ untranslated regions).

[0090] Given the coding strand sequences encoding a nucleic acid disclosed herein (e.g., SEQ ID NO: 1-8051), antisense nucleic acids of the invention can be designed according to the rules of Watson and Crick or Hoogsteen base pairing. The antisense nucleic acid molecule can be complementary to the entire coding region of a mRNA, but more preferably is an oligonucleotide that is antisense to only a portion of the coding or noncoding region of a mRNA. For example, the antisense oligonucleotide can be complementary to the region surrounding the translation start site of a mRNA. An antisense oligonucleotide can be, for example, about 5, 10, 15, 20, 25, 30, 35, 40, 45 or 50 nucleotides in length. An antisense nucleic acid of the invention can be constructed using chemical synthesis or enzymatic ligation reactions using procedures known in the art. For example, an antisense nucleic acid (e.g., an antisense oligonucleotide) can be chemically synthesized using naturally occurring nucleotides or variously modified nucleotides designed to increase the biological stability of the molecules or to increase the physical stability of the duplex formed between the antisense and sense nucleic acids, e.g., phosphorothioate derivatives and acridine substituted nucleotides can be used.

[0091] Examples of modified nucleotides that can be used to generate the antisense nucleic acid include: 5-fluorouracil, 5-bromouracil, 5-chlorouracil, 5-iodouracil, hypoxanthine, xanthine, 4-acetylcytosine, 5-(carboxyhydroxylmethyl) uracil, 5-carboxymethylaminomethyl-2-thiouridine, 5-carboxymethylaminomethyluracil, dihydrouracil, beta-D-galactosylqueosine, inosine, N6-isopentenyladenine, 1-methylguanine, 1-methylinosine, 2,2-dimethylguanine, 2-methyladenine, 2-methylguanine, 3-methylcytosine, 5-methylcytosine, N6-adenine, 7-methylguanine, 5-methylaminomethyluracil, 5-methoxyaminomethyl-2-thiouracil, beta-D-mannosylqueosine, 5′-methoxycarboxymethyluracil, 5-methoxyuracil, 2-methylthio-N6-isopentenyladenine, uracil-5-oxyacetic acid (v), wybutoxosine, pseudouracil, queosine, 2-thiocytosine, 5-methyl-2-thiouracil, 2-thiouracil, 4-thiouracil, 5-methyluracil, uracil-5-oxyacetic acid methylester, uracil-5-oxyacetic acid (v), 5-methyl-2-thiouracil, 3-(3-amino-3-N-2-carboxypropyl) uracil, (acp3)w, and 2,6-diaminopurine. Alternatively, the antisense nucleic acid can be produced biologically using an expression vector into which a nucleic acid has been subcloned in an antisense orientation (i.e., RNA transcribed from the inserted nucleic acid will be of an antisense orientation to a target nucleic acid of interest, described further in the following subsection).

[0092] The antisense nucleic acid molecules of the invention are typically administered to a subject or generated in situ such that they hybridize with or bind to cellular mRNA and/or genomic DNA encoding a protein according to the invention to thereby inhibit expression of the protein, e.g., by inhibiting transcription and/or translation. The hybridization can be by conventional nucleotide complementarity to form a stable duplex, or, for example, in the case of an antisense nucleic acid molecule that binds to DNA duplexes, through specific interactions in the major groove of the double helix. An example of a route of administration of antisense nucleic acid molecules of the invention includes direct injection at a tissue site. Alternatively, antisense nucleic acid molecules can be modified to target selected cells and then administered systemically. For example, for systemic administration, antisense molecules can be modified such that they specifically bind to receptors or antigens expressed on a selected cell surface, e.g., by linking the antisense nucleic acid molecules to peptides or antibodies that bind to cell surface receptors or antigens. The antisense nucleic acid molecules can also be delivered to cells using the vectors described herein. To achieve sufficient intracellular concentrations of antisense molecules, vector constructs in which the antisense nucleic acid molecule is placed under the control of a strong pol II or pol III promoter are preferred.

[0093] In yet another embodiment, the antisense nucleic acid molecule of the invention is an α-anomeric nucleic acid molecule. An α-anomeric nucleic acid molecule forms specific double-stranded hybrids with complementary RNA in which, contrary to the usual α-units, the strands run parallel to each other (Gaultier et al. (1987) Nucleic Acids Res 15: 6625-6641). The antisense nucleic acid molecule can also comprise a 2′-o-methylribonucleotide (Inoue et al. (1987) Nucleic Acids Res 15: 6131-6148) or a chimeric RNA-DNA analogue (Inoue et al. (1987) FEBS Lett 215: 327-330).

### 4.4 Ribozymes and PNA Moieties

[0094] In still another embodiment, an antisense nucleic acid of the invention is a ribozyme. Ribozymes are catalytic RNA molecules with ribonuclease activity that are capable of cleaving a single-stranded nucleic acid, such as a mRNA, to which they have a complementary region. Thus, ribozymes (e.g., hammerhead ribozymes (described in Haselhoff and Gerlach (1988) Nature 334:585-591)) can be used to catalytically cleave a mRNA transcripts to thereby inhibit translation of a mRNA. A ribozyme having specificity for a nucleic acid of the invention can be designed based upon the nucleotide sequence of a DNA disclosed herein (i.e., SEQ ID NO: 1-8051). For example, a derivative of a Tetrahymena L-19 IVS RNA can be constructed in which the nucleotide sequence of the active site is complementary to the nucleotide sequence to be cleaved in an mRNA of SEQ ID NO: 1-8051 (see, e.g., Cech et al. U.S. Pat. No. 4,987,071; and Cech et al. U.S. Pat. No. 5,116,742). Alternatively, polynucleotides of the invention can be used to select a catalytic RNA having a specific ribonuclease activity from a pool of RNA molecules. See, e.g., Bartel et al., (1993) Science 261:1411-1418.

[0095] Alternatively, gene expression can be inhibited by targeting nucleotide sequences complementary to the regulatory region (e.g., promoter and/or enhancers) to form triple helical structures that prevent transcription of the gene in target cells. See generally, Helene. (1991) Anticancer Drug Des. 6: 569-84; Helene. et al. (1992) Ann. N.Y. Acad. Sci. 660:27-36; and Maher (1992) Bioassays 14: 807-15.

[0096] In various embodiments, the nucleic acids of the invention can be modified at the base moiety, sugar moiety or phosphate backbone to improve, e.g., the stability, hybridization, or solubility of the molecule. For example, the deoxyribose phosphate backbone of the nucleic acids can be modified to generate peptide nucleic acids (see Hyrup et al. (1996) Bioorg Med Chem 4: 5-23). As used herein, the terms “peptide nucleic acids” or “PNAs” refer to nucleic acid mimics, e.g. DNA mimics, in which the deoxyribose phosphate backbone is replaced by a pseudopeptide backbone and only the four natural nucleobases are retained. The neutral backbone of PNAs has been shown to allow for specific hybridization to DNA and RNA under conditions of low ionic strength. The synthesis of PNA oligomers can be performed using standard solid phase peptide synthesis protocols as described in Hyrup et al. (1996) above; Perry-O'Keefe et al. (1996) PNAS 93: 14670-675.

[0097] PNAs of the invention can be used in therapeutic and diagnostic applications. For example, PNAs can be used as antisense or antigene agents for sequence-specific modulation of gene expression by, e.g., inducing transcription or translation arrest or inhibiting replication. PNAs of the invention can also be used, e.g., in the analysis of single base pair mutations in a gene by, e.g., PNA directed PCR clamping; as artificial restriction enzymes when used in combination with other enzymes, e.g., S1 nucleases (Hyrup B. (1996) above); or as probes or primers for DNA sequence and hybridization (Hyrup et al. (1996), above; Perry-O'Keefe (1996), above).

[0098] In another embodiment, PNAs of the invention can be modified, e.g., to enhance their stability or cellular uptake, by attaching lipophilic or other helper groups to PNA, by the formation of PNA-DNA chimeras, or by the use of liposomes or other techniques of drug delivery known in the art. For example, PNA-DNA chimeras can be generated that may combine the advantageous properties of PNA and DNA. Such chimeras allow DNA recognition enzymes, e.g., RNase H and DNA polymerases, to interact with the DNA portion while the PNA portion would provide high binding affinity and specificity. PNA-DNA chimeras can be linked using linkers of appropriate lengths selected in terms of base stacking, number of bonds between the nucleobases, and orientation (Hyrup (1996) above). The synthesis of PNA-DNA chimeras can be performed as described in Hyrup (1996) above and Finn et al. (1996) Nucl Acids Res 24: 3357-63. For example, a DNA chain can be synthesized on a solid support using standard phosphoramidite coupling chemistry, and modified nucleoside analogs, e.g., 5′-(4-methoxytrityl)amino-5′-deoxy-thymidine phosphoramidite, can be used between the PNA and the 5′ end of DNA (Mag et al. (1989) Nucl Acid Res 17: 5973-88). PNA monomers are then coupled in a stepwise manner to produce a chimeric molecule with a 5′ PNA segment and a 3′ DNA segment (Finn et al. (1996) above). Alternatively, chimeric molecules can be synthesized with a 5′ DNA segment and a 3′ PNA segment. See, Petersen et al. (1975) Bioorg Med Chem Lett 5: 1119-11124.

[0099] In other embodiments, the oligonucleotide may include other appended groups such as peptides (e.g., for targeting host cell receptors in vivo), or agents facilitating transport across the cell membrane (see, e.g., Letsinger et al., 1989, Proc. Natl. Acad. Sci. U.S.A. 86:6553-6556; Lemaitre et al., 1987, Proc. Natl. Acad. Sci. 84:648-652; PCT Publication No. W088/09810) or the blood-brain barrier (see, e.g., PCT Publication No. W089/10134). In addition, oligonucleotides can be modified with hybridization triggered cleavage agents (See, e.g., Krol et al., 1988, BioTechniques 6:958-976) or intercalating agents (see, e.g., Zon, 1988, Pharm. Res. 5:539-549). To this end, the oligonucleotide may be conjugated to another molecule, e.g., a peptide, a hybridization triggered cross-linking agent, a transport agent, a hybridization-triggered cleavage agent, etc.

### 4.5 Hosts

[0100] The present invention further provides host cells genetically engineered to contain the polynucleotides of the invention. For example, such host cells may contain nucleic acids of the invention introduced into the host cell using known transformation, transfection or infection methods. The present invention still further provides host cells genetically engineered to express the polynucleotides of the invention, wherein such polynucleotides are in operative association with a regulatory sequence heterologous to the host cell which drives expression of the polynucleotides in the cell.

[0101] Knowledge of nucleic acid sequences allows for modification of cells to permit, or increase, expression of endogenous polypeptide. Cells can be modified (e.g., by homologous recombination) to provide increased polypeptide expression by replacing, in whole or in part, the naturally occurring promoter with all or part of a heterologous promoter so that the cells express the polypeptide at higher levels. The heterologous promoter is inserted in such a manner that it is operatively linked to the encoding sequences. See, for example, PCT International Publication No. WO94/12650, PCT International Publication No. WO92/20808, and PCT International Publication No. WO91/09955. It is also contemplated that, in addition to heterologous promoter DNA, amplifiable marker DNA (e.g., ada, dhfr, and the multifunctional CAD gene which encodes carbamyl phosphate synthase, aspartate transcarbamylase, and dihydroorotase) and/or intron DNA may be inserted along with the heterologous promoter DNA. If linked to the coding sequence, amplification of the marker DNA by standard selection methods results in co-amplification of the desired protein coding sequences in the cells.

[0102] The host cell can be a higher eukaryotic host cell, such as a mammalian cell, a lower eukaryotic host cell, such as a yeast cell, or the host cell can be a prokaryotic cell, such as a bacterial cell. Introduction of the recombinant construct into the host cell can be effected by calcium phosphate transfection, DEAE, dextran mediated transfection, or electroporation (Davis, L. et al., Basic Methods in Molecular Biology (1986)). The host cells containing one of the polynucleotides of the invention, can be used in conventional manners to produce the gene product encoded by the isolated fragment (in the case of an ORF) or can be used to produce a heterologous protein under the control of the EMF.

[0103] Any host/vector system can be used to express one or more of the ORFs of the present invention. These include, but are not limited to, eukaryotic hosts such as HeLa cells, Cv-1 cell, COS cells, 293 cells, and Sf9 cells, as well as prokaryotic host such as E. coli and B. subtilis. The most preferred cells are those which do not normally express the particular polypeptide or protein or which expresses the polypeptide or protein at low natural level. Mature proteins can be expressed in mammalian cells, yeast, bacteria, or other cells under the control of appropriate promoters. Cell-free translation systems can also be employed to produce such proteins using RNAs derived from the DNA constructs of the present invention. Appropriate cloning and expression vectors for use with prokaryotic and eukaryotic hosts are described by Sambrook, et al., in Molecular Cloning: A Laboratory Manual, Second Edition, Cold Spring Harbor, N.Y. (1989), the disclosure of which is hereby incorporated by reference.

[0104] Various mammalian cell culture systems can also be employed to express recombinant protein. Examples of mammalian expression systems include the COS-7 lines of monkey kidney fibroblasts, described by Gluzman, Cell 23:175 (1981). Other cell lines capable of expressing a compatible vector are, for example, the C127, monkey COS cells, Chinese Hamster Ovary (CHO) cells, human kidney 293 cells, human epidermal A431 cells, human Colo205 cells, 3T3 cells, CV-1 cells, other transformed primate cell lines, normal diploid cells, cell strains derived from in vitro culture of primary tissue, primary explants, HeLa cells, mouse L cells, BHK, HL-60, U937, HaK or Jurkat cells. Mammalian expression vectors will comprise an origin of replication, a suitable promoter and also any necessary ribosome binding sites, polyadenylation site, splice donor and acceptor sites, transcriptional termination sequences, and 5′ flanking nontranscribed sequences. DNA sequences derived from the SV40 viral genome, for example, SV40 origin, early promoter, enhancer, splice, and polyadenylation sites may be used to provide the required nontranscribed genetic elements. Recombinant polypeptides and proteins produced in bacterial culture are usually isolated by initial extraction from cell pellets, followed by one or more salting-out, aqueous ion exchange or size exclusion chromatography steps. Protein refolding steps can be used, as necessary, in completing configuration of the mature protein. Finally, high performance liquid chromatography (HPLC) can be employed for final purification steps. Microbial cells employed in expression of proteins can be disrupted by any convenient method, including freeze-thaw cycling, sonication, mechanical disruption, or use of cell lysing agents.

[0105] Alternatively, it may be possible to produce the protein in lower eukaryotes such as yeast or insects or in prokaryotes such as bacteria. Potentially suitable yeast strains include Saccharomyces cerevisiae, Schizosaccharomyces pombe, Kluyveromyces strains, Candida, or any yeast strain capable of expressing heterologous proteins. Potentially suitable bacterial strains include Escherichia coli, Bacillus subtilis, Salmonella typhimurium, or any bacterial strain capable of expressing heterologous proteins. If the protein is made in yeast or bacteria, it may be necessary to modify the protein produced therein, for example by phosphorylation or glycosylation of the appropriate sites, in order to obtain the functional protein. Such covalent attachments may be accomplished using known chemical or enzymatic methods.

[0106] In another embodiment of the present invention, cells and tissues may be engineered to express an endogenous gene comprising the polynucleotides of the invention under the control of inducible regulatory elements, in which case the regulatory sequences of the endogenous gene may be replaced by homologous recombination. As described herein, gene targeting can be used to replace a gene's existing regulatory region with a regulatory sequence isolated from a different gene or a novel regulatory sequence synthesized by genetic engineering methods. Such regulatory sequences may be comprised of promoters, enhancers, scaffold-attachment regions, negative regulatory elements, transcriptional initiation sites, regulatory protein binding sites or combinations of said sequences. Alternatively, sequences which affect the structure or stability of the RNA or protein produced may be replaced, removed, added, or otherwise modified by targeting. These sequence include polyadenylation signals, mRNA stability elements, splice sites, leader sequences for enhancing or modifying transport or secretion properties of the protein, or other sequences which alter or improve the function or stability of protein or RNA molecules.

[0107] The targeting event may be a simple insertion of the regulatory sequence, placing the gene under the control of the new regulatory sequence, e.g., inserting a new promoter or enhancer or both upstream of a gene. Alternatively, the targeting event may be a simple deletion of a regulatory element, such as the deletion of a tissue-specific negative regulatory element. Alternatively, the targeting event may replace an existing element; for example, a tissue-specific enhancer can be replaced by an enhancer that has broader or different cell-type specificity than the naturally occurring elements. Here, the naturally occurring sequences are deleted and new sequences are added. In all cases, the identification of the targeting event may be facilitated by the use of one or more selectable marker genes that are contiguous with the targeting DNA, allowing for the selection of cells in which the exogenous DNA has integrated into the host cell genome. The identification of the targeting event may also be facilitated by the use of one or more marker genes exhibiting the property of negative selection, such that the negatively selectable marker is linked to the exogenous DNA, but configured such that the negatively selectable marker flanks the targeting sequence, and such that a correct homologous recombination event with sequences in the host cell genome does not result in the stable integration of the negatively selectable marker. Markers useful for this purpose include the Herpes Simplex Virus thymidine kinase (TK) gene or the bacterial xanthine-guanine phosphoribosyl-transferase (gpt) gene.

[0108] The gene targeting or gene activation techniques which can be used in accordance with this aspect of the invention are more particularly described in U.S. Pat. No. 5,272,071 to Chappel; U.S. Pat. No. 5,578,461 to Sherwin et al.; International Application No. PCT/US92/09627 (WO93/09222) by Selden et al.; and International Application No. PCT/US90/06436 (WO91/06667) by Skoultchi et al., each of which is incorporated by reference herein in its entirety.

### 4.6 Polypeptides of the Invention

[0109] The isolated polypeptides of the invention include, but are not limited to, a polypeptide comprising: the amino acid sequences set forth as any one of SEQ ID NO: 8052-16102 or an amino acid sequence encoded by any one of the nucleotide sequences SEQ ID NO: 1-8051 or the corresponding full length or mature protein. Polypeptides of the invention also include polypeptides preferably with biological or immunological activity that are encoded by: (a) a polynucleotide having any one of the nucleotide sequences set forth in SEQ ID NO: 1-8051 or (b) polynucleotides encoding any one of the amino acid sequences set forth as SEQ ID NO: 8052-16102 or (c) polynucleotides that hybridize to the complement of the polynucleotides of either (a) or (b) under stringent hybridization conditions. The invention also provides biologically active or immunologically active variants of any of the amino acid sequences set forth as SEQ ID NO: 8052-16102 or the corresponding full length or mature protein; and “substantial equivalents” thereof (e.g., with at least about 65%, at least about 70%, at least about 75%, at least about 80%, at least about 85%, 86%, 87%, 88%, 89%, at least about 90%, 91%, 92%, 93%, 94%, typically at least about 95%, 96%, 97%, more typically at least about 98%, or most typically at least about 99% amino acid identity) that retain biological activity. Polypeptides encoded by allelic variants may have a similar, increased, or decreased activity compared to polypeptides comprising SEQ ID NO: 8052-16102.

[0110] Fragments of the proteins of the present invention which are capable of exhibiting biological activity are also encompassed by the present invention. Fragments of the protein may be in linear form or they may be cyclized using known methods, for example, as described in H. U. Saragovi, et al., Bio/Technology 10, 773-778 (1992) and in R. S. McDowell, et al., J. Amer. Chem. Soc. 114, 9245-9253 (1992), both of which are incorporated herein by reference. Such fragments may be fused to carrier molecules such as immunoglobulins for many purposes, including increasing the valency of protein binding sites.

[0111] The present invention also provides both full-length and mature forms (for example, without a signal sequence or precursor sequence) of the disclosed proteins. The protein coding sequence is identified in the sequence listing by translation of the disclosed nucleotide sequences. The mature form of such protein may be obtained by expression of a full-length polynucleotide in a suitable mammalian cell or other host cell. The sequence of the mature form of the protein is also determinable from the amino acid sequence of the full-length form. Where proteins of the present invention are membrane bound, soluble forms of the proteins are also provided. In such forms, part or all of the regions causing the proteins to be membrane bound are deleted so that the proteins are fully secreted from the cell in which they are expressed.

[0112] Protein compositions of the present invention may further comprise an acceptable carrier, such as a hydrophilic, e.g., pharmaceutically acceptable, carrier.

[0113] The present invention further provides isolated polypeptides encoded by the nucleic acid fragments of the present invention or by degenerate variants of the nucleic acid fragments of the present invention. By “degenerate variant” is intended nucleotide fragments which differ from a nucleic acid fragment of the present invention (e.g., an ORF) by nucleotide sequence but, due to the degeneracy of the genetic code, encode an identical polypeptide sequence. Preferred nucleic acid fragments of the present invention are the ORFs that encode proteins.

[0114] A variety of methodologies known in the art can be utilized to obtain any one of the isolated polypeptides or proteins of the present invention. At the simplest level, the amino acid sequence can be synthesized using commercially available peptide synthesizers. The synthetically-constructed protein sequences, by virtue of sharing primary, secondary or tertiary structural and/or conformational characteristics with proteins may possess biological properties in common therewith, including protein activity. This technique is particularly useful in producing small peptides and fragments of larger polypeptides. Fragments are useful, for example, in generating antibodies against the native polypeptide. Thus, they may be employed as biologically active or immunological substitutes for natural, purified proteins in screening of therapeutic compounds and in immunological processes for the development of antibodies.

[0115] The polypeptides and proteins of the present invention can alternatively be purified from cells which have been altered to express the desired polypeptide or protein. As used herein, a cell is said to be altered to express a desired polypeptide or protein when the cell, through genetic manipulation, is made to produce a polypeptide or protein which it normally does not produce or which the cell normally produces at a lower level. One skilled in the art can readily adapt procedures for introducing and expressing either recombinant or synthetic sequences into eukaryotic or prokaryotic cells in order to generate a cell which produces one of the polypeptides or proteins of the present invention.

[0116] The invention also relates to methods for producing a polypeptide comprising growing a culture of host cells of the invention in a suitable culture medium, and purifying the protein from the cells or the culture in which the cells are grown. For example, the methods of the invention include a process for producing a polypeptide in which a host cell containing a suitable expression vector that includes a polynucleotide of the invention is cultured under conditions that allow expression of the encoded polypeptide. The polypeptide can be recovered from the culture, conveniently from the culture medium, or from a lysate prepared from the host cells and further purified. Preferred embodiments include those in which the protein produced by such process is a full length or mature form of the protein.

[0117] In an alternative method, the polypeptide or protein is purified from bacterial cells which naturally produce the polypeptide or protein. One skilled in the art can readily follow known methods for isolating polypeptides and proteins in order to obtain one of the isolated polypeptides or proteins of the present invention. These include, but are not limited to, immunochromatography, HPLC, size-exclusion chromatography, ion-exchange chromatography, and immuno-affinity chromatography. See, e.g., Scopes, Protein Purification: Principles and Practice, Springer-Verlag (1994); Sambrook, et al., in Molecular Cloning: A Laboratory Manual; Ausubel et al., Current Protocols in Molecular Biology. Polypeptide fragments that retain biological/immunological activity include fragments comprising greater than about 100 amino acids, or greater than about 200 amino acids, and fragments that encode specific protein domains.

[0118] The purified polypeptides can be used in in vitro binding assays which are well known in the art to identify molecules which bind to the polypeptides. These molecules include but are not limited to, for e.g., small molecules, molecules from combinatorial libraries, antibodies or other proteins. The molecules identified in the binding assay are then tested for antagonist or agonist activity in in vivo tissue culture or animal models that are well known in the art. In brief, the molecules are titrated into a plurality of cell cultures or animals and then tested for either cell/animal death or prolonged survival of the animal/cells.

[0119] In addition, the peptides of the invention or molecules capable of binding to the peptides may be complexed with toxins, e.g., ricin or cholera, or with other compounds that are toxic to cells. The toxin-binding molecule complex is then targeted to a tumor or other cell by the specificity of the binding molecule for SEQ ID NO: 8052-16102.

[0120] The protein of the invention may also be expressed as a product of transgenic animals, e.g., as a component of the milk of transgenic cows, goats, pigs, or sheep which are characterized by somatic or germ cells containing a nucleotide sequence encoding the protein.

[0121] The proteins provided herein also include proteins characterized by amino acid sequences similar to those of purified proteins but into which modification are naturally provided or deliberately engineered. For example, modifications in the peptide or DNA sequence can be made by those skilled in the art using known techniques. Modifications of interest in the protein sequences may include the alteration, substitution, replacement, insertion or deletion of a selected amino acid residue in the coding sequence. For example, one or more of the cysteine residues may be deleted or replaced with another amino acid to alter the conformation of the molecule. Techniques for such alteration, substitution, replacement, insertion or deletion are well known to those skilled in the art (see, e.g., U.S. Pat. No. 4,518,584). Preferably, such alteration, substitution, replacement, insertion or deletion retains the desired activity of the protein. Regions of the protein that are important for the protein function can be determined by various methods known in the art including the alanine-scanning method which involved systematic substitution of single or strings of amino acids with alanine, followed by testing the resulting alanine-containing variant for biological activity. This type of analysis determines the importance of the substituted amino acid(s) in biological activity. Regions of the protein that are important for protein function may be determined by the eMATRIX program.

[0122] Other fragments and derivatives of the sequences of proteins which would be expected to retain protein activity in whole or in part and are useful for screening or other immunological methodologies may also be easily made by those skilled in the art given the disclosures herein. Such modifications are encompassed by the present invention.

[0123] The protein may also be produced by operably linking the isolated polynucleotide of the invention to suitable control sequences in one or more insect expression vectors, and employing an insect expression system. Materials and methods for baculovirus/insect cell expression systems are commercially available in kit form from, e.g., Invitrogen, San Diego, Calif., U.S.A. (the MaxBat™ kit), and such methods are well known in the art, as described in Summers and Smith, Texas Agricultural Experiment Station Bulletin No. 1555 (1987), incorporated herein by reference. As used herein, an insect cell capable of expressing a polynucleotide of the present invention is “transformed.”

[0124] The protein of the invention may be prepared by culturing transformed host cells under culture conditions suitable to express the recombinant protein. The resulting expressed protein may then be purified from such culture (i.e., from culture medium or cell extracts) using known purification processes, such as gel filtration and ion exchange chromatography. The purification of the protein may also include an affinity column containing agents which will bind to the protein; one or more column steps over such affinity resins as concanavalin A-agarose, heparin-toyopearl™ or Cibacrom blue 3GA Sepharose™; one or more steps involving hydrophobic interaction chromatography using such resins as phenyl ether, butyl ether, or propyl ether; or immunoaffinity chromatography.

[0125] Alternatively, the protein of the invention may also be expressed in a form that will facilitate purification. For example, it may be expressed as a fusion protein, such as those of maltose binding protein (MBP), glutathione-S-transferase (GST) or thioredoxin (TRX), or as a His-tag. Kits for expression and purification of such fusion proteins are commercially available from New England BioLab (Beverly, Mass.), Pharmacia (Piscataway, N.J.) and Invitrogen, respectively. The protein can also be tagged with an epitope and subsequently purified by using a specific antibody directed to such epitope. One such epitope (“FLAG®”) is commercially available from Kodak (New Haven, Conn.).

[0126] Finally, one or more reverse-phase high performance liquid chromatography (RP-HPLC) steps employing hydrophobic RP-HPLC media, e.g., silica gel having pendant methyl or other aliphatic groups, can be employed to further purify the protein. Some or all of the foregoing purification steps, in various combinations, can also be employed to provide a substantially homogeneous isolated recombinant protein. The protein thus purified is substantially free of other mammalian proteins and is defined in accordance with the present invention as an “isolated protein.”

[0127] The polypeptides of the invention include analogs (variants). This embraces fragments, as well as peptides in which one or more amino acids has been deleted, inserted, or substituted. Also, analogs of the polypeptides of the invention embrace fusions of the polypeptides or modifications of the polypeptides of the invention, wherein the polypeptide or analog is fused to another moiety or moieties, e.g., targeting moiety or another therapeutic agent. Such analogs may exhibit improved properties such as activity and/or stability. Examples of moieties which may be fused to the polypeptide or an analog include, for example, targeting moieties which provide for the delivery of polypeptide to pancreatic cells, e.g., antibodies to pancreatic cells, antibodies to immune cells such as T-cells, monocytes, dendritic cells, granulocytes, etc., as well as receptor and ligands expressed on pancreatic or immune cells. Other moieties which may be fused to the polypeptide include therapeutic agents which are used for treatment, for example, immunosuppressive drugs such as cyclosporin, SK506, azathioprine, CD3 antibodies and steroids. Also, polypeptides may be fused to immune modulators, and other cytokines such as alpha or beta interferon.

### 4.6.1 Determining Polypeptide and Polynucleotide Identity and Similarity

[0128] Preferred identity and/or similarity are designed to give the largest match between the sequences tested. Methods to determine identity and similarity are codified in computer programs including, but are not limited to, the GCG program package, including GAP (Devereux, J., et al., Nucleic Acids Research 12(1):387 (1984); Genetics Computer Group, University of Wisconsin, Madison, Wis.), BLASTP, BLASTN, BLASTX, FASTA (Altschul, S. F. et al., J. Molec. Biol. 215:403-410 (1990), PSI-BLAST (Altschul S. F. et al., Nucleic Acids Res. vol. 25, pp. 3389-3402, herein incorporated by reference), eMatrix software (Wu et al., J. Comp. Biol., Vol. 6, pp. 219-235 (1999), herein incorporated by reference), eMotif software (Nevill-Manning et al, ISMB-97, Vol. 4, pp. 202-209, herein incorporated by reference), pFam software (Sonnhammer et al., Nucleic Acids Res., Vol. 26 (1), pp. 320-322 (1998), herein incorporated by reference) and the Kyte-Doolittle hydrophobocity prediction algorithm (J. Mol. Biol, 157, pp. 105-31 (1982), incorporated herein by reference). The BLAST programs are publicly available from the National Center for Biotechnology Information (NCBI) and other sources (BLAST Manual, Altschul, S., et al. NCB NLM NIH Bethesda, Md. 20894; Altschul, S., et al., J. Mol. Biol. 215:403-410 (1990).

### 4.7 Chimeric and Fusion Proteins

[0129] The invention also provides chimeric or fusion proteins. As used herein, a “chimeric protein” or “fusion protein” comprises a polypeptide of the invention operatively linked to another polypeptide. Within a fusion protein the polypeptide according to the invention can correspond to all or a portion of a protein according to the invention. In one embodiment, a fusion protein comprises at least one biologically active portion of a protein according to the invention. In another embodiment, a fusion protein comprises at least two biologically active portions of a protein according to the invention. Within the fusion protein, the term “operatively linked” is intended to indicate that the polypeptide according to the invention and the other polypeptide are fused in-frame to each other. The polypeptide can be fused to the N-terminus or C-terminus.

[0130] For example, in one embodiment a fusion protein comprises a polypeptide according to the invention operably linked to the extracellular domain of a second protein.

[0131] In another embodiment, the fusion protein is a GST-fusion protein in which the polypeptide sequences of the invention are fused to the C-terminus of the GST (i.e., glutathione S-transferase) sequences.

[0132] In another embodiment, the fusion protein is an immunoglobulin fusion protein in which the polypeptide sequences according to the invention comprises one or more domains are fused to sequences derived from a member of the immunoglobulin protein family. The immunoglobulin fusion proteins of the invention can be incorporated into pharmaceutical compositions and administered to a subject to inhibit an interaction between a ligand and a protein of the invention on the surface of a cell, to thereby suppress signal transduction in vivo. The immunoglobulin fusion proteins can be used to affect the bioavailability of a cognate ligand. Inhibition of the ligand/protein interaction may be useful therapeutically for both the treatment of proliferative and differentiative disorders, e,g., cancer as well as modulating (e.g., promoting or inhibiting) cell survival. Moreover, the immunoglobulin fusion proteins of the invention can be used as immunogens to produce antibodies in a subject, to purify ligands, and in screening assays to identify molecules that inhibit the interaction of a polypeptide of the invention with a ligand.

[0133] A chimeric or fusion protein of the invention can be produced by standard recombinant DNA techniques. For example, DNA fragments coding for the different polypeptide sequences are ligated together in-frame in accordance with conventional techniques, e.g., by employing blunt-ended or stagger-ended termini for ligation, restriction enzyme digestion to provide for appropriate termini, filling-in of cohesive ends as appropriate, alkaline phosphatase treatment to avoid undesirable joining, and enzymatic ligation. In another embodiment, the fusion gene can be synthesized by conventional techniques including automated DNA synthesizers. Alternatively, PCR amplification of gene fragments can be carried out using anchor primers that give rise to complementary overhangs between two consecutive gene fragments that can subsequently be annealed and reamplified to generate a chimeric gene sequence (see, for example, Ausubel et al. (eds.) CURRENT PROTOCOLS IN MOLECULAR BIOLOGY, John Wiley & Sons, 1992). Moreover, many expression vectors are commercially available that already encode a fusion moiety (e.g., a GST polypeptide). A nucleic acid encoding a polypeptide of the invention can be cloned into such an expression vector such that the fusion moiety is linked in-frame to the protein of the invention.

### 4.8 Gene Therapy

[0134] Mutations in the polynucleotides of the invention gene may result in loss of normal function of the encoded protein. The invention thus provides gene therapy to restore normal activity of the polypeptides of the invention; or to treat disease states involving polypeptides of the invention. Delivery of a functional gene encoding polypeptides of the invention to appropriate cells is effected ex vivo, in situ, or in vivo by use of vectors, and more particularly viral vectors (e.g., adenovirus, adeno-associated virus, or a retrovirus), or ex vivo by use of physical DNA transfer methods (e.g., liposomes or chemical treatments). See, for example, Anderson, Nature, supplement to vol. 392, no. 6679, pp. 25-20 (1998). For additional reviews of gene therapy technology see Friedmann, Science, 244: 1275-1281 (1989); Verma, Scientific American: 68-84 (1990); and Miller, Nature, 357: 455-460 (1992). Introduction of any one of the nucleotides of the present invention or a gene encoding the polypeptides of the present invention can also be accomplished with extrachromosomal substrates (transient expression) or artificial chromosomes (stable expression). Cells may also be cultured ex vivo in the presence of proteins of the present invention in order to proliferate or to produce a desired effect on or activity in such cells. Treated cells can then be introduced in vivo for therapeutic purposes. Alternatively, it is contemplated that in other human disease states, preventing the expression of or inhibiting the activity of polypeptides of the invention will be useful in treating the disease states. It is contemplated that antisense therapy or gene therapy could be applied to negatively regulate the expression of polypeptides of the invention.

[0135] Other methods inhibiting expression of a protein include the introduction of antisense molecules to the nucleic acids of the present invention, their complements, or their translated RNA sequences, by methods known in the art. Further, the polypeptides of the present invention can be inhibited by using targeted deletion methods, or the insertion of a negative regulatory element such as a silencer, which is tissue specific.

[0136] The present invention still further provides cells genetically engineered in vivo to express the polynucleotides of the invention, wherein such polynucleotides are in operative association with a regulatory sequence heterologous to the host cell which drives expression of the polynucleotides in the cell. These methods can be used to increase or decrease the expression of the polynucleotides of the present invention.

[0137] Knowledge of DNA sequences provided by the invention allows for modification of cells to permit, increase, or decrease, expression of endogenous polypeptide. Cells can be modified (e.g., by homologous recombination) to provide increased polypeptide expression by replacing, in whole or in part, the naturally occurring promoter with all or part of a heterologous promoter so that the cells express the protein at higher levels. The heterologous promoter is inserted in such a manner that it is operatively linked to the desired protein encoding sequences. See, for example, PCT International Publication No. WO 94/12650, PCT International Publication No. WO 92/20808, and PCT International Publication No. WO 91/09955. It is also contemplated that, in addition to heterologous promoter DNA, amplifiable marker DNA (e.g., ada, dhfr, and the multifunctional CAD gene which encodes carbamyl phosphate synthase, aspartate transcarbamylase, and dihydroorotase) and/or intron DNA may be inserted along with the heterologous promoter DNA. If linked to the desired protein coding sequence, amplification of the marker DNA by standard selection methods results in co-amplification of the desired protein coding sequences in the cells.

[0138] In another embodiment of the present invention, cells and tissues may be engineered to express an endogenous gene comprising the polynucleotides of the invention under the control of inducible regulatory elements, in which case the regulatory sequences of the endogenous gene may be replaced by homologous recombination. As described herein, gene targeting can be used to replace a gene's existing regulatory region with a regulatory sequence isolated from a different gene or a novel regulatory sequence synthesized by genetic engineering methods. Such regulatory sequences may be comprised of promoters, enhancers, scaffold-attachment regions, negative regulatory elements, transcriptional initiation sites, regulatory protein binding sites or combinations of said sequences. Alternatively, sequences which affect the structure or stability of the RNA or protein produced may be replaced, removed, added, or otherwise modified by targeting. These sequences include polyadenylation signals, mRNA stability elements, splice sites, leader sequences for enhancing or modifying transport or secretion properties of the protein, or other sequences which alter or improve the function or stability of protein or RNA molecules.

[0139] The targeting event may be a simple insertion of the regulatory sequence, placing the gene under the control of the new regulatory sequence, e.g., inserting a new promoter or enhancer or both upstream of a gene. Alternatively, the targeting event may be a simple deletion of a regulatory element, such as the deletion of a tissue-specific negative regulatory element. Alternatively, the targeting event may replace an existing element; for example, a tissue-specific enhancer can be replaced by an enhancer that has broader or different cell-type specificity than the naturally occurring elements. Here, the naturally occurring sequences are deleted and new sequences are added. In all cases, the identification of the targeting event may be facilitated by the use of one or more selectable marker genes that are contiguous with the targeting DNA, allowing for the selection of cells in which the exogenous DNA has integrated into the cell genome. The identification of the targeting event may also be facilitated by the use of one or more marker genes exhibiting the property of negative selection, such that the negatively selectable marker is linked to the exogenous DNA, but configured such that the negatively selectable marker flanks the targeting sequence, and such that a correct homologous recombination event with sequences in the host cell genome does not result in the stable integration of the negatively selectable marker. Markers useful for this purpose include the Herpes Simplex Virus thymidine kinase (TK) gene or the bacterial xanthine-guanine phosphoribosyl-transferase (gpt) gene.

[0140] The gene targeting or gene activation techniques which can be used in accordance with this aspect of the invention are more particularly described in U.S. Pat. No. 5,272,071 to Chappel; U.S. Pat. No. 5,578,461 to Sherwin et al.; International Application No. PCT/US92/09627 (WO93/09222) by Selden et al.; and International Application No. PCT/US90/06436 (WO91/06667) by Skoultchi et al., each of which is incorporated by reference herein in its entirety.

### 4.9 Transgenic Animals

[0141] In preferred methods to determine biological functions of the polypeptides of the invention in vivo, one or more genes provided by the invention are either over expressed or inactivated in the germ line of animals using homologous recombination [Capecchi, Science 244:1288-1292 (1989)]. Animals in which the gene is over expressed, under the regulatory control of exogenous or endogenous promoter elements, are known as transgenic animals. Animals in which an endogenous gene has been inactivated by homologous recombination are referred to as “knockout” animals. Knockout animals, preferably non-human mammals, can be prepared as described in U.S. Pat. No. 5,557,032, incorporated herein by reference. Transgenic animals are useful to determine the roles polypeptides of the invention play in biological processes, and preferably in disease states. Transgenic animals are useful as model systems to identify compounds that modulate lipid metabolism. Transgenic animals, preferably non-human mammals, are produced using methods as described in U.S. Pat. No. 5,489,743 and PCT Publication No. WO94/28122, incorporated herein by reference.

[0142] Transgenic animals can be prepared wherein all or part of a promoter of the polynucleotides of the invention is either activated or inactivated to alter the level of expression of the polypeptides of the invention. Inactivation can be carried out using homologous recombination methods described above. Activation can be achieved by supplementing or even replacing the homologous promoter to provide for increased protein expression. The homologous promoter can be supplemented by insertion of one or more heterologous enhancer elements known to confer promoter activation in a particular tissue.

[0143] The polynucleotides of the present invention also make possible the development, through, e.g., homologous recombination or knock out strategies, of animals that fail to express polypeptides of the invention or that express a variant polypeptide. Such animals are useful as models for studying the in vivo activities of polypeptide as well as for studying modulators of the polypeptides of the invention.

[0144] In preferred methods to determine biological functions of the polypeptides of the invention in vivo, one or more genes provided by the invention are either over expressed or inactivated in the germ line of animals using homologous recombination [Capecchi, Science 244:1288-1292 (1989)]. Animals in which the gene is over expressed, under the regulatory control of exogenous or endogenous promoter elements, are known as transgenic animals. Animals in which an endogenous gene has been inactivated by homologous recombination are referred to as “knockout” animals. Knockout animals, preferably non-human mammals, can be prepared as described in U.S. Pat. No. 5,557,032, incorporated herein by reference. Transgenic animals are useful to determine the roles polypeptides of the invention play in biological processes, and preferably in disease states. Transgenic animals are useful as model systems to identify compounds that modulate lipid metabolism. Transgenic animals, preferably non-human mammals, are produced using methods as described in U.S. Pat. No. 5,489,743 and PCT Publication No. WO94/28122, incorporated herein by reference.

[0145] Transgenic animals can be prepared wherein all or part of the polynucleotides of the invention promoter is either activated or inactivated to alter the level of expression of the polypeptides of the invention. Inactivation can be carried out using homologous recombination methods described above. Activation can be achieved by supplementing or even replacing the homologous promoter to provide for increased protein expression. The homologous promoter can be supplemented by insertion of one or more heterologous enhancer elements known to confer promoter activation in a particular tissue.

### 4.10 Uses and Biological Activity

[0146] The polynucleotides and proteins of the present invention are expected to exhibit one or more of the uses or biological activities (including those associated with assays cited herein) identified herein. Uses or activities described for proteins of the present invention may be provided by administration or use of such proteins or of polynucleotides encoding such proteins (such as, for example, in gene therapies or vectors suitable for introduction of DNA). The mechanism underlying the particular condition or pathology will dictate whether the polypeptides of the invention, the polynucleotides of the invention or modulators (activators or inhibitors) thereof would be beneficial to the subject in need of treatment. Thus, “therapeutic compositions of the invention” include compositions comprising isolated polynucleotides (including recombinant DNA molecules, cloned genes and degenerate variants thereof) or polypeptides of the invention (including full length protein, mature protein and truncations or domains thereof), or compounds and other substances that modulate the overall activity of the target gene products, either at the level of target gene/protein expression or target protein activity. Such modulators include polypeptides, analogs, (variants), including fragments and fusion proteins, antibodies and other binding proteins; chemical compounds that directly or indirectly activate or inhibit the polypeptides of the invention (identified, e.g., via drug screening assays as described herein); antisense polynucleotides and polynucleotides suitable for triple helix formation; and in particular antibodies or other binding partners that specifically recognize one or more epitopes of the polypeptides of the invention.

[0147] The polypeptides of the present invention may likewise be involved in cellular activation or in one of the other physiological pathways described herein.

### 4.10.1 Research Uses and Utilities

[0148] The polynucleotides provided by the present invention can be used by the research community for various purposes. The polynucleotides can be used to express recombinant protein for analysis, characterization or therapeutic use; as markers for tissues in which the corresponding protein is preferentially expressed (either constitutively or at a particular stage of tissue differentiation or development or in disease states); as molecular weight markers on gels; as chromosome markers or tags (when labeled) to identify chromosomes or to map related gene positions; to compare with endogenous DNA sequences in patients to identify potential genetic disorders; as probes to hybridize and thus discover novel, related DNA sequences; as a source of information to derive PCR primers for genetic fingerprinting; as a probe to “subtract-out” known sequences in the process of discovering other novel polynucleotides; for selecting and making oligomers for attachment to a “gene chip” or other support, including for examination of expression patterns; to raise anti-protein antibodies using DNA immunization techniques; and as an antigen to raise anti-DNA antibodies or elicit another immune response. Where the polynucleotide encodes a protein which binds or potentially binds to another protein (such as, for example, in a receptor-ligand interaction), the polynucleotide can also be used in interaction trap assays (such as, for example, that described in Gyuris et al., Cell 75:791-803 (1993)) to identify polynucleotides encoding the other protein with which binding occurs or to identify inhibitors of the binding interaction.

[0149] The polypeptides provided by the present invention can similarly be used in assays to determine biological activity, including in a panel of multiple proteins for high-throughput screening; to raise antibodies or to elicit another immune response; as a reagent (including the labeled reagent) in assays designed to quantitatively determine levels of the protein (or its receptor) in biological fluids; as markers for tissues in which the corresponding polypeptide is preferentially expressed (either constitutively or at a particular stage of tissue differentiation or development or in a disease state); and, of course, to isolate correlative receptors or ligands. Proteins involved in these binding interactions can also be used to screen for peptide or small molecule inhibitors or agonists of the binding interaction.

[0150] Any or all of these research utilities are capable of being developed into reagent grade or kit format for commercialization as research products.

[0151] Methods for performing the uses listed above are well known to those skilled in the art. References disclosing such methods include without limitation “Molecular Cloning: A Laboratory Manual”, 2d ed., Cold Spring Harbor Laboratory Press, Sambrook, J., E. F. Fritsch and T. Maniatis eds., 1989, and “Methods in Enzymology: Guide to Molecular Cloning Techniques”, Academic Press, Berger, S. L. and A. R. Kimmel eds., 1987.

### 4.10.2 Nutritional Uses

[0152] Polynucleotides and polypeptides of the present invention can also be used as nutritional sources or supplements. Such uses include without limitation use as a protein or amino acid supplement, use as a carbon source, use as a nitrogen source and use as a source of carbohydrate. In such cases the polypeptide or polynucleotide of the invention can be added to the feed of a particular organism or can be administered as a separate solid or liquid preparation, such as in the form of powder, pills, solutions, suspensions or capsules. In the case of microorganisms, the polypeptide or polynucleotide of the invention can be added to the medium in or on which the microorganism is cultured.

### 4.10.3 Cytokine and Cell Proliferation/Differentiation Activity

[0153] A polypeptide of the present invention may exhibit activity relating to cytokine, cell proliferation (either inducing or inhibiting) or cell differentiation (either inducing or inhibiting) activity or may induce production of other cytokines in certain cell populations. A polynucleotide of the invention can encode a polypeptide exhibiting such attributes. Many protein factors discovered to date, including all known cytokines, have exhibited activity in one or more factor-dependent cell proliferation assays, and hence the assays serve as a convenient confirmation of cytokine activity. The activity of therapeutic compositions of the present invention is evidenced by any one of a number of routine factor dependent cell proliferation assays for cell lines including, without limitation, 32D, DA2, DA1G, T10, B9, B9/11, BaF3, MC9/G, M+(preB M+), 2E8, RB5, DA1, 123, T1165, HT2, CTLL2, TF-1, Mo7e, CMK, HUVEC, and Caco. Therapeutic compositions of the invention can be used in the following:

[0154] Assays for T-cell or thymocyte proliferation include without limitation those described in: Current Protocols in Immunology, Ed by J. E. Coligan, A. M. Kruisbeek, D. H. Margulies, E. M. Shevach, W. Strober, Pub. Greene Publishing Associates and Wiley-Interscience (Chapter 3, In Vitro assays for Mouse Lymphocyte Function 3.1-3.19; Chapter 7, Immunologic studies in Humans); Takai et al., J. Immunol. 137:3494-3500, 1986; Bertagnolli et al., J. Immunol. 145:1706-1712, 1990; Bertagnolli et al., Cellular Immunology 133:327-341, 1991; Bertagnolli, et al., I. Immunol. 149:3778-3783, 1992; Bowman et al., I. Immunol. 152:1756-1761, 1994.

[0155] Assays for cytokine production and/or proliferation of spleen cells, lymph node cells or thymocytes include, without limitation, those described in: Polyclonal T cell stimulation, Kruisbeek, A. M. and Shevach, E. M. In Current Protocols in Immunology. J. E. e.a. Coligan eds. Vol 1 pp. 3.12.1-3.12.14, John Wiley and Sons, Toronto. 1994; and Measurement of mouse and human interleukin-γ, Schreiber, R. D. In Current Protocols in Immunology. J. E. e.a. Coligan eds. Vol 1 pp. 6.8.1-6.8.8, John Wiley and Sons, Toronto. 1994.

[0156] Assays for proliferation and differentiation of hematopoietic and lymphopoietic cells include, without limitation, those described in: Measurement of Human and Murine Interleukin 2 and Interleukin 4, Bottomly, K., Davis, L. S. and Lipsky, P. E. In Current Protocols in Immunology. J. E. e.a. Coligan eds. Vol 1 pp. 6.3.1-6.3.12, John Wiley and Sons, Toronto. 1991; deVries et al., J. Exp. Med. 173:1205-1211, 1991; Moreau et al., Nature 336:690-692, 1988; Greenberger et al., Proc. Natl. Acad. Sci. U.S.A. 80:2931-2938, 1983; Measurement of mouse and human interleukin 6-Nordan, R. In Current Protocols in Immunology. J. E. Coligan eds. Vol 1 pp. 6.6.1-6.6.5, John Wiley and Sons, Toronto. 1991; Smith et al., Proc. Natl. Aced. Sci. U.S.A. 83:1857-1861, 1986; Measurement of human Interleukin 11-Bennett, F., Giannotti, J., Clark, S. C. and Turner, K. J. In Current Protocols in Immunology. J. E. Coligan eds. Vol 1 pp. 6.15.1 John Wiley and Sons, Toronto. 1991; Measurement of mouse and human Interleukin 9-Ciarletta, A., Giannotti, J., Clark, S. C. and Turner, K. J. In Current Protocols in Immunology. J. E. Coligan eds. Vol 1 pp. 6.13.1, John Wiley and Sons, Toronto. 1991.

[0157] Assays for T-cell clone responses to antigens (which will identify, among others, proteins that affect APC-T cell interactions as well as direct T-cell effects by measuring proliferation and cytokine production) include, without limitation, those described in: Current Protocols in Immunology, Ed by J. E. Coligan, A. M. Kruisbeek, D. H. Margulies, E. M. Shevach, W Strober, Pub. Greene Publishing Associates and Wiley-Interscience (Chapter 3, In Vitro assays for Mouse Lymphocyte Function; Chapter 6, Cytokines and their cellular receptors; Chapter 7, Immunologic studies in Humans); Weinberger et al., Proc. Natl. Acad. Sci. USA 77:6091-6095, 1980; Weinberger et al., Eur. J. Immuni. 11:405-411, 1981; Takai et al., J. Immunol. 137:3494-3500, 1986; Takai et al., J. Immunol. 140:508-512, 1988.

### 4.10.4 Stem Cell Growth Factor Activity

[0158] A polypeptide of the present invention may exhibit stem cell growth factor activity and be involved in the proliferation, differentiation and survival of pluripotent and totipotent stem cells including primordial germ cells, embryonic stem cells, hematopoietic stem cells and/or germ line stem cells. Administration of the polypeptide of the invention to stem cells in vivo or ex vivo is expected to maintain and expand cell populations in a totipotential or pluripotential state which would be useful for re-engineering damaged or diseased tissues, transplantation, manufacture of bio-pharmaceuticals and the development of bio-sensors. The ability to produce large quantities of human cells has important working applications for the production of human proteins which currently must be obtained from non-human sources or donors, implantation of cells to treat diseases such as Parkinson's, Alzheimer's and other neurodegenerative diseases; tissues for grafting such as bone marrow, skin, cartilage, tendons, bone, muscle (including cardiac muscle), blood vessels, cornea, neural cells, gastrointestinal cells and others; and organs for transplantation such as kidney, liver, pancreas (including islet cells), heart and lung.

[0159] It is contemplated that multiple different exogenous growth factors and/or cytokines may be administered in combination with the polypeptide of the invention to achieve the desired effect, including any of the growth factors listed herein, other stem cell maintenance factors, and specifically including stem cell factor (SCF), leukemia inhibitory factor (LIF), Flt-3 ligand (Flt-3L), any of the interleukins, recombinant soluble IL-6 receptor fused to IL-6, macrophage inflammatory protein I-alpha (MIP-1-alpha), G-CSF, GM-CSF, thrombopoietin (TPO), platelet factor 4 (PF-4), platelet-derived growth factor (PDGF), neural growth factors and basic fibroblast growth factor (bFGF).

[0160] Since totipotent stem cells can give rise to virtually any mature cell type, expansion of these cells in culture will facilitate the production of large quantities of mature cells. Techniques for culturing stem cells are known in the art and administration of polypeptides of the invention, optionally with other growth factors and/or cytokines, is expected to enhance the survival and proliferation of the stem cell populations. This can be accomplished by direct administration of the polypeptide of the invention to the culture medium. Alternatively, stroma cells transfected with a polynucleotide that encodes for the polypeptide of the invention can be used as a feeder layer for the stem cell populations in culture or in vivo. Stromal support cells for feeder layers may include embryonic bone marrow fibroblasts, bone marrow stromal cells, fetal liver cells, or cultured embryonic fibroblasts (see U.S. Pat. No. 5,690,926).

[0161] Stem cells themselves can be transfected with a polynucleotide of the invention to induce autocrine expression of the polypeptide of the invention. This will allow for generation of undifferentiated totipotential/pluripotential stem cell lines that are useful as is or that can then be differentiated into the desired mature cell types. These stable cell lines can also serve as a source of undifferentiated totipotential/pluripotential mRNA to create cDNA libraries and templates for polymerase chain reaction experiments. These studies would allow for the isolation and identification of differentially expressed genes in stem cell populations that regulate stem cell proliferation and/or maintenance.

[0162] Expansion and maintenance of totipotent stem cell populations will be useful in the treatment of many pathological conditions. For example, polypeptides of the present invention may be used to manipulate stem cells in culture to give rise to neuroepithelial cells that can be used to augment or replace cells damaged by illness, autoimmune disease, accidental damage or genetic disorders. The polypeptide of the invention may be useful for inducing the proliferation of neural cells and for the regeneration of nerve and brain tissue, i.e. for the treatment of central and peripheral nervous system diseases and neuropathies, as well as mechanical and traumatic disorders which involve degeneration, death or trauma to neural cells or nerve tissue. In addition, the expanded stem cell populations can also be genetically altered for gene therapy purposes and to decrease host rejection of replacement tissues after grafting or implantation.

[0163] Expression of the polypeptide of the invention and its effect on stem cells can also be manipulated to achieve controlled differentiation of the stem cells into more differentiated cell types. A broadly applicable method of obtaining pure populations of a specific differentiated cell type from undifferentiated stem cell populations involves the use of a cell-type specific promoter driving a selectable marker. The selectable marker allows only cells of the desired type to survive. For example, stem cells can be induced to differentiate into cardiomyocytes (Wobus et al., Differentiation, 48: 173-182, (1991); Klug et al., J. Clin. Invest., 98(1): 216-224, (1998)) or skeletal muscle cells (Browder, L. W. In: Principles of Tissue Engineering eds. Lanza et al., Academic Press (1997)). Alternatively, directed differentiation of stem cells can be accomplished by culturing the stem cells in the presence of a differentiation factor such as retinoic acid and an antagonist of the polypeptide of the invention which would inhibit the effects of endogenous stem cell factor activity and allow differentiation to proceed.

[0164] In vitro cultures of stem cells can be used to determine if the polypeptide of the invention exhibits stem cell growth factor activity. Stem cells are isolated from any one of various cell sources (including hematopoietic stem cells and embryonic stem cells) and cultured on a feeder layer, as described by Thompson et al. Proc. Natl. Acad. Sci, U.S.A., 92: 7844-7848 (1995), in the presence of the polypeptide of the invention alone or in combination with other growth factors or cytokines. The ability of the polypeptide of the invention to induce stem cells proliferation is determined by colony formation on semi-solid support e.g. as described by Bernstein et al., Blood, 77: 2316-2321 (1991).

### 4.10.5 Hematopoiesis Regulating Activity

[0165] A polypeptide of the present invention may be involved in regulation of hematopoiesis and, consequently, in the treatment of myeloid or lymphoid cell disorders. Even marginal biological activity in support of colony forming cells or of factor-dependent cell lines indicates involvement in regulating hematopoiesis, e.g. in supporting the growth and proliferation of erythroid progenitor cells alone or in combination with other cytokines, thereby indicating utility, for example, in treating various anemias or for use in conjunction with irradiation/chemotherapy to stimulate the production of erythroid precursors and/or erythroid cells; in supporting the growth and proliferation of myeloid cells such as granulocytes and monocytes/macrophages (i.e., traditional CSF activity) useful, for example, in conjunction with chemotherapy to prevent or treat consequent myelo-suppression; in supporting the growth and proliferation of megakaryocytes and consequently of platelets thereby allowing prevention or treatment of various platelet disorders such as thrombocytopenia, and generally for use in place of or complimentary to platelet transfusions; and/or in supporting the growth and proliferation of hematopoietic stem cells which are capable of maturing to any and all of the above-mentioned hematopoietic cells and therefore find therapeutic utility in various stem cell disorders (such as those usually treated with transplantation, including, without limitation, aplastic anemia and paroxysmal nocturnal hemoglobinuria), as well as in repopulating the stem cell compartment post irradiation/chemotherapy, either in-vivo or ex-vivo (i.e., in conjunction with bone marrow transplantation or with peripheral progenitor cell transplantation (homologous or heterologous)) as normal cells or genetically manipulated for gene therapy.

[0166] Therapeutic compositions of the invention can be used in the following:

[0167] Suitable assays for proliferation and differentiation of various hematopoietic lines are cited above.

[0168] Assays for embryonic stem cell differentiation (which will identify, among others, proteins that influence embryonic differentiation hematopoiesis) include, without limitation, those described in: Johansson et al. Cellular Biology 15:141-151, 1995; Keller et al., Molecular and Cellular Biology 13:473-486, 1993; McClanahan et al., Blood 81:2903-2915, 1993.

[0169] Assays for stem cell survival and differentiation (which will identify, among others, proteins that regulate lympho-hematopoiesis) include, without limitation, those described in: Methylcellulose colony forming assays, Freshney, M. G. In Culture of Hematopoietic Cells. R. I. Freshney, et al. eds. Vol pp. 265-268, Wiley-Liss, Inc., New York, N.Y. 1994; Hirayama et al., Proc. Natl. Acad. Sci. USA 89:5907-5911, 1992; Primitive hematopoietic colony forming cells with high proliferative potential, McNiece, I. K. and Briddell, R. A. In Culture of Hematopoietic Cells. R. I. Freshney, et al. eds. Vol pp. 23-39, Wiley-Liss, Inc., New York, N.Y. 1994; Neben et al., Experimental Hematology 22:353-359, 1994; Cobblestone area forming cell assay, Ploemacher, R. E. In Culture of Hematopoietic Cells. R. I. Freshney, et al. eds. Vol pp. 1-21, Wiley-Liss, Inc., New York, N.Y. 1994; Long term bone marrow cultures in the presence of stromal cells, Spooncer, E., Dexter, M. and Allen, T. In Culture of Hematopoietic Cells. R. I. Freshney, et al. eds. Vol pp. 163-179, Wiley-Liss, Inc., New York, N.Y. 1994; Long term culture initiating cell assay, Sutherland, H. J. In Culture of Hematopoietic Cells. R. I. Freshney, et al. eds. Vol pp. 139-162, Wiley-Liss, Inc., New York, N.Y. 1994.

### 4.10.6 Tissue Growth Activity

[0170] A polypeptide of the present invention also may be involved in bone, cartilage, tendon, ligament and/or nerve tissue growth or regeneration, as well as in wound healing and tissue repair and replacement, and in healing of burns, incisions and ulcers.

[0171] A polypeptide of the present invention which induces cartilage and/or bone growth in circumstances where bone is not normally formed, has application in the healing of bone fractures and cartilage damage or defects in humans and other animals. Compositions of a polypeptide, antibody, binding partner, or other modulator of the invention may have prophylactic use in closed as well as open fracture reduction and also in the improved fixation of artificial joints. De novo bone formation induced by an osteogenic agent contributes to the repair of congenital, trauma induced, or oncologic resection induced craniofacial defects, and also is useful in cosmetic plastic surgery.

[0172] A polypeptide of this invention may also be involved in attracting bone-forming cells, stimulating growth of bone-forming cells, or inducing differentiation of progenitors of bone-forming cells. Treatment of osteoporosis, osteoarthritis, bone degenerative disorders, or periodontal disease, such as through stimulation of bone and/or cartilage repair or by blocking inflammation or processes of tissue destruction (collagenase activity, osteoclast activity, etc.) mediated by inflammatory processes may also be possible using the composition of the invention.

[0173] Another category of tissue regeneration activity that may involve the polypeptide of the present invention is tendon/ligament formation. Induction of tendon/ligament-like tissue or other tissue formation in circumstances where such tissue is not normally formed, has application in the healing of tendon or ligament tears, deformities and other tendon or ligament defects in humans and other animals. Such a preparation employing a tendon/ligament-like tissue inducing protein may have prophylactic use in preventing damage to tendon or ligament tissue, as well as use in the improved fixation of tendon or ligament to bone or other tissues, and in repairing defects to tendon or ligament tissue. De novo tendon/ligament-like tissue formation induced by a composition of the present invention contributes to the repair of congenital, trauma induced, or other tendon or ligament defects of other origin, and is also useful in cosmetic plastic surgery for attachment or repair of tendons or ligaments. The compositions of the present invention may provide environment to attract tendon- or ligament-forming cells, stimulate growth of tendon- or ligament-forming cells, induce differentiation of progenitors of tendon- or ligament-forming cells, or induce growth of tendon/ligament cells or progenitors ex vivo for return in vivo to effect tissue repair. The compositions of the invention may also be useful in the treatment of tendinitis, carpal tunnel syndrome and other tendon or ligament defects. The compositions may also include an appropriate matrix and/or sequestering agent as a carrier as is well known in the art.

[0174] The compositions of the present invention may also be useful for proliferation of neural cells and for regeneration of nerve and brain tissue, i.e. for the treatment of central and peripheral nervous system diseases and neuropathies, as well as mechanical and traumatic disorders, which involve degeneration, death or trauma to neural cells or nerve tissue. More specifically, a composition may be used in the treatment of diseases of the peripheral nervous system, such as peripheral nerve injuries, peripheral neuropathy and localized neuropathies, and central nervous system diseases, such as Alzheimer's, Parkinson's disease, Huntington's disease, amyotrophic lateral sclerosis, and Shy-Drager syndrome. Further conditions that may be treated in accordance with the present invention include mechanical and traumatic disorders, such as spinal cord disorders, head trauma and cerebrovascular diseases such as stroke. Peripheral neuropathies resulting from chemotherapy or other medical therapies may also be treatable using a composition of the invention.

[0175] Compositions of the invention may also be useful to promote better or faster closure of non-healing wounds, including without limitation pressure ulcers, ulcers associated with vascular insufficiency, surgical and traumatic wounds, and the like.

[0176] Compositions of the present invention may also be involved in the generation or regeneration of other tissues, such as organs (including, for example, pancreas, liver, intestine, kidney, skin, endothelium), muscle (smooth, skeletal or cardiac) and vascular (including vascular endothelium) tissue, or for promoting the growth of cells comprising such tissues. Part of the desired effects may be by inhibition or modulation of fibrotic scarring may allow normal tissue to regenerate. A polypeptide of the present invention may also exhibit angiogenic activity.

[0177] A composition of the present invention may also be useful for gut protection or regeneration and treatment of lung or liver fibrosis, reperfusion injury in various tissues, and conditions resulting from systemic cytokine damage.

[0178] A composition of the present invention may also be useful for promoting or inhibiting differentiation of tissues described above from precursor tissues or cells; or for inhibiting the growth of tissues described above.

[0179] Therapeutic compositions of the invention can be used in the following:

[0180] Assays for tissue generation activity include, without limitation, those described in: International Patent Publication No. WO95/16035 (bone, cartilage, tendon); International Patent Publication No. WO95/05846 (nerve, neuronal); International Patent Publication No. WO91/07491 (skin, endothelium).

[0181] Assays for wound healing activity include, without limitation, those described in: Winter, Epidermal Wound Healing, pps. 71-112 (Maibach, H. I. and Rovee, D. T., eds.), Year Book Medical Publishers, Inc., Chicago, as modified by Eaglstein and Mertz J. Invest. Dermatol 71:382-84 (1978).

### 4.10.7 Immune Stimulating or Suppressing Activity

[0182] A polypeptide of the present invention may also exhibit immune stimulating or immune suppressing activity, including without limitation the activities for which assays are described herein. A polynucleotide of the invention can encode a polypeptide exhibiting such activities. A protein may be useful in the treatment of various immune deficiencies and disorders (including severe combined immunodeficiency (SCID)), e.g., in regulating (up or down) growth and proliferation of T and/or B lymphocytes, as well as effecting the cytolytic activity of NK cells and other cell populations. These immune deficiencies may be genetic or be caused by viral (e.g., HIV) as well as bacterial or fungal infections, or may result from autoimmune disorders. More specifically, infectious diseases causes by viral, bacterial, fungal or other infection may be treatable using a protein of the present invention, including infections by HIV, hepatitis viruses, herpes viruses, mycobacteria, Leishmania spp., malaria spp. and various fungal infections such as candidiasis. Of course, in this regard, proteins of the present invention may also be useful where a boost to the immune system generally may be desirable, i.e., in the treatment of cancer. include, for example, connective tissue disease, multiple sclerosis, systemic lupus erythematosus, rheumatoid arthritis, autoimmune pulmonary inflammation, Guillain-Barre syndrome, autoimmune thyroiditis, insulin dependent diabetes mellitis, myasthenia gravis, graft-versus-host disease and autoimmune inflammatory eye disease. Such a protein (or antagonists thereof, including antibodies) of the present invention may also to be useful in the treatment of allergic reactions and conditions (e.g., anaphylaxis, serum sickness, drug reactions, food allergies, insect venom allergies, mastocytosis, allergic rhinitis, hypersensitivity pneumonitis, urticaria, angioedema, eczema, atopic dermatitis, allergic contact dermatitis, erythema multiforme, Stevens-Johnson syndrome, allergic conjunctivitis, atopic keratoconjunctivitis, venereal keratoconjunctivitis, giant papillary conjunctivitis and contact allergies), such as asthma (particularly allergic asthma) or other respiratory problems. Other conditions, in which immune suppression is desired (including, for example, organ transplantation), may also be treatable using a protein (or antagonists thereof) of the present invention. The therapeutic effects of the polypeptides or antagonists thereof on allergic reactions can be evaluated by in vivo animals models such as the cumulative contact enhancement test (Lastbom et al., Toxicology 125: 59-66, 1998), skin prick test (Hoffmann et al., Allergy 54: 446-54, 1999), guinea pig skin sensitization test (Vohr et al., Arch. Toxocol. 73: 501-9), and murine local lymph node assay (Kimber et al., J. Toxicol. Environ. Health 53: 563-79).

[0183] Using the proteins of the invention it may also be possible to modulate immune responses, in a number of ways. Down regulation may be in the form of inhibiting or blocking an immune response already in progress or may involve preventing the induction of an immune response. The functions of activated T cells may be inhibited by suppressing T cell responses or by inducing specific tolerance in T cells, or both. Immunosuppression of T cell responses is generally an active, non-antigen-specific, process which requires continuous exposure of the T cells to the suppressive agent. Tolerance, which involves inducing non-responsiveness or anergy in T cells, is distinguishable from immunosuppression in that it is generally antigen-specific and persists after exposure to the tolerizing agent has ceased. Operationally, tolerance can be demonstrated by the lack of a T cell response upon reexposure to specific antigen in the absence of the tolerizing agent.

[0184] Down regulating or preventing one or more antigen functions (including without limitation B lymphocyte antigen functions (such as, for example, B7)), e.g., preventing high level lymphokine synthesis by activated T cells, will be useful in situations of tissue, skin and organ transplantation and in graft-versus-host disease (GVHD). For example, blockage of T cell function should result in reduced tissue destruction in tissue transplantation. Typically, in tissue transplants, rejection of the transplant is initiated through its recognition as foreign by T cells, followed by an immune reaction that destroys the transplant. The administration of a therapeutic composition of the invention may prevent cytokine synthesis by immune cells, such as T cells, and thus acts as an immunosuppressant. Moreover, a lack of costimulation may also be sufficient to anergize the T cells, thereby inducing tolerance in a subject. Induction of long-term tolerance by B lymphocyte antigen-blocking reagents may avoid the necessity of repeated administration of these blocking reagents. To achieve sufficient immunosuppression or tolerance in a subject, it may also be necessary to block the function of a combination of B lymphocyte antigens.

[0185] The efficacy of particular therapeutic compositions in preventing organ transplant rejection or GVHD can be assessed using animal models that are predictive of efficacy in humans. Examples of appropriate systems which can be used include allogeneic cardiac grafts in rats and xenogeneic pancreatic islet cell grafts in mice, both of which have been used to examine the immunosuppressive effects of CTLA4Ig fusion proteins in vivo as described in Lenschow et al., Science 257:789-792 (1992) and Turka et al., Proc. Natl. Acad. Sci USA, 89:11102-11105 (1992). In addition, murine models of GVHD (see Paul ed., Fundamental Immunology, Raven Press, New York, 1989, pp. 846-847) can be used to determine the effect of therapeutic compositions of the invention on the development of that disease.

[0186] Blocking antigen function may also be therapeutically useful for treating autoimmune diseases. Many autoimmune disorders are the result of inappropriate activation of T cells that are reactive against self-tissue and which promote the production of cytokines and autoantibodies involved in the pathology of the diseases. Preventing the activation of autoreactive T cells may reduce or eliminate disease symptoms. Administration of reagents which block stimulation of T cells can be used to inhibit T cell activation and prevent production of autoantibodies or T cell-derived cytokines which may be involved in the disease process. Additionally, blocking reagents may induce antigen-specific tolerance of autoreactive T cells which could lead to long-term relief from the disease. The efficacy of blocking reagents in preventing or alleviating autoimmune disorders can be determined using a number of well-characterized animal models of human autoimmune diseases. Examples include murine experimental autoimmune encephalitis, systemic lupus erythmatosis in MRL/lpr/lpr mice or NZB hybrid mice, murine autoimmune collagen arthritis, diabetes mellitus in NOD mice and BB rats, and murine experimental myasthenia gravis (see Paul ed., Fundamental Immunology, Raven Press, New York, 1989, pp. 840-856).

[0187] Upregulation of an antigen function (e.g., a B lymphocyte antigen function), as a means of up regulating immune responses, may also be useful in therapy. Upregulation of immune responses may be in the form of enhancing an existing immune response or eliciting an initial immune response. For example, enhancing an immune response may be useful in cases of viral infection, including systemic viral diseases such as influenza, the common cold, and encephalitis.

[0188] Alternatively, anti-viral immune responses may be enhanced in an infected patient by removing T cells from the patient, costimulating the T cells in vitro with viral antigen-pulsed APCs either expressing a peptide of the present invention or together with a stimulatory form of a soluble peptide of the present invention and reintroducing the in vitro activated T cells into the patient. Another method of enhancing anti-viral immune responses would be to isolate infected cells from a patient, transfect them with a nucleic acid encoding a protein of the present invention as described herein such that the cells express all or a portion of the protein on their surface, and reintroduce the transfected cells into the patient. The infected cells would now be capable of delivering a costimulatory signal to, and thereby activate, T cells in vivo.

[0189] A polypeptide of the present invention may provide the necessary stimulation signal to T cells to induce a T cell mediated immune response against the transfected tumor cells. In addition, tumor cells which lack MHC class I or MHC class II molecules, or which fail to reexpress sufficient mounts of MHC class I or MHC class II molecules, can be transfected with nucleic acid encoding all or a portion of (e.g., a cytoplasmic-domain truncated portion) of an MHC class I alpha chain protein and β₂ microglobulin protein or an MHC class II alpha chain protein and an MHC class II beta chain protein to thereby express MHC class I or MHC class II proteins on the cell surface. Expression of the appropriate class I or class II MHC in conjunction with a peptide having the activity of a B lymphocyte antigen (e.g., B7-1, B7-2, B7-3) induces a T cell mediated immune response against the transfected tumor cell. Optionally, a gene encoding an antisense construct which blocks expression of an MHC class II associated protein, such as the invariant chain, can also be cotransfected with a DNA encoding a peptide having the activity of a B lymphocyte antigen to promote presentation of tumor associated antigens and induce tumor specific immunity. Thus, the induction of a T cell mediated immune response in a human subject may be sufficient to overcome tumor-specific tolerance in the subject.

[0190] The activity of a protein of the invention may, among other means, be measured by the following methods:

[0191] Suitable assays for thymocyte or splenocyte cytotoxicity include, without limitation, those described in: Current Protocols in Immunology, Ed by J. E. Coligan, A. M. Kruisbeek, D. H. Margulies, E. M. Shevach, W. Strober, Pub. Greene Publishing Associates and Wiley-Interscience (Chapter 3, In Vitro assays for Mouse Lymphocyte Function 3.1-3.19; Chapter 7, Immunologic studies in Humans); Herrmann et al., Proc. Natl. Acad. Sci. USA 78:2488-2492, 1981; Herrmann et al., J. Immunol. 128:1968-1974, 1982; Handa et al., J. Immunol. 135:1564-1572, 1985; Takai et al., I. Immunol. 137:3494-3500, 1986; Takai et al., J. Immunol. 140:508-512, 1988; Bowman et al., J. Virology 61:1992-1998; Bertagnolli et al., Cellular Immunology 133:327-341, 1991; Brown et al., J. Immunol. 153:3079-3092, 1994.

[0192] Assays for T-cell-dependent immunoglobulin responses and isotype switching (which will identify, among others, proteins that modulate T-cell dependent antibody responses and that affect Th1/Th2 profiles) include, without limitation, those described in: Maliszewski, J. Immunol. 144:3028-3033, 1990; and Assays for B cell function: In vitro antibody production, Mond, J. J. and Brunswick, M. In Current Protocols in Immunology. J. E. e.a. Coligan eds. Vol 1 pp. 3.8.1-3.8.16, John Wiley and Sons, Toronto. 1994.

[0193] Mixed lymphocyte reaction (MLR) assays (which will identify, among others, proteins that generate predominantly Th1 and CTL responses) include, without limitation, those described in: Current Protocols in Immunology, Ed by J. E. Coligan, A. M. Kruisbeek, D. H. Margulies, E. M. Shevach, W. Strober, Pub. Greene Publishing Associates and Wiley-Interscience (Chapter 3, In Vitro assays for Mouse Lymphocyte Function 3.1-3.19; Chapter 7, Immunologic studies in Humans); Takai et al., J. Immunol. 137:3494-3500, 1986; Takai et al., J. Immunol. 140:508-512, 1988; Bertagnolli et al., J. Immunol. 149:3778-3783, 1992.

[0194] Dendritic cell-dependent assays (which will identify, among others, proteins expressed by dendritic cells that activate naive T-cells) include, without limitation, those described in: Guery et al., J. Immunol. 134:536-544, 1995; Inaba et al., Journal of Experimental Medicine 173:549-559, 1991; Macatonia et al., Journal of Immunology 154:5071-5079, 1995; Porgador et al., Journal of Experimental Medicine 182:255-260, 1995; Nair et al., Journal of Virology 67:4062-4069, 1993; Huang et al., Science 264:961-965, 1994; Macatonia et al., Journal of Experimental Medicine 169:1255-1264, 1989; Bhardwaj et al., Journal of Clinical Investigation 94:797-807, 1994; and Inaba et al., Journal of Experimental Medicine 172:631-640, 1990.

[0195] Assays for lymphocyte survival/apoptosis (which will identify, among others, proteins that prevent apoptosis after superantigen induction and proteins that regulate lymphocyte homeostasis) include, without limitation, those described in: Darzynkiewicz et al., Cytometry 13:795-808, 1992; Gorczyca et al., Leukemia 7:659-670, 1993; Gorczyca et al., Cancer Research 53:1945-1951, 1993; Itoh et al., Cell 66:233-243, 1991; Zacharchuk, Journal of Immunology 145:4037-4045, 1990; Zamai et al., Cytometry 14:891-897, 1993; Gorczyca et al., International Journal of Oncology 1:639-648, 1992.

[0196] Assays for proteins that influence early steps of T-cell commitment and development include, without limitation, those described in: Antica et al., Blood 84:111-117, 1994; Fine et al., Cellular Immunology 155:111-122, 1994; Galy et al., Blood 85:2770-2778, 1995; Toki et al., Proc. Nat. Acad. Sci. USA 88:7548-7551, 1991.

### 4.10.8 Activin/Inhibin Activity

[0197] A polypeptide of the present invention may also exhibit activin- or inhibin-related activities. A polynucleotide of the invention may encode a polypeptide exhibiting such characteristics. Inhibins are characterized by their ability to inhibit the release of follicle stimulating hormone (FSH), while activins and are characterized by their ability to stimulate the release of follicle stimulating hormone (FSH). Thus, a polypeptide of the present invention, alone or in heterodimers with a member of the inhibin family, may be useful as a contraceptive based on the ability of inhibins to decrease fertility in female mammals and decrease spermatogenesis in male mammals. Administration of sufficient amounts of other inhibins can induce infertility in these mammals. Alternatively, the polypeptide of the invention, as a homodimer or as a heterodimer with other protein subunits of the inhibin group, may be useful as a fertility inducing therapeutic, based upon the ability of activin molecules in stimulating FSH release from cells of the anterior pituitary. See, for example, U.S. Pat. No. 4,798,885. A polypeptide of the invention may also be useful for advancement of the onset of fertility in sexually immature mammals, so as to increase the lifetime reproductive performance of domestic animals such as, but not limited to, cows, sheep and pigs.

[0198] The activity of a polypeptide of the invention may, among other means, be measured by the following methods.

[0199] Assays for activin/inhibin activity include, without limitation, those described in: Vale et al., Endocrinology 91:562-572, 1972; Ling et al., Nature 321:779-782, 1986; Vale et al., Nature 321:776-779, 1986; Mason et al., Nature 318:659-663, 1985; Forage et al., Proc. Natl. Acad. Sci. USA 83:3091-3095, 1986.

### 4.10.9 Chemotactic/Chemokinetic Activity

[0200] A polypeptide of the present invention may be involved in chemotactic or chemokinetic activity for mammalian cells, including, for example, monocytes, fibroblasts, neutrophils, T-cells, mast cells, eosinophils, epithelial and/or endothelial cells. A polynucleotide of the invention can encode a polypeptide exhibiting such attributes. Chemotactic and chemokinetic receptor activation can be used to mobilize or attract a desired cell population to a desired site of action. Chemotactic or chemokinetic compositions (e.g. proteins, antibodies, binding partners, or modulators of the invention) provide particular advantages in treatment of wounds and other trauma to tissues, as well as in treatment of localized infections. For example, attraction of lymphocytes, monocytes or neutrophils to tumors or sites of infection may result in improved immune responses against the tumor or infecting agent.

[0201] A protein or peptide has chemotactic activity for a particular cell population if it can stimulate, directly or indirectly, the directed orientation or movement of such cell population. Preferably, the protein or peptide has the ability to directly stimulate directed movement of cells. Whether a particular protein has chemotactic activity for a population of cells can be readily determined by employing such protein or peptide in any known assay for cell chemotaxis.

[0202] Therapeutic compositions of the invention can be used in the following:

[0203] Assays for chemotactic activity (which will identify proteins that induce or prevent chemotaxis) consist of assays that measure the ability of a protein to induce the migration of cells across a membrane as well as the ability of a protein to induce the adhesion of one cell population to another cell population. Suitable assays for movement and adhesion include, without limitation, those described in: Current Protocols in Immunology, Ed by J. E. Coligan, A. M. Kruisbeek, D. H. Marguiles, E. M. Shevach, W. Strober, Pub. Greene Publishing Associates and Wiley-Interscience (Chapter 6.12, Measurement of alpha and beta Chemokines 6.12.1-6.12.28; Taub et al. J. Clin. Invest. 95:1370-1376, 1995; Lind et al. APMIS 103:140-146, 1995; Muller et al Eur. J. Immunol. 25:1744-1748; Gruber et al. J. of Immunol. 152:5860-5867, 1994; Johnston et al. J. of Immunol. 153:1762-1768, 1994.

### 4.10.10 Hemostatic and Thrombolytic Activity

[0204] A polypeptide of the invention may also be involved in hemostatis or thrombolysis or thrombosis. A polynucleotide of the invention can encode a polypeptide exhibiting such attributes. Compositions may be useful in treatment of various coagulation disorders (including hereditary disorders, such as hemophilias) or to enhance coagulation and other hemostatic events in treating wounds resulting from trauma, surgery or other causes. A composition of the invention may also be useful for dissolving or inhibiting formation of thromboses and for treatment and prevention of conditions resulting therefrom (such as, for example, infarction of cardiac and central nervous system vessels (e.g., stroke).

[0205] Therapeutic compositions of the invention can be used in the following:

[0206] Assay for hemostatic and thrombolytic activity include, without limitation, those described in: Linet et al., J. Clin. Pharmacol. 26:131-140, 1986; Burdick et al., Thrombosis Res. 45:413-419, 1987; Humphrey et al., Fibrinolysis 5:71-79 (1991); Schaub, Prostaglandins 35:467-474, 1988.

### 4.10.11 Cancer Diagnosis and Therapy

[0207] Polypeptides of the invention may be involved in cancer cell generation, proliferation or metastasis. Detection of the presence or amount of polynucleotides or polypeptides of the invention may be useful for the diagnosis and/or prognosis of one or more types of cancer. For example, the presence or increased expression of a polynucleotide/polypeptide of the invention may indicate a hereditary risk of cancer, a precancerous condition, or an ongoing malignancy. Conversely, a defect in the gene or absence of the polypeptide may be associated with a cancer condition. Identification of single nucleotide polymorphisms associated with cancer or a predisposition to cancer may also be useful for diagnosis or prognosis.

[0208] Cancer treatments promote tumor regression by inhibiting tumor cell proliferation, inhibiting angiogenesis (growth of new blood vessels that is necessary to support tumor growth) and/or prohibiting metastasis by reducing tumor cell motility or invasiveness. Therapeutic compositions of the invention may be effective in adult and pediatric oncology including in solid phase tumors/malignancies, locally advanced tumors, human soft tissue sarcomas, metastatic cancer, including lymphatic metastases, blood cell malignancies including multiple myeloma, acute and chronic leukemias, and lymphomas, head and neck cancers including mouth cancer, larynx cancer and thyroid cancer, lung cancers including small cell carcinoma and non-small cell cancers, breast cancers including small cell carcinoma and ductal carcinoma, gastrointestinal cancers including esophageal cancer, stomach cancer, colon cancer, colorectal cancer and polyps associated with colorectal neoplasia, pancreatic cancers, liver cancer, urologic cancers including bladder cancer and prostate cancer, malignancies of the female genital tract including ovarian carcinoma, uterine (including endometrial) cancers, and solid tumor in the ovarian follicle, kidney cancers including renal cell carcinoma, brain cancers including intrinsic brain tumors, neuroblastoma, astrocytic brain tumors, gliomas, metastatic tumor cell invasion in the central nervous system, bone cancers including osteomas, skin cancers including malignant melanoma, tumor progression of human skin keratinocytes, squamous cell carcinoma, basal cell carcinoma, hemangiopericytoma and Karposi's sarcoma.

[0209] Polypeptides, polynucleotides, or modulators of polypeptides of the invention (including inhibitors and stimulators of the biological activity of the polypeptide of the invention) may be administered to treat cancer. Therapeutic compositions can be administered in therapeutically effective dosages alone or in combination with adjuvant cancer therapy such as surgery, chemotherapy, radiotherapy, thermotherapy, and laser therapy, and may provide a beneficial effect, e.g. reducing tumor size, slowing rate of tumor growth, inhibiting metastasis, or otherwise improving overall clinical condition, without necessarily eradicating the cancer.

[0210] The composition can also be administered in therapeutically effective amounts as a portion of an anti-cancer cocktail. An anticancer cocktail is a mixture of the polypeptide or modulator of the invention with one or more anti-cancer drugs in addition to a pharmaceutically acceptable carrier for delivery. The use of anti-cancer cocktails as a cancer treatment is routine. Anti-cancer drugs that are well known in the art and can be used as a treatment in combination with the polypeptide or modulator of the invention include: Actinomycin D, Aminoglutethimide, Asparaginase, Bleomycin, Busulfan, Carboplatin, Carmustine, Chlorambucil, Cisplatin (cis-DDP), Cyclophosphamide, Cytarabine HCl (Cytosine arabinoside), Dacarbazine, Dactinomycin, Daunorubicin HCl, Doxorubicin HCl, Estramustine phosphate sodium, Etoposide (V16-213), Floxuridine, 5-Fluorouracil (5-Fu), Flutamide, Hydroxyurea (hydroxycarbamide), Ifosfamide, Interferon Alpha-2a, Interferon Alpha-2b, Leuprolide acetate (LHRH-releasing factor analog), Lomustine, Mechlorethamine HCl (nitrogen mustard), Melphalan, Mercaptopurine, Mesna, Methotrexate (MTX), Mitomycin, Mitoxantrone HCl, Octreotide, Plicamycin, Procarbazine HCl, Streptozocin, Tamoxifen citrate, Thioguanine, Thiotepa, Vinblastine sulfate, Vincristine sulfate, Amsacrine, Azacitidine, Hexamethylmelamine, Interleukin-2, Mitoguazone, Pentostatin, Semustine, Teniposide, and Vindesine sulfate.

[0211] In addition, therapeutic compositions of the invention may be used for prophylactic treatment of cancer. There are hereditary conditions and/or environmental situations (e.g. exposure to carcinogens) known in the art that predispose an individual to developing cancers. Under these circumstances, it may be beneficial to treat these individuals with therapeutically effective doses of the polypeptide of the invention to reduce the risk of developing cancers.

[0212] In vitro models can be used to determine the effective doses of the polypeptide of the invention as a potential cancer treatment. These in vitro models include proliferation assays of cultured tumor cells, growth of cultured tumor cells in soft agar (see Freshney, (1987) Culture of Animal Cells: A Manual of Basic Technique, Wily-Liss, New York, N.Y. Ch 18 and Ch 21), tumor systems in nude mice as described in Giovanella et al., J. Natl. Can. Inst., 52: 921-30 (1974), mobility and invasive potential of tumor cells in Boyden Chamber assays as described in Pilkington et al., Anticancer Res., 17: 4107-9 (1997), and angiogenesis assays such as induction of vascularization of the chick chorioallantoic membrane or induction of vascular endothelial cell migration as described in Ribatta et al., Intl. J. Dev. Biol., 40: 1189-97 (1999) and Li et al., Clin. Exp. Metastasis, 17:423-9 (1999), respectively. Suitable tumor cells lines are available, e.g. from American Type Tissue Culture Collection catalogs.

### 4.10.12 Receptor/Ligand Activity

[0213] A polypeptide of the present invention may also demonstrate activity as receptor, receptor ligand or inhibitor or agonist of receptor/ligand interactions. A polynucleotide of the invention can encode a polypeptide exhibiting such characteristics. Examples of such receptors and ligands include, without limitation, cytokine receptors and their ligands, receptor kinases and their ligands, receptor phosphatases and their ligands, receptors involved in cell-cell interactions and their ligands (including without limitation, cellular adhesion molecules (such as selectins, integrins and their ligands) and receptor/ligand pairs involved in antigen presentation, antigen recognition and development of cellular and humoral immune responses. Receptors and ligands are also useful for screening of potential peptide or small molecule inhibitors of the relevant receptor/ligand interaction. A protein of the present invention (including, without limitation, fragments of receptors and ligands) may themselves be useful as inhibitors of receptor/ligand interactions.

[0214] The activity of a polypeptide of the invention may, among other means, be measured by the following methods:

[0215] Suitable assays for receptor-ligand activity include without limitation those described in: Current Protocols in Immunology; Ed by J. E. Coligan, A. M. Kruisbeek, D. H. Margulies, E. M. Shevach, W. Strober, Pub. Greene Publishing Associates and Wiley-Interscience (Chapter 7.28, Measurement of Cellular Adhesion under static conditions 7.28.1-7.28.22), Takai et al., Proc. Natl. Acad. Sci. USA 84:6864-6868, 1987; Bierer et al., J. Exp. Med. 168:1145-1156, 1988; Rosenstein et al., J. Exp. Med. 169:149-160 1989; Stoltenborg et al., J. Immunol. Methods 175:59-68, 1994; Stitt et al., Cell 80:661-670, 1995.

[0216] By way of example, the polypeptides of the invention may be used as a receptor for a ligand(s) thereby transmitting the biological activity of that ligand(s). Ligands may be identified through binding assays, affinity chromatography, dihybrid screening assays, BIAcore assays, gel overlay assays, or other methods known in the art.

[0217] Studies characterizing drugs or proteins as agonist or antagonist or partial agonists or a partial antagonist require the use of other proteins as competing ligands. The polypeptides of the present invention or ligand(s) thereof may be labeled by being coupled to radioisotopes, colorimetric molecules or toxin molecules by conventional methods. (“Guide to Protein Purification” Murray P. Deutscher (ed) Methods in Enzymology Vol. 182 (1990) Academic Press, Inc. San Diego). Examples of radioisotopes include, but are not limited to, tritium and carbon-14. Examples of colorimetric molecules include, but are not limited to, fluorescent molecules such as fluorescamine, or rhodamine or other colorimetric molecules. Examples of toxins include, but are not limited, to ricin.

### 4.10.13 Drug Screening

[0218] This invention is particularly useful for screening chemical compounds by using the novel polypeptides or binding fragments thereof in any of a variety of drug screening techniques. The polypeptides or fragments employed in such a test may either be free in solution, affixed to a solid support, borne on a cell surface or located intracellularly. One method of drug screening utilizes eukaryotic or prokaryotic host cells which are stably transformed with recombinant nucleic acids expressing the polypeptide or a fragment thereof. Drugs are screened against such transformed cells in competitive binding assays. Such cells, either in viable or fixed form, can be used for standard binding assays. One may measure, for example, the formation of complexes between polypeptides of the invention or fragments and the agent being tested or examine the diminution in complex formation between the novel polypeptides and an appropriate cell line, which are well known in the art.

[0219] Sources for test compounds that may be screened for ability to bind to or modulate (i.e., increase or decrease) the activity of polypeptides of the invention include (1) inorganic and organic chemical libraries, (2) natural product libraries, and (3) combinatorial libraries comprised of either random or mimetic peptides, oligonucleotides or organic molecules.

[0220] Chemical libraries may be readily synthesized or purchased from a number of commercial sources, and may include structural analogs of known compounds or compounds that are identified as “hits” or “leads” via natural product screening.

[0221] The sources of natural product libraries are microorganisms (including bacteria and fungi), animals, plants or other vegetation, or marine organisms, and libraries of mixtures for screening may be created by: (1) fermentation and extraction of broths from soil, plant or marine microorganisms or (2) extraction of the organisms themselves. Natural product libraries include polyketides, non-ribosomal peptides, and (non-naturally occurring) variants thereof. For a review, see Science 282:63-68 (1998).

[0222] Combinatorial libraries are composed of large numbers of peptides, oligonucleotides or organic compounds and can be readily prepared by traditional automated synthesis methods, PCR, cloning or proprietary synthetic methods. Of particular interest are peptide and oligonucleotide combinatorial libraries. Still other libraries of interest include peptide, protein, peptidomimetic, multiparallel synthetic collection, recombinatorial, and polypeptide libraries. For a review of combinatorial chemistry and libraries created therefrom, see Myers, Curr. Opin. Biotechnol. 8:701-707 (1997). For reviews and examples of peptidomimetic libraries, see Al-Obeidi et al., Mol. Biotechnol, 9(3):205-23 (1998); Hruby et al., Curr Opin Chem Biol, 1 (1): 114-19 (1997); Dorner et al., Bioorg Med Chem, 4(5):709-15 (1996) (alkylated dipeptides).

[0223] Identification of modulators through use of the various libraries described herein permits modification of the candidate “hit” (or “lead”) to optimize the capacity of the “hit” to bind a polypeptide of the invention. The molecules identified in the binding assay are then tested for antagonist or agonist activity in in vivo tissue culture or animal models that are well known in the art. In brief, the molecules are titrated into a plurality of cell cultures or animals and then tested for either cell/animal death or prolonged survival of the animal/cells.

[0224] The binding molecules thus identified may be complexed with toxins, e.g., ricin or cholera, or with other compounds that are toxic to cells such as radioisotopes. The toxin-binding molecule complex is then targeted to a tumor or other cell by the specificity of the binding molecule for a polypeptide of the invention. Alternatively, the binding molecules may be complexed with imaging agents for targeting and imaging purposes.

### 4.10.14 Assay for Receptor Activity

[0225] The invention also provides methods to detect specific binding of a polypeptide e.g. a ligand or a receptor. The art provides numerous assays particularly useful for identifying previously unknown binding partners for receptor polypeptides of the invention. For example, expression cloning using mammalian or bacterial cells, or dihybrid screening assays can be used to identify polynucleotides encoding binding partners. As another example, affinity chromatography with the appropriate immobilized polypeptide of the invention can be used to isolate polypeptides that recognize and bind polypeptides of the invention. There are a number of different libraries used for the identification of compounds, and in particular small molecules, that modulate (i.e., increase or decrease) biological activity of a polypeptide of the invention. Ligands for receptor polypeptides of the invention can also be identified by adding exogenous ligands, or cocktails of ligands to two cells populations that are genetically identical except for the expression of the receptor of the invention: one cell population expresses the receptor of the invention whereas the other does not. The responses of the two cell populations to the addition of ligands(s) are then compared. Alternatively, an expression library can be co-expressed with the polypeptide of the invention in cells and assayed for an autocrine response to identify potential ligand(s). As still another example, BIAcore assays, gel overlay assays, or other methods known in the art can be used to identify binding partner polypeptides, including, (1) organic and inorganic chemical libraries, (2) natural product libraries, and (3) combinatorial libraries comprised of random peptides, oligonucleotides or organic molecules.

[0226] The role of downstream intracellular signaling molecules in the signaling cascade of the polypeptide of the invention can be determined. For example, a chimeric protein in which the cytoplasmic domain of the polypeptide of the invention is fused to the extracellular portion of a protein, whose ligand has been identified, is produced in a host cell. The cell is then incubated with the ligand specific for the extracellular portion of the chimeric protein, thereby activating the chimeric receptor. Known downstream proteins involved in intracellular signaling can then be assayed for expected modifications i.e. phosphorylation. Other methods known to those in the art can also be used to identify signaling molecules involved in receptor activity.

### 4.10.15 Anti-Inflammatory Activity

[0227] Compositions of the present invention may also exhibit anti-inflammatory activity. The anti-inflammatory activity may be achieved by providing a stimulus to cells involved in the inflammatory response, by inhibiting or promoting cell-cell interactions (such as, for example, cell adhesion), by inhibiting or promoting chemotaxis of cells involved in the inflammatory process, inhibiting or promoting cell extravasation, or by stimulating or suppressing production of other factors which more directly inhibit or promote an inflammatory response. Compositions with such activities can be used to treat inflammatory conditions including chronic or acute conditions), including without limitation intimation associated with infection (such as septic shock, sepsis or systemic inflammatory response syndrome (SIRS)), ischemia-reperfusion injury, endotoxin lethality, arthritis, complement-mediated hyperacute rejection, nephritis, cytokine or chemokine-induced lung injury, inflammatory bowel disease, Crohn's disease or resulting from over production of cytokines such as TNF or IL-1. Compositions of the invention may also be useful to treat anaphylaxis and hypersensitivity to an antigenic substance or material. Compositions of this invention may be utilized to prevent or treat conditions such as, but not limited to, sepsis, acute pancreatitis, endotoxin shock, cytokine induced shock, rheumatoid arthritis, chronic inflammatory arthritis, pancreatic cell damage from diabetes mellitus type 1, graft versus host disease, inflammatory bowel disease, inflammation associated with pulmonary disease, other autoimmune disease or inflammatory disease, an antiproliferative agent such as for acute or chronic mylegenous leukemia or in the prevention of premature labor secondary to intrauterine infections.

### 4.10.16 Leukemias

[0228] Leukemias and related disorders may be treated or prevented by administration of a therapeutic that promotes or inhibits function of the polynucleotides and/or polypeptides of the invention. Such leukemias and related disorders include but are not limited to acute leukemia, acute lymphocytic leukemia, acute myelocytic leukemia, myeloblastic, promyelocytic, myelomonocytic, monocytic, erythroleukemia, chronic leukemia, chronic myelocytic (granulocytic) leukemia and chronic lymphocytic leukemia (for a review of such disorders, see Fishman et al., 1985, Medicine, 2d Ed., J.B. Lippincott Co., Philadelphia).

### 4.10.17 Nervous System Disorders

[0229] Nervous system disorders, involving cell types which can be tested for efficacy of intervention with compounds that modulate the activity of the polynucleotides and/or polypeptides of the invention, and which can be treated upon thus observing an indication of therapeutic utility, include but are not limited to nervous system injuries, and diseases or disorders which result in either a disconnection of axons, a diminution or degeneration of neurons, or demyelination. Nervous system lesions which may be treated in a patient (including human and non-human mammalian patients) according to the invention include but are not limited to the following lesions of either the central (including spinal cord, brain) or peripheral nervous systems:

[0230] (i) traumatic lesions, including lesions caused by physical injury or associated with surgery, for example, lesions which sever a portion of the nervous system, or compression injuries;

[0231] (ii) ischemic lesions, in which a lack of oxygen in a portion of the nervous system results in neuronal injury or death, including cerebral infarction or ischemia, or spinal cord infarction or ischemia;

[0232] (iii) infectious lesions, in which a portion of the nervous system is destroyed or injured as a result of infection, for example, by an abscess or associated with infection by human immunodeficiency virus, herpes zoster, or herpes simplex virus or with Lyme disease, tuberculosis, syphilis;

[0233] (iv) degenerative lesions, in which a portion of the nervous system is destroyed or injured as a result of a degenerative process including but not limited to degeneration associated with Parkinson's disease, Alzheimer's disease, Huntington's chorea, or amyotrophic lateral sclerosis;

[0234] (v) lesions associated with nutritional diseases or disorders, in which a portion of the nervous system is destroyed or injured by a nutritional disorder or disorder of metabolism including but not limited to, vitamin B12 deficiency, folic acid deficiency, Wernicke disease, tobacco-alcohol amblyopia, Marchiafava-Bignami disease (primary degeneration of the corpus callosum), and alcoholic cerebellar degeneration;

[0235] (vi) neurological lesions associated with systemic diseases including but not limited to diabetes (diabetic neuropathy, Bell's palsy), systemic lupus erythematosus, carcinoma, or sarcoidosis;

[0236] (vii) lesions caused by toxic substances including alcohol, lead, or particular neurotoxins; and

[0237] (viii) demyelinated lesions in which a portion of the nervous system is destroyed or injured by a demyelinating disease including but not limited to multiple sclerosis, human immunodeficiency virus-associated myelopathy, transverse myelopathy or various etiologies, progressive multifocal leukoencephalopathy, and central pontine myelinolysis.

[0238] Therapeutics which are useful according to the invention for treatment of a nervous system disorder may be selected by testing for biological activity in promoting the survival or differentiation of neurons. For example, and not by way of limitation, therapeutics which elicit any of the following effects may be useful according to the invention:

[0239] (i) increased survival time of neurons in culture;

[0240] (ii) increased sprouting of neurons in culture or in vivo;

[0241] (iii) increased production of a neuron-associated molecule in culture or in vivo, e.g., choline acetyltransferase or acetylcholinesterase with respect to motor neurons; or

[0242] (iv) decreased symptoms of neuron dysfunction in vivo.

[0243] Such effects may be measured by any method known in the art. In preferred, non-limiting embodiments, increased survival of neurons may be measured by the method set forth in Arakawa et al. (1990, J. Neurosci. 10:3507-3515); increased sprouting of neurons may be detected by methods set forth in Pestronk et al. (1980, Exp. Neurol. 70:65-82) or Brown et al. (1981, Ann. Rev. Neurosci. 4:17-42); increased production of neuron-associated molecules may be measured by bioassay, enzymatic assay, antibody binding, Northern blot assay, etc., depending on the molecule to be measured; and motor neuron dysfunction may be measured by assessing the physical manifestation of motor neuron disorder, e.g., weakness, motor neuron conduction velocity, or functional disability.

[0244] In specific embodiments, motor neuron disorders that may be treated according to the invention include but are not limited to disorders such as infarction, infection, exposure to toxin, trauma, surgical damage, degenerative disease or malignancy that may affect motor neurons as well as other components of the nervous system, as well as disorders that selectively affect neurons such as amyotrophic lateral sclerosis, and including but not limited to progressive spinal muscular atrophy, progressive bulbar palsy, primary lateral sclerosis, infantile and juvenile muscular atrophy, progressive bulbar paralysis of childhood (Fazio-Londe syndrome), poliomyelitis and the post polio syndrome, and Hereditary Motorsensory Neuropathy (Charcot-Marie-Tooth Disease).

### 4.10.18 Other Activities

[0245] A polypeptide of the invention may also exhibit one or more of the following additional activities or effects: inhibiting the growth, infection or function of, or killing, infectious agents, including, without limitation, bacteria, viruses, fungi and other parasites; effecting (suppressing or enhancing) bodily characteristics, including, without limitation, height, weight, hair color, eye color, skin, fat to lean ratio or other tissue pigmentation, or organ or body part size or shape (such as, for example, breast augmentation or diminution, change in bone form or shape); effecting biorhythms or circadian cycles or rhythms; effecting the fertility of male or female subjects; effecting the metabolism, catabolism, anabolism, processing, utilization, storage or elimination of dietary fat, lipid, protein, carbohydrate, vitamins, minerals, co-factors or other nutritional factors or component(s); effecting behavioral characteristics, including, without limitation, appetite, libido, stress, cognition (including cognitive disorders), depression (including depressive disorders) and violent behaviors; providing analgesic effects or other pain reducing effects; promoting differentiation and growth of embryonic stem cells in lineages other than hematopoietic lineages; hormonal or endocrine activity; in the case of enzymes, correcting deficiencies of the enzyme and treating deficiency-related diseases; treatment of hyperproliferative disorders (such as, for example, psoriasis); immunoglobulin-like activity (such as, for example, the ability to bind antigens or complement); and the ability to act as an antigen in a vaccine composition to raise an immune response against such protein or another material or entity which is cross-reactive with such protein.

### 4.10.19 Identification of Polymorphisms

[0246] The demonstration of polymorphisms makes possible the identification of such polymorphisms in human subjects and the pharmacogenetic use of this information for diagnosis and treatment. Such polymorphisms may be associated with, e.g., differential predisposition or susceptibility to various disease states (such as disorders involving inflammation or immune response) or a differential response to drug administration, and this genetic information can be used to tailor preventive or therapeutic treatment appropriately. For example, the existence of a polymorphism associated with a predisposition to inflammation or autoimmune disease makes possible the diagnosis of this condition in humans by identifying the presence of the polymorphism.

[0247] Polymorphisms can be identified in a variety of ways known in the art which all generally involve obtaining a sample from a patient, analyzing DNA from the sample, optionally involving isolation or amplification of the DNA, and identifying the presence of the polymorphism in the DNA. For example, PCR may be used to amplify an appropriate fragment of genomic DNA which may then be sequenced. Alternatively, the DNA may be subjected to allele-specific oligonucleotide hybridization (in which appropriate oligonucleotides are hybridized to the DNA under conditions permitting detection of a single base mismatch) or to a single nucleotide extension assay (in which an oligonucleotide that hybridizes immediately adjacent to the position of the polymorphism is extended with one or more labeled nucleotides). In addition, traditional restriction fragment length polymorphism analysis (using restriction enzymes that provide differential digestion of the genomic DNA depending on the presence or absence of the polymorphism) may be performed. Arrays with nucleotide sequences of the present invention can be used to detect polymorphisms. The array can comprise modified nucleotide sequences of the present invention in order to detect the nucleotide sequences of the present invention. In the alternative, any one of the nucleotide sequences of the present invention can be placed on the array to detect changes from those sequences.

[0248] Alternatively a polymorphism resulting in a change in the amino acid sequence could also be detected by detecting a corresponding change in amino acid sequence of the protein, e.g., by an antibody specific to the variant sequence.

### 4.10.20 Arthritis and Inflammation

[0249] The immunosuppressive effects of the compositions of the invention against rheumatoid arthritis are determined in an experimental animal model system. The experimental model system is adjuvant induced arthritis in rats, and the protocol is described by J. Holoshitz, et at., 1983, Science, 219:56, or by B. Waksman et al., 1963, Int. Arch. Allergy Appl. Immunol., 23:129. Induction of the disease can be caused by a single injection, generally intradermally, of a suspension of killed Mycobacterium tuberculosis in complete Freund's adjuvant (CFA). The route of injection can vary, but rats may be injected at the base of the tail with an adjuvant mixture. The polypeptide is administered in phosphate buffered solution (PBS) at a dose of about 1-5 mg/kg. The control consists of administering PBS only.

[0250] The procedure for testing the effects of the test compound would consist of intradermally injecting killed Mycobacterium tuberculosis in CFA followed by immediately administering the test compound and subsequent treatment every other day until day 24. At 14, 15, 18, 20, 22, and 24 days after injection of Mycobacterium CFA, an overall arthritis score may be obtained as described by J. Holoskitz above. An analysis of the data would reveal that the test compound would have a dramatic affect on the swelling of the joints as measured by a decrease of the arthritis score.

### 4.11 Therapeutic Methods

[0251] The compositions (including polypeptide fragments, analogs, variants and antibodies or other binding partners or modulators including antisense polynucleotides) of the invention have numerous applications in a variety of therapeutic methods. Examples of therapeutic applications include, but are not limited to, those exemplified herein.

### 4.11.1 Example

[0252] One embodiment of the invention is the administration of an effective amount of the polypeptides or other composition of the invention to individuals affected by a disease or disorder that can be modulated by regulating the peptides of the invention. While the mode of administration is not particularly important, parenteral administration is preferred. An exemplary mode of administration is to deliver an intravenous bolus. The dosage of the polypeptides or other composition of the invention will normally be determined by the prescribing physician. It is to be expected that the dosage will vary according to the age, weight, condition and response of the individual patient. Typically, the amount of polypeptide administered per dose will be in the range of about 0.01 μg/kg to 100 mg/kg of body weight, with the preferred dose being about 0.1 μg/kg to 10 mg/kg of patient body weight. For parenteral administration, polypeptides of the invention will be formulated in an injectable form combined with a pharmaceutically acceptable parenteral vehicle. Such vehicles are well known in the art and examples include water, saline, Ringer's solution, dextrose solution, and solutions consisting of small amounts of the human serum albumin. The vehicle may contain minor amounts of additives that maintain the isotonicity and stability of the polypeptide or other active ingredient. The preparation of such solutions is within the skill of the art.

### 4.12 Pharmaceutical Formulations and Routes of Administration

[0253] A protein or other composition of the present invention (from whatever source derived, including without limitation from recombinant and non-recombinant sources and including antibodies and other binding partners of the polypeptides of the invention) may be administered to a patient in need, by itself, or in pharmaceutical compositions where it is mixed with suitable carriers or excipient(s) at doses to treat or ameliorate a variety of disorders. Such a composition may optionally contain (in addition to protein or other active ingredient and a carrier) diluents, fillers, salts, buffers, stabilizers, solubilizers, and other materials well known in the art. The term “pharmaceutically acceptable” means a non-toxic material that does not interfere with the effectiveness of the biological activity of the active ingredient(s). The characteristics of the carrier will depend on the route of administration. The pharmaceutical composition of the invention may also contain cytokines, lymphokines, or other hematopoietic factors such as M-CSF, GM-CSF, TNF, IL-1, IL-2, IL-3, IL-4, IL-5, IL-6, IL-7, IL-8, IL-9, IL-10, IL-11, IL-12, IL-13, IL-14, IL-15, IFN, TNF0, TNF1, TNF2, G-CSF, Meg-CSF, thrombopoietin, stem cell factor, and erythropoietin. In further compositions, proteins of the invention may be combined with other agents beneficial to the treatment of the disease or disorder in question. These agents include various growth factors such as epidermal growth factor (EGF), platelet-derived growth factor (PDGF), transforming growth factors (TGF-α and TGF-β), insulin-like growth factor (IGF), as well as cytokines described herein.

[0254] The pharmaceutical composition may further contain other agents which either enhance the activity of the protein or other active ingredient or complement its activity or use in treatment. Such additional factors and/or agents may be included in the pharmaceutical composition to produce a synergistic effect with protein or other active ingredient of the invention, or to minimize side effects. Conversely, protein or other active ingredient of the present invention may be included in formulations of the particular clotting factor, cytokine, lymphokine, other hematopoietic factor, thrombolytic or anti-thrombotic factor, or anti-inflammatory agent to minimize side effects of the clotting factor, cytokine, lymphokine, other hematopoietic factor, thrombolytic or anti-thrombotic factor, or anti-inflammatory agent (such as IL-1Ra, IL-1 Hy1, IL-1 Hy2, anti-TNF, corticosteroids, immunosuppressive agents). A protein of the present invention may be active in multimers (e.g., heterodimers or homodimers) or complexes with itself or other proteins. As a result, pharmaceutical compositions of the invention may comprise a protein of the invention in such multimeric or complexed form.

[0255] As an alternative to being included in a pharmaceutical composition of the invention including a first protein, a second protein or a therapeutic agent may be concurrently administered with the first protein (e.g., at the same time, or at differing times provided that therapeutic concentrations of the combination of agents is achieved at the treatment site). Techniques for formulation and administration of the compounds of the instant application may be found in “Remington's Pharmaceutical Sciences,” Mack Publishing Co., Easton, Pa., latest edition. A therapeutically effective dose further refers to that amount of the compound sufficient to result in amelioration of symptoms, e.g., treatment, healing, prevention or amelioration of the relevant medical condition, or an increase in rate of treatment, healing, prevention or amelioration of such conditions. When applied to an individual active ingredient, administered alone, a therapeutically effective dose refers to that ingredient alone. When applied to a combination, a therapeutically effective dose refers to combined amounts of the active ingredients that result in the therapeutic effect, whether administered in combination, serially or simultaneously.

[0256] In practicing the method of treatment or use of the present invention, a therapeutically effective amount of protein or other active ingredient of the present invention is administered to a mammal having a condition to be treated. Protein or other active ingredient of the present invention may be administered in accordance with the method of the invention either alone or in combination with other therapies such as treatments employing cytokines, lymphokines or other hematopoietic factors. When co-administered with one or more cytokines, lymphokines or other hematopoietic factors, protein or other active ingredient of the present invention may be administered either simultaneously with the cytokine(s), lymphokine(s), other hematopoietic factor(s), thrombolytic or anti-thrombotic factors, or sequentially. If administered sequentially, the attending physician will decide on the appropriate sequence of administering protein or other active ingredient of the present invention in combination with cytokine(s), lymphokine(s), other hematopoietic factor(s), thrombolytic or anti-thrombotic factors.

### 4.12.1 Routes of Administration

[0257] Suitable routes of administration may, for example, include oral, rectal, transmucosal, or intestinal administration; parenteral delivery, including intramuscular, subcutaneous, intramedullary injections, as well as intrathecal, direct intraventricular, intravenous, intraperitoneal, intranasal, or intraocular injections. Administration of protein or other active ingredient of the present invention used in the pharmaceutical composition or to practice the method of the present invention can be carried out in a variety of conventional ways, such as oral ingestion, inhalation, topical application or cutaneous, subcutaneous, intraperitoneal, parenteral or intravenous injection. Intravenous administration to the patient is preferred.

[0258] Alternately, one may administer the compound in a local rather than systemic manner, for example, via injection of the compound directly into a arthritic joints or in fibrotic tissue, often in a depot or sustained release formulation. In order to prevent the scarring process frequently occurring as complication of glaucoma surgery, the compounds may be administered topically, for example, as eye drops. Furthermore, one may administer the drug in a targeted drug delivery system, for example, in a liposome coated with a specific antibody, targeting, for example, arthritic or fibrotic tissue. The liposomes will be targeted to and taken up selectively by the afflicted tissue.

[0259] The polypeptides of the invention are administered by any route that delivers an effective dosage to the desired site of action. The determination of a suitable route of administration and an effective dosage for a particular indication is within the level of skill in the art. Preferably for wound treatment, one administers the therapeutic compound directly to the site. Suitable dosage ranges for the polypeptides of the invention can be extrapolated from these dosages or from similar studies in appropriate animal models. Dosages can then be adjusted as necessary by the clinician to provide maximal therapeutic benefit.

### 4.12.2 Compositions/Formulations

[0260] Pharmaceutical compositions for use in accordance with the present invention thus may be formulated in a conventional manner using one or more physiologically acceptable carriers comprising excipients and auxiliaries which facilitate processing of the active compounds into preparations which can be used pharmaceutically. These pharmaceutical compositions may be manufactured in a manner that is itself known, e.g., by means of conventional mixing, dissolving, granulating, dragee-making, levigating, emulsifying, encapsulating, entrapping or lyophilizing processes. Proper formulation is dependent upon the route of administration chosen. When a therapeutically effective amount of protein or other active ingredient of the present invention is administered orally, protein or other active ingredient of the present invention will be in the form of a tablet, capsule, powder, solution or elixir. When administered in tablet form, the pharmaceutical composition of the invention may additionally contain a solid carrier such as a gelatin or an adjuvant. The tablet, capsule, and powder contain from about 5 to 95% protein or other active ingredient of the present invention, and preferably from about 25 to 90% protein or other active ingredient of the present invention. When administered in liquid form, a liquid carrier such as water, petroleum, oils of animal or plant origin such as peanut oil, mineral oil, soybean oil, or sesame oil, or synthetic oils may be added. The liquid form of the pharmaceutical composition may further contain physiological saline solution, dextrose or other saccharide solution, or glycols such as ethylene glycol, propylene glycol or polyethylene glycol. When administered in liquid form, the pharmaceutical composition contains from about 0.5 to 90% by weight of protein or other active ingredient of the present invention, and preferably from about 1 to 50% protein or other active-ingredient of the present invention.

[0261] When a therapeutically effective amount of protein or other active ingredient of the present invention is administered by intravenous, cutaneous or subcutaneous injection, protein or other active ingredient of the present invention will be in the form of a pyrogen-free, parenterally acceptable aqueous solution. The preparation of such parenterally acceptable protein or other active ingredient solutions, having due regard to pH, isotonicity, stability, and the like, is within the skill in the art. A preferred pharmaceutical composition for intravenous, cutaneous, or subcutaneous injection should contain, in addition to protein or other active ingredient of the present invention, an isotonic vehicle such as Sodium Chloride Injection, Ringer's Injection, Dextrose Injection, Dextrose and Sodium Chloride Injection, Lactated Ringer's Injection, or other vehicle as known in the art. The pharmaceutical composition of the present invention may also contain stabilizers, preservatives, buffers, antioxidants, or other additives known to those of skill in the art. For injection, the agents of the invention may be formulated in aqueous solutions, preferably in physiologically compatible buffers such as Hanks's solution, Ringer's solution, or physiological saline buffer. For transmucosal administration, penetrants appropriate to the barrier to be permeated are used in the formulation. Such penetrants are generally known in the art.

[0262] For oral administration, the compounds can be formulated readily by combining the active compounds with pharmaceutically acceptable carriers well known in the art. Such carriers enable the compounds of the invention to be formulated as tablets, pills, dragees, capsules, liquids, gels, syrups, slurries, suspensions and the like, for oral ingestion by a patient to be treated. Pharmaceutical preparations for oral use can be obtained from a solid excipient, optionally grinding a resulting mixture, and processing the mixture of granules, after adding suitable auxiliaries, if desired, to obtain tablets or dragee cores. Suitable excipients are, in particular, fillers such as sugars, including lactose, sucrose, mannitol, or sorbitol; cellulose preparations such as, for example, maize starch, wheat starch, rice starch, potato starch, gelatin, gum tragacanth, methyl cellulose, hydroxypropylmethyl-cellulose, sodium carboxymethylcellulose, and/or polyvinylpyrrolidone (PVP). If desired, disintegrating agents may be added, such as the cross-linked polyvinyl pyrrolidone, agar, or alginic acid or a salt thereof such as sodium alginate. Dragee cores are provided with suitable coatings. For this purpose, concentrated sugar solutions may be used, which may optionally contain gum arabic, talc, polyvinyl pyrrolidone, carbopol gel, polyethylene glycol, and/or titanium dioxide, lacquer solutions, and suitable organic solvents or solvent mixtures. Dyestuffs or pigments may be added to the tablets or dragee coatings for identification or to characterize different combinations of active compound doses.

[0263] Pharmaceutical preparations which can be used orally include push-fit capsules made of gelatin, as well as soft, sealed capsules made of gelatin and a plasticizer, such as glycerol or sorbitol. The push-fit capsules can contain the active ingredients in admixture with filler such as lactose, binders such as starches, and/or lubricants such as talc or magnesium stearate and, optionally, stabilizers. In soft capsules, the active compounds may be dissolved or suspended in suitable liquids, such as fatty oils, liquid paraffin, or liquid polyethylene glycols. In addition, stabilizers may be added. All formulations for oral administration should be in dosages suitable for such administration. For buccal administration, the compositions may take the form of tablets or lozenges formulated in conventional manner.

[0264] For administration by inhalation, the compounds for use according to the present invention are conveniently delivered in the form of an aerosol spray presentation from pressurized packs or a nebuliser, with the use of a suitable propellant, e.g., dichlorodifluoromethane, trichlorofluoromethane, dichlorotetrafluoroethane, carbon dioxide or other suitable gas. In the case of a pressurized aerosol the dosage unit may be determined by providing a valve to deliver a metered amount. Capsules and cartridges of, e.g., gelatin for use in an inhaler or insufflator may be formulated containing a powder mix of the compound and a suitable powder base such as lactose or starch. The compounds may be formulated for parenteral administration by injection, e.g., by bolus injection or continuous infusion. Formulations for injection may be presented in unit dosage form, e.g., in ampules or in multi-dose containers, with an added preservative. The compositions may take such forms as suspensions, solutions or emulsions in oily or aqueous vehicles, and may contain formulatory agents such as suspending, stabilizing and/or dispersing agents.

[0265] Pharmaceutical formulations for parenteral administration include aqueous solutions of the active compounds in water-soluble form. Additionally, suspensions of the active compounds may be prepared as appropriate oily injection suspensions. Suitable lipophilic solvents or vehicles include fatty oils such as sesame oil, or synthetic fatty acid esters, such as ethyl oleate or triglycerides, or liposomes. Aqueous injection suspensions may contain substances which increase the viscosity of the suspension, such as sodium carboxymethyl cellulose, sorbitol, or dextran. Optionally, the suspension may also contain suitable stabilizers or agents which increase the solubility of the compounds to allow for the preparation of highly concentrated solutions. Alternatively, the active ingredient may be in powder form for constitution with a suitable vehicle, e.g., sterile pyrogen-free water, before use.

[0266] The compounds may also be formulated in rectal compositions such as suppositories or retention enemas, e.g., containing conventional suppository bases such as cocoa butter or other glycerides. In addition to the formulations described previously, the compounds may also be formulated as a depot preparation. Such long acting formulations may be administered by implantation (for example subcutaneously or intramuscularly) or by intramuscular injection. Thus, for example, the compounds may be formulated with suitable polymeric or hydrophobic materials (for example as an emulsion in an acceptable oil) or ion exchange resins, or as sparingly soluble derivatives, for example, as a sparingly soluble salt.

[0267] A pharmaceutical carrier for the hydrophobic compounds of the invention is a co-solvent system comprising benzyl alcohol, a nonpolar surfactant, a water-miscible organic polymer, and an aqueous phase. The co-solvent system may be the VPD co-solvent system. VPD is a solution of 3% w/v benzyl alcohol, 8% w/v of the nonpolar surfactant polysorbate 80, and 65% w/v polyethylene glycol 300, made up to volume in absolute ethanol. The VPD co-solvent system (VPD:5W) consists of VPD diluted 1:1 with a 5% dextrose in water solution. This co-solvent system dissolves hydrophobic compounds well, and itself produces low toxicity upon systemic administration. Naturally, the proportions of a co-solvent system may be varied considerably without destroying its solubility and toxicity characteristics. Furthermore, the identity of the co-solvent components may be varied: for example, other low-toxicity nonpolar surfactants may be used instead of polysorbate 80; the fraction size of polyethylene glycol may be varied; other biocompatible polymers may replace polyethylene glycol, e.g. polyvinyl pyrrolidone; and other sugars or polysaccharides may substitute for dextrose. Alternatively, other delivery systems for hydrophobic pharmaceutical compounds may be employed. Liposomes and emulsions are well known examples of delivery vehicles or carriers for hydrophobic drugs. Certain organic solvents such as dimethylsulfoxide also may be employed, although usually at the cost of greater toxicity. Additionally, the compounds may be delivered using a sustained-release system, such as semipermeable matrices of solid hydrophobic polymers containing the therapeutic agent. Various types of sustained-release materials have been established and are well known by those skilled in the art. Sustained-release capsules may, depending on their chemical nature, release the compounds for a few weeks up to over 100 days. Depending on the chemical nature and the biological stability of the therapeutic reagent, additional strategies for protein or other active ingredient stabilization may be employed.

[0268] The pharmaceutical compositions also may comprise suitable solid or gel phase carriers or excipients. Examples of such carriers or excipients include but are not limited to calcium carbonate, calcium phosphate, various sugars, starches, cellulose derivatives, gelatin, and polymers such as polyethylene glycols. Many of the active ingredients of the invention may be provided as salts with pharmaceutically compatible counter ions. Such pharmaceutically acceptable base addition salts are those salts which retain the biological effectiveness and properties of the free acids and which are obtained by reaction with inorganic or organic bases such as sodium hydroxide, magnesium hydroxide, ammonia, trialkylamine, dialkylamine, monoalkylamine, dibasic amino acids, sodium acetate, potassium benzoate, triethanol amine and the like.

[0269] The pharmaceutical composition of the invention may be in the form of a complex of the protein(s) or other active ingredient(s) of present invention along with protein or peptide antigens. The protein and/or peptide antigen will deliver a stimulatory signal to both B and T lymphocytes. B-lymphocytes will respond to antigen through their surface immunoglobulin receptor. T lymphocytes will respond to antigen through the T cell receptor (TCR) following presentation of the antigen by MHC proteins. MHC and structurally related proteins including those encoded by class I and class II MHC genes on host cells will serve to present the peptide antigen(s) to T lymphocytes. The antigen components could also be supplied as purified MHC-peptide complexes alone or with co-stimulatory molecules that can directly signal T cells. Alternatively antibodies able to bind surface immunoglobulin and other molecules on B cells as well as antibodies able to bind the TCR and other molecules on T cells can be combined with the pharmaceutical composition of the invention.

[0270] The pharmaceutical composition of the invention may be in the form of a liposome in which protein of the present invention is combined, in addition to other pharmaceutically acceptable carriers, with amphipathic agents such as lipids which exist in aggregated form as micelles, insoluble monolayers, liquid crystals, or lamellar layers in aqueous solution. Suitable lipids for liposomal formulation include, without limitation, monoglycerides, diglycerides, sulfatides, lysolecithins, phospholipids, saponin, bile acids, and the like. Preparation of such liposomal formulations is within the level of skill in the art, as disclosed, for example, in U.S. Pat. Nos. 4,235,871; 4,501,728; 4,837,028; and 4,737,323, all of which are incorporated herein by reference.

[0271] The amount of protein or other active ingredient of the present invention in the pharmaceutical composition of the present invention will depend upon the nature and severity of the condition being treated, and on the nature of prior treatments which the patient has undergone. Ultimately, the attending physician will decide the amount of protein or other active ingredient of the present invention with which to treat each individual patient. Initially, the attending physician will administer low doses of protein or other active ingredient of the present invention and observe the patient's response. Larger doses of protein or other active ingredient of the present invention may be administered until the optimal therapeutic effect is obtained for the patient, and at that point the dosage is not increased further. It is contemplated that the various pharmaceutical compositions used to practice the method of the present invention should contain about 0.01 μg to about 100 mg (preferably about 0.1 μg to about 10 mg, more preferably about 0.1 μg to about 1 mg) of protein or other active ingredient of the present invention per kg body weight. For compositions of the present invention which are useful for bone, cartilage, tendon or ligament regeneration, the therapeutic method includes administering the composition topically, systematically, or locally as an implant or device. When administered, the therapeutic composition for use in this invention is, of course, in a pyrogen-free, physiologically acceptable form. Further, the composition may desirably be encapsulated or injected in a viscous form for delivery to the site of bone, cartilage or tissue damage. Topical administration may be suitable for wound healing and tissue repair. Therapeutically useful agents other than a protein or other active ingredient of the invention which may also optionally be included in the composition as described above, may alternatively or additionally, be administered simultaneously or sequentially with the composition in the methods of the invention. Preferably for bone and/or cartilage formation, the composition would include a matrix capable of delivering the protein-containing or other active ingredient-containing composition to the site of bone and/or cartilage damage, providing a structure for the developing bone and cartilage and optimally capable of being resorbed into the body. Such matrices may be formed of materials presently in use for other implanted medical applications.

[0272] The choice of matrix material is based on biocompatibility, biodegradability, mechanical properties, cosmetic appearance and interface properties. The particular application of the compositions will define the appropriate formulation. Potential matrices for the compositions may be biodegradable and chemically defined calcium sulfate, tricalcium phosphate, hydroxyapatite, polylactic acid, polyglycolic acid and polyanhydrides. Other potential materials are biodegradable and biologically well-defined, such as bone or dermal collagen. Further matrices are comprised of pure proteins or extracellular matrix components. Other potential matrices are nonbiodegradable and chemically defined, such as sintered hydroxyapatite, bioglass, aluminates, or other ceramics. Matrices may be comprised of combinations of any of the above-mentioned types of material, such as polylactic acid and hydroxyapatite or collagen and tricalcium phosphate. The bioceramics may be altered in composition, such as in calcium-aluminate-phosphate and processing to alter pore size, particle size, particle shape, and biodegradability. Presently preferred is a 50:50 (mole weight) copolymer of lactic acid and glycolic acid in the form of porous particles having diameters ranging from 150 to 800 microns. In some applications, it will be useful to utilize a sequestering agent, such as carboxymethyl cellulose or autologous blood clot, to prevent the protein compositions from disassociating from the matrix.

[0273] A preferred family of sequestering agents is cellulosic materials such as alkylcelluloses (including hydroxyalkylcelluloses), including methylcellulose, ethylcellulose, hydroxyethylcellulose, hydroxypropylcellulose, hydroxypropyl-methylcellulose, and carboxymethylcellulose, the most preferred being cationic salts of carboxymethylcellulose (CMC). Other preferred sequestering agents include hyaluronic acid, sodium alginate, poly(ethylene glycol), polyoxyethylene oxide, carboxyvinyl polymer and poly(vinyl alcohol). The amount of sequestering agent useful herein is 0.5-20 wt %, preferably 1-10 wt % based on total formulation weight, which represents the amount necessary to prevent desorption of the protein from the polymer matrix and to provide appropriate handling of the composition, yet not so much that the progenitor cells are prevented from infiltrating the matrix, thereby providing the protein the opportunity to assist the osteogenic activity of the progenitor cells. In further compositions, proteins or other active ingredients of the invention may be combined with other agents beneficial to the treatment of the bone and/or cartilage defect, wound, or tissue in question. These agents include various growth factors such as epidermal growth factor (EGF), platelet derived growth factor (PDGF), transforming growth factors (TGF-α and TGF-β), and insulin-like growth factor (IGF).

[0274] The therapeutic compositions are also presently valuable for veterinary applications. Particularly domestic animals and thoroughbred horses, in addition to humans, are desired patients for such treatment with proteins or other active ingredients of the present invention. The dosage regimen of a protein-containing pharmaceutical composition to be used in tissue regeneration will be determined by the attending physician considering various factors which modify the action of the proteins, e.g., amount of tissue weight desired to be formed, the site of damage, the condition of the damaged tissue, the size of a wound, type of damaged tissue (e.g., bone), the patient's age, sex, and diet, the severity of any infection, time of administration and other clinical factors. The dosage may vary with the type of matrix used in the reconstitution and with inclusion of other proteins in the pharmaceutical composition. For example, the addition of other known growth factors, such as IGF I (insulin like growth factor I), to the final composition, may also effect the dosage. Progress can be monitored by periodic assessment of tissue/bone growth and/or repair, for example, X-rays, histomorphometric determinations and tetracycline labeling.

[0275] Polynucleotides of the present invention can also be used for gene therapy. Such polynucleotides can be introduced either in vivo or ex vivo into cells for expression in a mammalian subject. Polynucleotides of the invention may also be administered by other known methods for introduction of nucleic acid into a cell or organism (including, without limitation, in the form of viral vectors or naked DNA). Cells may also be cultured ex vivo in the presence of proteins of the present invention in order to proliferate or to produce a desired effect on or activity in such cells. Treated cells can then be introduced in vivo for therapeutic purposes.

### 4.12.3 Effective Dosage

[0276] Pharmaceutical compositions suitable for use in the present invention include compositions wherein the active ingredients are contained in an effective amount to achieve its intended purpose. More specifically, a therapeutically effective amount means an amount effective to prevent development of or to alleviate the existing symptoms of the subject being treated. Determination of the effective amount is well within the capability of those skilled in the art, especially in light of the detailed disclosure provided herein. For any compound used in the method of the invention, the therapeutically effective dose can be estimated initially from appropriate in vitro assays. For example, a dose can be formulated in animal models to achieve a circulating concentration range that can be used to more accurately determine useful doses in humans. For example, a dose can be formulated in animal models to achieve a circulating concentration range that includes the IC₅₀ as determined in cell culture (i.e., the concentration of

[0277] A therapeutically effective dose refers to that amount of the compound that results in amelioration of symptoms or a prolongation of survival in a patient. Toxicity and therapeutic efficacy of such compounds can be determined by standard pharmaceutical procedures in cell cultures or experimental animals, e.g., for determining the LD₅₀ (the dose lethal to 50% of the population) and the ED₅₀ (the dose therapeutically effective in 50% of the population). The dose ratio between toxic and therapeutic effects is the therapeutic index and it can be expressed as the ratio between LD₅₀ and ED₅₀. Compounds which exhibit high therapeutic indices are preferred. The data obtained from these cell culture assays and animal studies can be used in formulating a range of dosage for use in human. The dosage of such compounds lies preferably within a range of circulating concentrations that include the ED₅₀ with little or no toxicity. The dosage may vary within this range depending upon the dosage form employed and the route of administration utilized. The exact formulation, route of administration and dosage can be chosen by the individual physician in view of the patient's condition. See, e.g., Fingl et al., 1975, in “The Pharmacological Basis of Therapeutics”, Ch. 1 p. 1. Dosage amount and interval may be adjusted individually to provide plasma levels of the active moiety which are sufficient to maintain the desired effects, or minimal effective concentration (MEC). The MEC will vary for each compound but can be estimated from in vitro data. Dosages necessary to achieve the MEC will depend on individual characteristics and route of administration. However, HPLC assays or bioassays can be used to determine plasma concentrations.

[0278] Dosage intervals can also be determined using MEC value. Compounds should be administered using a regimen that maintains plasma levels above the MEC for 10-90% of the time, preferably between 30-90% and most preferably between 50-90%. In cases of local administration or selective uptake, the effective local concentration of the drug may not be related to plasma concentration.

[0279] An exemplary dosage regimen for polypeptides or other compositions of the invention will be in the range of about 0.01 μg/kg to 100 mg/kg of body weight daily, with the preferred dose being about 0.1 μg/kg to 25 mg/kg of patient body weight daily, varying in adults and children. Dosing may be once daily, or equivalent doses may be delivered at longer or shorter intervals.

[0280] The amount of composition administered will, of course, be dependent on the subject being treated, on the subject's age and weight, the severity of the affliction, the manner of administration and the judgment of the prescribing physician.

### 4.12.4 Packaging

[0281] The compositions may, if desired, be presented in a pack or dispenser device which may contain one or more unit dosage forms containing the active ingredient. The pack may, for example, comprise metal or plastic foil, such as a blister pack. The pack or dispenser device may be accompanied by instructions for administration. Compositions comprising a compound of the invention formulated in a compatible pharmaceutical carrier may also be prepared, placed in an appropriate container, and labeled for treatment of an indicated condition.

### 4.13 Antibodies

[0282] Also included in the invention are antibodies to proteins, or fragments of proteins of the invention. The term “antibody” as used herein refers to immunoglobulin molecules and immunologically active portions of immunoglobulin (Ig) molecules, i.e., molecules that contain an antigen-binding site that specifically binds (immunoreacts with) an antigen. Such antibodies include, but are not limited to, polyclonal, monoclonal, chimeric, single chain, F_{ab}, F_{ab′} and F_{(ab′)2} fragments, and an F_{ab} expression library. In general, an antibody molecule obtained from humans relates to any of the classes IgG, IgM, IgA, IgE and IgD, which differ from one another by the nature of the heavy chain present in the molecule. Certain classes have subclasses as well, such as IgG₁, IgG₂, and others. Furthermore, in humans, the light chain may be a kappa chain or a lambda chain. Reference herein to antibodies includes a reference to all such classes, subclasses and types of human antibody species.

[0283] An isolated related protein of the invention may be intended to serve as an antigen, or a portion or fragment thereof, and additionally can be used as an immunogen to generate antibodies that immunospecifically bind the antigen, using standard techniques for polyclonal and monoclonal antibody preparation. The full-length protein can be used or, alternatively, the invention provides antigenic peptide fragments of the antigen for use as immunogens. An antigenic peptide fragment comprises at least 6 amino acid residues of the amino acid sequence of any of the full length proteins of the invention, and encompasses an epitope thereof such that an antibody raised against the peptide forms a specific immune complex with the full length protein or with any fragment that contains the epitope. Preferably, the antigenic peptide comprises at least 10 amino acid residues, or at least 15 amino acid residues, or at least 20 amino acid residues, or at least 30 amino acid residues. Preferred epitopes encompassed by the antigenic peptide are regions of the protein that are located on its surface; commonly these are hydrophilic regions.

[0284] In certain embodiments of the invention, at least one epitope encompassed by the antigenic peptide is a region on the surface of the protein of the invention, e.g., a hydrophilic region. A hydrophobicity analysis of the human related protein sequence will indicate which regions of a related protein are particularly hydrophilic and, therefore, are likely to encode surface residues useful for targeting antibody production. As a means for targeting antibody production, hydropathy plots showing regions of hydrophilicity and hydrophobicity may be generated by any method well known in the art, including, for example, the Kyte Doolittle or the Hopp Woods methods, either with or without Fourier transformation. See, e.g., Hopp and Woods, 1981, Proc. Nat. Acad. Sci USA 78: 3824-3828; Kyte and Doolittle 1982, J. Mol. Biol. 157: 105-142, each of which is incorporated herein by reference in its entirety. Antibodies that are specific for one or more domains within an antigenic protein, or derivatives, fragments, analogs or homologs thereof, are also provided herein.

[0285] A protein of the invention, or a derivative, fragment, analog, homolog or ortholog thereof, may be utilized as an immunogen in the generation of antibodies that immunospecifically bind these protein components.

[0286] Various procedures known within the art may be used for the production of polyclonal or monoclonal antibodies directed against a protein of the invention, or against derivatives, fragments, analogs homologs or orthologs thereof (see, for example, Antibodies: A Laboratory Manual, Harlow E, and Lane D, 1988, Cold Spring Harbor Laboratory Press, Cold Spring Harbor, N.Y., incorporated herein by reference). Some of these antibodies are discussed below.

### 5.13.1 Polyclonal Antibodies

[0287] For the production of polyclonal antibodies, various suitable host animals (e.g., rabbit, goat, mouse or other mammal) may be immunized by one or more injections with the native protein, a synthetic variant thereof, or a derivative of the foregoing. An appropriate immunogenic preparation can contain, for example, the naturally occurring immunogenic protein, a chemically synthesized polypeptide representing the immunogenic protein, or a recombinantly expressed immunogenic protein. Furthermore, the protein may be conjugated to a second protein known to be immunogenic in the mammal being immunized. Examples of such immunogenic proteins include but are not limited to keyhole limpet hemocyanin, serum albumin, bovine thyroglobulin, and soybean trypsin inhibitor. The preparation can further include an adjuvant. Various adjuvants used to increase the immunological response include, but are not limited to, Freund's (complete and incomplete), mineral gels (e.g., aluminum hydroxide), surface active substances (e.g., lysolecithin, pluronic polyols, polyanions, peptides, oil emulsions, dinitrophenol, etc.), adjuvants usable in humans such as Bacille Calmette-Guerin and Corynebacterium parvum, or similar immunostimulatory agents. Additional examples of adjuvants which can be employed include MPL-TDM adjuvant (monophosphoryl Lipid A, synthetic trehalose dicorynomycolate).

[0288] The polyclonal antibody molecules directed against the immunogenic protein can be isolated from the mammal (e.g., from the blood) and further purified by well known techniques, such as affinity chromatography using protein A or protein G, which provide primarily the IgG fraction of immune serum. Subsequently, or alternatively, the specific antigen which is the target of the immunoglobulin sought, or an epitope thereof, may be immobilized on a column to purify the immune specific antibody by immunoaffinity chromatography. Purification of immunoglobulins is discussed, for example, by D. Wilkinson (The Scientist, published by The Scientist, Inc., Philadelphia Pa., Vol. 14, No. 8 (Apr. 17, 2000), pp. 25-28).

### 5.13.2 Monoclonal Antibodies

[0289] The term “monoclonal antibody” (MAb) or “monoclonal antibody composition”, as used herein, refers to a population of antibody molecules that contain only one molecular species of antibody molecule consisting of a unique light chain gene product and a unique heavy chain gene product. In particular, the complementarity determining regions (CDRs) of the monoclonal antibody are identical in all the molecules of the population. MAbs thus contain an antigen-binding site capable of immunoreacting with a particular epitope of the antigen characterized by a unique binding affinity for it.

[0290] Monoclonal antibodies can be prepared using hybridoma methods, such as those described by Kohler and Milstein, Nature, 256:495 (1975). In a hybridoma method, a mouse, hamster, or other appropriate host animal, is typically immunized with an immunizing agent to elicit lymphocytes that produce or are capable of producing antibodies that will specifically bind to the immunizing agent. Alternatively, the lymphocytes can be immunized in vitro.

[0291] The immunizing agent will typically include the protein antigen, a fragment thereof or a fusion protein thereof. Generally, either peripheral blood lymphocytes are used if cells of human origin are desired, or spleen cells or lymph node cells are used if non-human mammalian sources are desired. The lymphocytes are then fused with an immortalized cell line using a suitable fusing agent, such as polyethylene glycol, to form a hybridoma cell (Goding, Monoclonal Antibodies: Principles and Practice, Academic Press, (1986) pp. 59-103). Immortalized cell lines are usually transformed mammalian cells, particularly myeloma cells of rodent, bovine and human origin. Usually, rat or mouse myeloma cell lines are employed. The hybridoma cells can be cultured in a suitable culture medium that preferably contains one or more substances that inhibit the growth or survival of the unfused, immortalized cells. For example, if the parental cells lack the enzyme hypoxanthine guanine phosphoribosyl transferase (HGPRT or HPRT), the culture medium for the hybridomas typically will include hypoxanthine, aminopterin, and thymidine (“HAT medium”), which substances prevent the growth of HGPRT-deficient cells.

[0292] Preferred immortalized cell lines are those that fuse efficiently, support stable high level expression of antibody by the selected antibody-producing cells, and are sensitive to a medium such as HAT medium. More preferred immortalized cell lines are murine myeloma lines, which can be obtained, for instance, from the Salk Institute Cell Distribution Center, San Diego, Calif. and the American Type Culture Collection, Manassas, Va. Human myeloma and mouse-human heteromyeloma cell lines also have been described for the production of human monoclonal antibodies (Kozbor, J. Immunol., 133:3001 (1984); Brodeur et al., Monoclonal Antibody Production Techniques and Applications, Marcel Dekker, Inc., New York, (1987) pp. 51-63).

[0293] The culture medium in which the hybridoma cells are cultured can then be assayed for the presence of monoclonal antibodies directed against the antigen. Preferably, the binding specificity of monoclonal antibodies produced by the hybridoma cells is determined by immunoprecipitation or by an in vitro binding assay, such as radioimmunoassay (RIA) or enzyme-linked immunoabsorbent assay (ELISA). Such techniques and assays are known in the art. The binding affinity of the monoclonal antibody can, for example, be determined by the Scatchard analysis of Munson and Pollard, Anal. Biochem., 107:220 (1980). Preferably, antibodies having a high degree of specificity and a high binding affinity for the target antigen are isolated.

[0294] After the desired hybridoma cells are identified, the clones can be subcloned by limiting dilution procedures and grown by standard methods. Suitable culture media for this purpose include, for example, Dulbecco's Modified Eagle's Medium and RPMI-1640 medium. Alternatively, the hybridoma cells can be grown in vivo as ascites in a mammal.

[0295] The monoclonal antibodies secreted by the subclones can be isolated or purified from the culture medium or ascites fluid by conventional immunoglobulin purification procedures such as, for example, protein A-Sepharose, hydroxylapatite chromatography, gel electrophoresis, dialysis, or affinity chromatography.

[0296] The monoclonal antibodies can also be made by recombinant DNA methods, such as those described in U.S. Pat. No. 4,816,567. DNA encoding the monoclonal antibodies of the invention can be readily isolated and sequenced using conventional procedures (e.g., by using oligonucleotide probes that are capable of binding specifically to genes encoding the heavy and light chains of murine antibodies). The hybridoma cells of the invention serve as a preferred source of such DNA. Once isolated, the DNA can be placed into expression vectors, which are then transfected into host cells such as simian COS cells, Chinese hamster ovary (CHO) cells, or myeloma cells that do not otherwise produce immunoglobulin protein, to obtain the synthesis of monoclonal antibodies in the recombinant host cells. The DNA also can be modified, for example, by substituting the coding sequence for human heavy and light chain constant domains in place of the homologous murine sequences (U.S. Pat. No. 4,816,567; Morrison, Nature 368, 812-13 (1994)) or by covalently joining to the immunoglobulin coding sequence all or part of the coding sequence for a non-immunoglobulin polypeptide. Such a non-immunoglobulin polypeptide can be substituted for the constant domains of an antibody of the invention, or can be substituted for the variable domains of one antigen-combining site of an antibody of the invention to create a chimeric bivalent antibody.

### 5.13.2 Humanized Antibodies

[0297] The antibodies directed against the protein antigens of the invention can further comprise humanized antibodies or human antibodies. These antibodies are suitable for administration to humans without engendering an immune response by the human against the administered immunoglobulin. Humanized forms of antibodies are chimeric immunoglobulins, immunoglobulin chains or fragments thereof (such as Fv, Fab, Fab′, F(ab′)₂ or other antigen-binding subsequences of antibodies) that are principally comprised of the sequence of a human immunoglobulin, and contain minimal sequence derived from a non-human immunoglobulin. Humanization can be performed following the method of Winter and co-workers (Jones et al., Nature, 321:522-525 (1986); Riechmann et al., Nature, 332:323-327 (1988); Verhoeyen et al., Science, 239:1534-1536 (1988)), by substituting rodent CDRs or CDR sequences for the corresponding sequences of a human antibody. (See also U.S. Pat. No. 5,225,539.) In some instances, Fv framework residues of the human immunoglobulin are replaced by corresponding non-human residues. Humanized antibodies can also comprise residues which are found neither in the recipient antibody nor in the imported CDR or framework sequences. In general, the humanized antibody will comprise substantially all of at least one, and typically two, variable domains, in which all or substantially all of the CDR regions correspond to those of a non-human immunoglobulin and all or substantially all of the framework regions are those of a human immunoglobulin consensus sequence. The humanized antibody optimally also will comprise at least a portion of an immunoglobulin constant region (Fc), typically that of a human immunoglobulin (Jones et al., 1986; Riechmann et al., 1988; and Presta, Curr. Op. Struct. Biol., 2:593-596 (1992)).

### 5.133 Human Antibodies

[0298] Fully human antibodies relate to antibody molecules in which essentially the entire sequences of both the light chain and the heavy chain, including the CDRs, arise from human genes. Such antibodies are termed “human antibodies”, or “fully human antibodies” herein. Human monoclonal antibodies can be prepared by the trioma technique; the human B-cell hybridoma technique (see Kozbor, et al., 1983 Immunol Today 4: 72) and the EBV hybridoma technique to produce human monoclonal antibodies (see Cole, et al., 1985 In: MONOCLONAL ANTIBODIES AND CANCER THERAPY, Alan R. Liss, Inc., pp. 77-96). Human monoclonal antibodies may be utilized in the practice of the present invention and may be produced by using human hybridomas (see Cote, et al., 1983. Proc Natl Acad Sci USA 80: 2026-2030) or by transforming human B-cells with Epstein Barr Virus in vitro (see Cole, et al., 1985 In: MONOCLONAL ANTIBODIES AND CANCER THERAPY, Alan R. Liss, Inc., pp. 77-96).

[0299] In addition, human antibodies can also be produced using additional techniques, including phage display libraries (Hoogenboom and Winter, J. Mol. Biol., 227:381 (1991); Marks et al., J. Mol. Biol., 222:581 (1991)). Similarly, human antibodies can be made by introducing human immunoglobulin loci into transgenic animals, e.g., mice in which the endogenous immunoglobulin genes have been partially or completely inactivated. Upon challenge, human antibody production is observed, which closely resembles that seen in humans in all respects, including gene rearrangement, assembly, and antibody repertoire. This approach is described, for example, in U.S. Pat. Nos. 5,545,807; 5,545,806; 5,569,825; 5,625,126; 5,633,425; 5,661,016, and in Marks et at. (Bio/Technology 10, 779-783 (1992)); Lonberg et al. (Nature 368 856-859 (1994)); Morrison (Nature 368, 812-13 (1994)); Fishwild et al, (Nature Biotechnology 14, 845-51 (1996)); Neuberger (Nature Biotechnology 14, 826 (1996)); and Lonberg and Huszar (Intern. Rev. Immunol. 13 65-93 (1995)).

[0300] Human antibodies may additionally be produced using transgenic nonhuman animals which are modified so as to produce fully human antibodies rather than the animal's endogenous antibodies in response to challenge by an antigen. (See PCT publication WO94/02602). The endogenous genes encoding the heavy and light immunoglobulin chains in the nonhuman host have been incapacitated, and active loci encoding human heavy and light chain immunoglobulins are inserted into the host's genome. The human genes are incorporated, for example, using yeast artificial chromosomes containing the requisite human DNA segments. An animal which provides all the desired modifications is then obtained as progeny by crossbreeding intermediate transgenic animals containing fewer than the full complement of the modifications. The preferred embodiment of such a nonhuman animal is a mouse, and is termed the Xenomouse™ as disclosed in PCT publications WO 96/33735 and WO 96/34096. This animal produces B cells which secrete fully human immunoglobulins. The antibodies can be obtained directly from the animal after immunization with an immunogen of interest, as, for example, a preparation of a polyclonal antibody, or alternatively from immortalized B cells derived from the animal, such as hybridomas producing monoclonal antibodies. Additionally, the genes encoding the immunoglobulins with human variable regions can be recovered and expressed to obtain the antibodies directly, or can be further modified to obtain analogs of antibodies such as, for example, single chain Fv molecules.

[0301] An example of a method of producing a nonhuman host, exemplified as a mouse, lacking expression of an endogenous immunoglobulin heavy chain is disclosed in U.S. Pat. No. 5,939,598. It can be obtained by a method including deleting the J segment genes from at least one endogenous heavy chain locus in an embryonic stem cell to prevent rearrangement of the locus and to prevent formation of a transcript of a rearranged immunoglobulin heavy chain locus, the deletion being effected by a targeting vector containing a gene encoding a selectable marker; and producing from the embryonic stem cell a transgenic mouse whose somatic and germ cells contain the gene encoding the selectable marker.

[0302] A method for producing an antibody of interest, such as a human antibody, is disclosed in U.S. Pat. No. 5,916,771. It includes introducing an expression vector that contains a nucleotide sequence encoding a heavy chain into one mammalian host cell in culture, introducing an expression vector containing a nucleotide sequence encoding a light chain into another mammalian host cell, and fusing the two cells to form a hybrid cell. The hybrid cell expresses an antibody containing the heavy chain and the light chain.

[0303] In a further improvement on this procedure, a method for identifying a clinically relevant epitope on an immunogen, and a correlative method for selecting an antibody that binds immunospecifically to the relevant epitope with high affinity, are disclosed in PCT publication WO 99/53049.

### 5.13.4 F_{ab} Fragments and Single Chain Antibodies

[0304] According to the invention, techniques can be adapted for the production of single-chain antibodies specific to an antigenic protein of the invention (see e.g., U.S. Pat. No. 4,946,778). In addition, methods can be adapted for the construction of F_{ab} expression libraries (see e.g., Huse, et al., 1989 Science 246: 1275-1281) to allow rapid and effective identification of monoclonal F_{ab} fragments with the desired specificity for a protein or derivatives, fragments, analogs or homologs thereof. Antibody fragments that contain the idiotypes to a protein antigen may be produced by techniques known in the art including, but not limited to: (i) an F_{(ab′)2} fragment produced by pepsin digestion of an antibody molecule; (ii) an F_{ab} fragment generated by reducing the disulfide bridges of an F_{(ab′)2} fragment; (iii) an F_{ab} fragment generated by the treatment of the antibody molecule with papain and a reducing agent and (iv) Fᵥ fragments.

### 5.13.5 Bispecific Antibodies

[0305] Bispecific antibodies are monoclonal, preferably human or humanized, antibodies that have binding specificities for at least two different antigens. In the present case, one of the binding specificities is for an antigenic protein of the invention. The second binding target is any other antigen, and advantageously is a cell-surface protein or receptor or receptor subunit.

[0306] Methods for making bispecific antibodies are known in the art. Traditionally, the recombinant production of bispecific antibodies is based on the co-expression of two immunoglobulin heavy-chain/light-chain pairs, where the two heavy chains have different specificities (Milstein and Cuello, Nature, 305:537-539 (1983)). Because of the random assortment of immunoglobulin heavy and light chains, these hybridomas (quadromas) produce a potential mixture of ten different antibody molecules, of which only one has the correct bispecific structure. The purification of the correct molecule is usually accomplished by affinity chromatography steps. Similar procedures are disclosed in WO 93/08829, published 13 May 1993, and in Traunecker et al., 1991 EMBO J., 10:3655-3659.

[0307] Antibody variable domains with the desired binding specificities (antibody-antigen combining sites) can be fused to immunoglobulin constant domain sequences. The fusion preferably is with an immunoglobulin heavy-chain constant domain, comprising at least part of the hinge, CH2, and CH3 regions. It is preferred to have the first heavy-chain constant region (CH1) containing the site necessary for light-chain binding present in at least one of the fusions. DNAs encoding the immunoglobulin heavy-chain fusions and, if desired, the immunoglobulin light chain, are inserted into separate expression vectors, and are co-transfected into a suitable host organism. For further details of generating bispecific antibodies see, for example, Suresh et al., Methods in Enzymology, 121:210 (1986).

[0308] According to another approach described in WO 96/27011, the interface between a pair of antibody molecules can be engineered to maximize the percentage of heterodimers which are recovered from recombinant cell culture. The preferred interface comprises at least a part of the CH3 region of an antibody constant domain. In this method, one or more small amino acid side chains from the interface of the first antibody molecule are replaced with larger side chains (e.g tyrosine or tryptophan). Compensatory “cavities” of identical or similar size to the large side chain(s) are created on the interface of the second antibody molecule by replacing large amino acid side chains with smaller ones (e.g. alanine or threonine). This provides a mechanism for increasing the yield of the heterodimer over other unwanted end-products such as homodimers.

[0309] Bispecific antibodies can be prepared as full length antibodies or antibody fragments (e.g. F(ab′)₂ bispecific antibodies). Techniques for generating bispecific antibodies from antibody fragments have been described in the literature. For example, bispecific antibodies can be prepared using chemical linkage. Brennan et al., Science 229:81 (1985) describe a procedure wherein intact antibodies are proteolytically cleaved to generate F(ab′)₂ fragments. These fragments are reduced in the presence of the dithiol complexing agent sodium arsenite to stabilize vicinal dithiols and prevent intermolecular disulfide formation. The Fab′ fragments generated are then converted to thionitrobenzoate (TNB) derivatives. One of the Fab′-TNB derivatives is then reconverted to the Fab′-thiol by reduction with mercaptoethylamine and is mixed with an equimolar amount of the other Fab′-TNB derivative to form the bispecific antibody. The bispecific antibodies produced can be used as agents for the selective immobilization of enzymes.

[0310] Additionally, Fab′ fragments can be directly recovered from E. coli and chemically coupled to form bispecific antibodies. Shalaby et al., J. Exp. Med. 175:217-225 (1992) describe the production of a fully humanized bispecific antibody F(ab′)₂ molecule. Each Fab′ fragment was separately secreted from E. coli and subjected to directed chemical coupling in vitro to form the bispecific antibody. The bispecific antibody thus formed was able to bind to cells overexpressing the ErbB2 receptor and normal human T cells, as well as trigger the lytic activity of human cytotoxic lymphocytes against human breast tumor targets.

[0311] Various techniques for making and isolating bispecific antibody fragments directly from recombinant cell culture have also been described. For example, bispecific antibodies have been produced using leucine zippers. Kostelny et al., J. Immunol. 148(5):1547-1553 (1992). The leucine zipper peptides from the Fos and Jun proteins were linked to the Fab′ portions of two different antibodies by gene fusion. The antibody homodimers were reduced at the hinge region to form monomers and then re-oxidized to form the antibody heterodimers. This method can also be utilized for the production of antibody homodimers. The “diabody” technology described by Hollinger et al., Proc. Natl. Acad. Sci. USA 90:6444-6448 (1993) has provided an alternative mechanism for making bispecific antibody fragments. The fragments comprise a heavy-chain variable domain (V_{H}) connected to a light-chain variable domain (V_{L}) by a linker which is too short to allow pairing between the two domains on the same chain. Accordingly, the V_{H} and V_{L} domains of one fragment are forced to pair with the complementary V_{L} and V_{H} domains of another fragment, thereby forming two antigen-binding sites. Another strategy for making bispecific antibody fragments by the use of single-chain Fv (sFv) dimers has also been reported. See, Gruber et al., J. Immunol. 152:5368 (1994).

[0312] Antibodies with more than two valencies are contemplated. For example, trispecific antibodies can be prepared. Tutt et al., J. Immunol. 147:60 (1991). Exemplary bispecific antibodies can bind to two different epitopes, at least one of which originates in the protein antigen of the invention. Alternatively, an anti-antigenic arm of an immunoglobulin molecule can be combined with an arm which binds to a triggering molecule on a leukocyte such as a T-cell receptor molecule (e.g. CD2, CD3, CD28, or B7), or Fc receptors for IgG (FcγR), such as FcγRI (CD64), FcγRII (CD32) and FcγRIII (CD16) so as to focus cellular defense mechanisms to the cell expressing the particular antigen. Bispecific antibodies can also be used to direct cytotoxic agents to cells which express a particular antigen. These antibodies possess an antigen-binding arm and an arm which binds a cytotoxic agent or a radionuclide chelator, such as EOTUBE, DPTA, DOTA, or TETA. Another bispecific antibody of interest binds the protein antigen described herein and further binds tissue factor (TF).

### 5.13.6 Heteroconjugate Antibodies

[0313] Heteroconjugate antibodies are also within the scope of the present invention. Heteroconjugate antibodies are composed of two covalently joined antibodies. Such antibodies have, for example, been proposed to target immune system cells to unwanted cells (U.S. Pat. No. 4,676,980), and for treatment of HIV infection (WO 91/00360; WO 92/200373; EP 03089). It is contemplated that the antibodies can be prepared in vitro using known methods in synthetic protein chemistry, including those involving crosslinking agents. For example, immunotoxins can be constructed using a disulfide exchange reaction or by forming a thioether bond. Examples of suitable reagents for this purpose include iminothiolate and methyl-4-mercaptobutyrimidate and those disclosed, for example, in U.S. Pat. No. 4,676,980.

### 5.13.7 Effector Function Engineering

[0314] It can be desirable to modify the antibody of the invention with respect to effector function, so as to enhance, e.g., the effectiveness of the antibody in treating cancer. For example, cysteine residue(s) can be introduced into the Fc region, thereby allowing interchain disulfide bond formation in this region. The homodimeric antibody thus generated can have improved internalization capability and/or increased complement-mediated cell killing and antibody-dependent cellular cytotoxicity (ADCC). See Caron et al., J. Exp Med., 176: 1191-1195 (1992) and Shopes, J. Immunol., 148: 2918-2922 (1992). Homodimeric antibodies with enhanced anti-tumor activity can also be prepared using heterobifunctional cross-linkers as described in Wolff et al. Cancer Research, 53: 2560-2565 (1993). Alternatively, an antibody can be engineered that has dual Fc regions and can thereby have enhanced complement lysis and ADCC capabilities. See Stevenson et al., Anti-Cancer Drug Design, 3: 219-230 (1989).

### 5.13.8 Immunoconjugates

[0315] The invention also pertains to immunoconjugates comprising an antibody conjugated to a cytotoxic agent such as a chemotherapeutic agent, toxin (e.g., an enzymatically active toxin of bacterial, fungal, plant, or animal origin, or fragments thereof), or a radioactive isotope (i.e., a radioconjugate).

[0316] Chemotherapeutic agents useful in the generation of such immunoconjugates have been described above. Enzymatically active toxins and fragments thereof that can be used include diphtheria A chain, nonbinding active fragments of diphtheria toxin, exotoxin A chain (from Pseudomonas aeruginosa), ricin A chain, abrin A chain, modeccin A chain, alpha-sarcin, Aleurites fordii proteins, dianthin proteins, Phytolaca americana proteins (PAPI, PAPII, and PAP-S), momordica charantia inhibitor, curcin, crotin, sapaonaria officinalis inhibitor, gelonin, mitogellin, restrictocin, phenomycin, enomycin, and the tricothecenes. A variety of radionuclides are available for the production of radioconjugated antibodies. Examples include ²¹²Bi, ¹³¹I, ¹³¹In, ⁹⁰Y, and ¹⁸⁶Re.

[0317] Conjugates of the antibody and cytotoxic agent are made using a variety of bifunctional protein-coupling agents such as N-succinimidyl-3-(2-pyridyldithiol) propionate (SPDP), iminothiolane (IT), bifunctional derivatives of imidoesters (such as dimethyl adipimidate HCL), active esters (such as disuccinimidyl suberate), aldehydes (such as glutareldehyde), bis-azido compounds (such as bis(p-azidobenzoyl) hexanediamine), bis-diazonium derivatives (such as bis-(p-diazoniumbenzoyl)-ethylenediamine), diisocyanates (such as tolyene 2,6-diisocyanate), and bis-active fluorine compounds (such as 1,5-difluoro-2,4-dinitrobenzene). For example, a ricin immunotoxin can be prepared as described in Vitetta et al., Science, 238: 1098 (1987). Carbon-14-labeled 1-isothiocyanatobenzyl-3-methyldiethylene triaminepentaacetic acid (MX-DTPA) is an exemplary chelating agent for conjugation of radionucleotide to the antibody. See WO94/1 1026.

[0318] In another embodiment, the antibody can be conjugated to a “receptor” (such streptavidin) for utilization in tumor pretargeting wherein the antibody-receptor conjugate is administered to the patient, followed by removal of unbound conjugate from the circulation using a clearing agent and then administration of a “ligand” (e.g., avidin) that is in turn conjugated to a cytotoxic agent.

### 4.14 Computer Readable Sequences

[0319] In one application of this embodiment, a nucleotide sequence of the present invention can be recorded on computer readable media. As used herein, “computer readable media” refers to any medium which can be read and accessed directly by a computer. Such media include, but are not limited to: magnetic storage media, such as floppy discs, hard disc storage medium, and magnetic tape; optical storage media such as CD-ROM; electrical storage media such as RAM and ROM; and hybrids of these categories such as magnetic/optical storage media. A skilled artisan can readily appreciate how any of the presently known computer readable mediums can be used to create a manufacture comprising computer readable medium having recorded thereon a nucleotide sequence of the present invention. As used herein, “recorded” refers to a process for storing information on computer readable medium. A skilled artisan can readily adopt any of the presently known methods for recording information on computer readable medium to generate manufactures comprising the nucleotide sequence information of the present invention.

[0320] A variety of data storage structures are available to a skilled artisan for creating a computer readable medium having recorded thereon a nucleotide sequence of the present invention. The choice of the data storage structure will generally be based on the means chosen to access the stored information. In addition, a variety of data processor programs and formats can be used to store the nucleotide sequence information of the present invention on computer readable medium. The sequence information can be represented in a word processing text file, formatted in commercially-available software such as WordPerfect and Microsoft Word, or represented in the form of an ASCII file, stored in a database application, such as DB2, Sybase, Oracle, or the like. A skilled artisan can readily adapt any number of data processor structuring formats (e.g. text file or database) in order to obtain computer readable medium having recorded thereon the nucleotide sequence information of the present invention.

[0321] By providing any of the nucleotide sequences SEQ ID NO: 1-8051 or a representative fragment thereof; or a nucleotide sequence at least 95% identical to any of the nucleotide sequences of SEQ ID NO: 1-8051 in computer readable form, a skilled artisan can routinely access the sequence information for a variety of purposes. Computer software is publicly available which allows a skilled artisan to access sequence information provided in a computer readable medium. The examples which follow demonstrate how software which implements the BLAST (Altschul et al., J. Mol. Biol. 215:403-410 (1990)) and BLAZE (Brutlag et al., Comp. Chem. 17:203-207 (1993)) search algorithms on a Sybase system is used to identify open reading frames (ORFs) within a nucleic acid sequence. Such ORFs may be protein encoding fragments and may be useful in producing commercially important proteins such as enzymes used in fermentation reactions and in the production of commercially useful metabolites.

[0322] As used herein, “a computer-based system” refers to the hardware means, software means, and data storage means used to analyze the nucleotide sequence information of the present invention. The minimum hardware means of the computer-based systems of the present invention comprises a central processing unit (CPU), input means, output means, and data storage means. A skilled artisan can readily appreciate that any one of the currently available computer-based systems are suitable for use in the present invention. As stated above, the computer-based systems of the present invention comprise a data storage means having stored therein a nucleotide sequence of the present invention and the necessary hardware means and software means for supporting and implementing a search means. As used herein, “data storage means” refers to memory which can store nucleotide sequence information of the present invention, or a memory access means which can access manufactures having recorded thereon the nucleotide sequence information of the present invention.

[0323] As used herein, “search means” refers to one or more programs which are implemented on the computer-based system to compare a target sequence or target structural motif with the sequence information stored within the data storage means. Search means are used to identify fragments or regions of a known sequence which match a particular target sequence or target motif. A variety of known algorithms are disclosed publicly and a variety of commercially available software for conducting search means are and can be used in the computer-based systems of the present invention. Examples of such software includes, but is not limited to, Smith-Waterman, MacPattern (EMBL), BLASTN and BLASTA (NPOLYPEPTIDEIA). A skilled artisan can readily recognize that any one of the available algorithms or implementing software packages for conducting homology searches can be adapted for use in the present computer-based systems. As used herein, a “target sequence” can be any nucleic acid or amino acid sequence of six or more nucleotides or two or more amino acids. A skilled artisan can readily recognize that the longer a target sequence is, the less likely a target sequence will be present as a random occurrence in the database. The most preferred sequence length of a target sequence is from about 10 to 300 amino acids, more preferably from about 30 to 100 nucleotide residues. However, it is well recognized that searches for commercially important fragments, such as sequence fragments involved in gene expression and protein processing, may be of shorter length.

[0324] As used herein, “a target structural motif,” or “target motif,” refers to any rationally selected sequence or combination of sequences in which the sequence(s) are chosen based on a three-dimensional configuration which is formed upon the folding of the target motif. There are a variety of target motifs known in the art. Protein target motifs include, but are not limited to, enzyme active sites and signal sequences. Nucleic acid target motifs include, but are not limited to, promoter sequences, hairpin structures and inducible expression elements (protein binding sequences).

### 4.15 Triple Helix Formation

[0325] In addition, the fragments of the present invention, as broadly described, can be used to control gene expression through triple helix formation or antisense DNA or RNA, both of which methods are based on the binding of a polynucleotide sequence to DNA or RNA. Polynucleotides suitable for use in these methods are preferably 20 to 40 bases in length and are designed to be complementary to a region of the gene involved in transcription (triple helix—see Lee et al., Nucl. Acids Res. 6:3073 (1979); Cooney et al., Science 15241:456 (1988); and Dervan et al., Science 251:1360 (1991)) or to the mRNA itself (antisense—Olmno, J. Neurochem. 56:560, (1991); Oligodeoxynucleotides as Antisense Inhibitors of Gene Expression, CRC Press, Boca Raton, Fla. (1988)). Triple helix-formation optimally results in a shut-off of RNA transcription from DNA, while antisense RNA hybridization blocks translation of an mRNA molecule into polypeptide. Both techniques have been demonstrated to be effective in model systems. Information contained in the sequences of the present invention is necessary for the design of an antisense or triple helix oligonucleotide.

### 4.16 Diagnostic Assays and Kits

[0326] The present invention further provides methods to identify the presence or expression of one of the ORFs of the present invention, or homolog thereof, in a test sample, using a nucleic acid probe or antibodies of the present invention, optionally conjugated or otherwise associated with a suitable label.

[0327] In general, methods for detecting a polynucleotide of the invention can comprise contacting a sample with a compound that binds to and forms a complex with the polynucleotide for a period sufficient to form the complex, and detecting the complex, so that if a complex is detected, a polynucleotide of the invention is detected in the sample. Such methods can also comprise contacting a sample under stringent hybridization conditions with nucleic acid primers that anneal to a polynucleotide of the invention under such conditions, and amplifying annealed polynucleotides, so that if a polynucleotide is amplified, a polynucleotide of the invention is detected in the sample.

[0328] In general, methods for detecting a polypeptide of the invention can comprise contacting a sample with a compound that binds to and forms a complex with the polypeptide for a period sufficient to form the complex, and detecting the complex, so that if a complex is detected, a polypeptide of the invention is detected in the sample.

[0329] In detail, such methods comprise incubating a test sample with one or more of the antibodies or one or more of the nucleic acid probes of the present invention and assaying for binding of the nucleic acid probes or antibodies to components within the test sample.

[0330] Conditions for incubating a nucleic acid probe or antibody with a test sample vary. Incubation conditions depend on the format employed in the assay, the detection methods employed, and the type and nature of the nucleic acid probe or antibody used in the assay. One skilled in the art will recognize that any one of the commonly available hybridization, amplification or immunological assay formats can readily be adapted to employ the nucleic acid probes or antibodies of the present invention. Examples of such assays can be found in Chard, T., An Introduction to Radioimmunoassay and Related Techniques, Elsevier Science Publishers, Amsterdam, The Netherlands (1986); Bullock, G. R. et al., Techniques in Immunocytochemistry, Academic Press, Orlando, Fla. Vol. 1 (1982), Vol. 2 (1983), Vol. 3 (1985); Tijssen, P., Practice and Theory of immunoassays: Laboratory Techniques in Biochemistry and Molecular Biology, Elsevier Science Publishers, Amsterdam, The Netherlands (1985). The test samples of the present invention include cells, protein or membrane extracts of cells, or biological fluids such as sputum, blood, serum, plasma, or urine. The test sample used in the above-described method will vary based on the assay format, nature of the detection method and the tissues, cells or extracts used as the sample to be assayed. Methods for preparing protein extracts or membrane extracts of cells are well known in the art and can be readily be adapted in order to obtain a sample which is compatible with the system utilized.

[0331] In another embodiment of the present invention, kits are provided which contain the necessary reagents to carry out the assays of the present invention. Specifically, the invention provides a compartment kit to receive, in close confinement, one or more containers which comprises: (a) a first container comprising one of the probes or antibodies of the present invention; and (b) one or more other containers comprising one or more of the following: wash reagents, reagents capable of detecting presence of a bound probe or antibody.

[0332] In detail, a compartment kit includes any kit in which reagents are contained in separate containers. Such containers include small glass containers, plastic containers or strips of plastic or paper. Such containers allows one to efficiently transfer reagents from one compartment to another compartment such that the samples and reagents are not cross-contaminated, and the agents or solutions of each container can be added in a quantitative fashion from one compartment to another. Such containers will include a container which will accept the test sample, a container which contains the antibodies used in the assay, containers which contain wash reagents (such as phosphate buffered saline, Tris-buffers, etc.), and containers which contain the reagents used to detect the bound antibody or probe. Types of detection reagents include labeled nucleic acid probes, labeled secondary antibodies, or in the alternative, if the primary antibody is labeled, the enzymatic, or antibody binding reagents which are capable of reacting with the labeled antibody. One skilled in the art will readily recognize that the disclosed probes and antibodies of the present invention can be readily incorporated into one of the established kit formats which are well known in the art.

### 4.17 Medical Imaging

[0333] The novel polypeptides and binding partners of the invention are useful in medical imaging of sites expressing the molecules of the invention (e.g., where the polypeptide of the invention is involved in the immune response, for imaging sites of inflammation or infection). See, e.g., Kunkel et al., U.S. Pat. No. 5,413,778. Such methods involve chemical attachment of a labeling or imaging agent, administration of the labeled polypeptide to a subject in a pharmaceutically acceptable carrier, and imaging the labeled polypeptide in vivo at the target site.

### 4.18 Screening Assays

[0334] Using the isolated proteins and polynucleotides of the invention, the present invention further provides methods of obtaining and identifying agents which bind to a polypeptide encoded by an ORF corresponding to any of the nucleotide sequences set forth in SEQ ID NO: 1-8051, or bind to a specific domain of the polypeptide encoded by the nucleic acid. In detail, said method comprises the steps of:

[0335] (a) contacting an agent with an isolated protein encoded by an ORF of the present invention, or nucleic acid of the invention; and

[0336] (b) determining whether the agent binds to said protein or said nucleic acid.

[0337] In general, therefore, such methods for identifying compounds that bind to a polynucleotide of the invention can comprise contacting a compound with a polynucleotide of the invention for a time sufficient to form a polynucleotide/compound complex, and detecting the complex, so that if a polynucleotide/compound complex is detected, a compound that binds to a polynucleotide of the invention is identified.

[0338] Likewise, in general, therefore, such methods for identifying compounds that bind to a polypeptide of the invention can comprise contacting a compound with a polypeptide of the invention for a time sufficient to form a polypeptide/compound complex, and detecting the complex, so that if a polypeptide/compound complex is detected, a compound that binds to a polynucleotide of the invention is identified.

[0339] Methods for identifying compounds that bind to a polypeptide of the invention can also comprise contacting a compound with a polypeptide of the invention in a cell for a time sufficient to form a polypeptide/compound complex, wherein the complex drives expression of a receptor gene sequence in the cell, and detecting the complex by detecting reporter gene sequence expression, so that if a polypeptide/compound complex is detected, a compound that binds a polypeptide of the invention is identified.

[0340] Compounds identified via such methods can include compounds which modulate the activity of a polypeptide of the invention (that is, increase or decrease its activity, relative to activity observed in the absence of the compound). Alternatively, compounds identified via such methods can include compounds which modulate the expression of a polynucleotide of the invention (that is, increase or decrease expression relative to expression levels observed in the absence of the compound). Compounds, such as compounds identified via the methods of the invention, can be tested using standard assays well known to those of skill in the art for their ability to modulate activity/expression.

[0341] The agents screened in the above assay can be, but are not limited to, peptides, carbohydrates, vitamin derivatives, or other pharmaceutical agents. The agents can be selected and screened at random or rationally selected or designed using protein modeling techniques.

[0342] For random screening, agents such as peptides, carbohydrates, pharmaceutical agents and the like are selected at random and are assayed for their ability to bind to the protein encoded by the ORF of the present invention. Alternatively, agents may be rationally selected or designed. As used herein, an agent is said to be “rationally selected or designed” when the agent is chosen based on the configuration of the particular protein. For example, one skilled in the art can readily adapt currently available procedures to generate peptides, pharmaceutical agents and the like, capable of binding to a specific peptide sequence, in order to generate rationally designed antipeptide peptides, for example see Hurby et al., Application of Synthetic Peptides: Antisense Peptides,” In Synthetic Peptides, A User's Guide, W.H. Freeman, NY (1992), pp. 289-307, and Kaspczak et al., Biochemistry 28:9230-8 (1989), or pharmaceutical agents, or the like.

[0343] In addition to the foregoing, one class of agents of the present invention, as broadly described, can be used to control gene expression through binding to one of the ORFs or EMFs of the present invention. As described above, such agents can be randomly screened or rationally designed/selected. Targeting the ORF or EMF allows a skilled artisan to design sequence specific or element specific agents, modulating the expression of either a single ORF or multiple ORFs which rely on the same EMF for expression control. One class of DNA binding agents are agents which contain base residues which hybridize or form a triple helix formation by binding to DNA or RNA. Such agents can be based on the classic phosphodiester, ribonucleic acid backbone, or can be a variety of sulfhydryl or polymeric derivatives which have base attachment capacity.

[0344] Agents suitable for use in these methods preferably contain 20 to 40 bases and are designed to be complementary to a region of the gene involved in transcription (triple helix—see Lee et al., Nucl. Acids Res. 6:3073 (1979); Cooney et al., Science 241:456 (1988); and Dervan et al., Science 251:1360 (1991)) or to the mRNA itself (antisense—Okano, J. Neurochem. 56:560 (1991); Oligodeoxynucleotides as Antisense Inhibitors of Gene Expression, CRC Press, Boca Raton, Fla. (1988)). Triple helix-formation optimally results in a shut-off of RNA transcription from DNA, while antisense RNA hybridization blocks translation of an mRNA molecule into polypeptide. Both techniques have been demonstrated to be effective in model systems. Information contained in the sequences of the present invention is necessary for the design of an antisense or triple helix oligonucleotide and other DNA binding agents.

[0345] Agents that bind to a protein encoded by one of the ORFs of the present invention can be used as a diagnostic agent. Agents which bind to a protein encoded by one of the ORFs of the present invention can be formulated using known techniques to generate a pharmaceutical composition.

### 4.19 Use of Nucleic Acids as Probes

[0346] Another aspect of the subject invention is to provide for polypeptide-specific nucleic acid hybridization probes capable of hybridizing with naturally occurring nucleotide sequences. The hybridization probes of the subject invention may be derived from any of the nucleotide sequences SEQ ID NO: 1-8051. Because the corresponding gene is only expressed in a limited number of tissues, a hybridization probe derived from of any of the nucleotide sequences SEQ ID NO: 1-8051 can be used as an indicator of the presence of RNA of cell type of such a tissue in a sample.

[0347] Any suitable hybridization technique can be employed, such as, for example, in situ hybridization. PCR as described in U.S. Pat. Nos. 4,683,195 and 4,965,188 provides additional uses for oligonucleotides based upon the nucleotide sequences. Such probes used in PCR may be of recombinant origin, may be chemically synthesized, or a mixture of both. The probe will comprise a discrete nucleotide sequence for the detection of identical sequences or a degenerate pool of possible sequences for identification of closely related genomic sequences.

[0348] Other means for producing specific hybridization probes for nucleic acids include the cloning of nucleic acid sequences into vectors for the production of mRNA probes. Such vectors are known in the art and are commercially available and may be used to synthesize RNA probes in vitro by means of the addition of the appropriate RNA polymerase as T7 or SP6 RNA polymerase and the appropriate radioactively labeled nucleotides. The nucleotide sequences may be used to construct hybridization probes for mapping their respective genomic sequences. The nucleotide sequence provided herein may be mapped to a chromosome or specific regions of a chromosome using well known genetic and/or chromosomal mapping techniques. These techniques include in situ hybridization, linkage analysis against known chromosomal markers, hybridization screening with libraries or flow-sorted chromosomal preparations specific to known chromosomes, and the like. The technique of fluorescent in situ hybridization of chromosome spreads has been described, among other places, in Verma et al (1988) Human Chromosomes: A Manual of Basic Techniques, Pergamon Press, New York N.Y.

[0349] Fluorescent in situ hybridization of chromosomal preparations and other physical chromosome mapping techniques may be correlated with additional genetic map data. Examples of genetic map data can be found in the 1994 Genome Issue of Science (265:1981 f). Correlation between the location of a nucleic acid on a physical chromosomal map and a specific disease (or predisposition to a specific disease) may help delimit the region of DNA associated with that genetic disease. The nucleotide sequences of the subject invention may be used to detect differences in gene sequences between normal, carrier or affected individuals.

### 4.20 Preparation of Support Bound Oligonucleotides

[0350] Oligonucleotides, i.e., small nucleic acid segments, may be readily prepared by, for example, directly synthesizing the oligonucleotide by chemical means, as is commonly practiced using an automated oligonucleotide synthesizer.

[0351] Support bound oligonucleotides may be prepared by any of the methods known to those of skill in the art using any suitable support such as glass, polystyrene or Teflon. One strategy is to precisely spot oligonucleotides synthesized by standard synthesizers. Immobilization can be achieved using passive adsorption (Inouye & Hondo, (1990) J. Clin. Microbiol. 28 (6) 1469-72); using UV light (Nagata et al., 1985; Dahlen et al., 1987; Morrissey & Collins, (1989) Mol. Cell Probes 3 (2) 189-207) or by covalent binding of base modified DNA (Keller et al., 1988; 1989); all references being specifically incorporated herein.

[0352] Another strategy that may be employed is the use of the strong biotin-streptavidin interaction as a linker. For example, Broude et al. (1994) Proc. Natl. Acad. Sci. USA 91 (8) 3072-6, describe the use of biotinylated probes, although these are duplex probes, that are immobilized on streptavidin-coated magnetic beads. Streptavidin-coated beads may be purchased from Dynal, Oslo. Of course, this same linking chemistry is applicable to coating any surface with streptavidin. Biotinylated probes may be purchased from various sources, such as, e.g., Operon Technologies (Alameda, Calif.).

[0353] Nunc Laboratories (Naperville, Ill.) is also selling suitable material that could be used. Nunc Laboratories have developed a method by which DNA can be covalently bound to the microwell surface termed Covalink NH. CovaLink NH is a polystyrene surface grafted with secondary amino groups (>NH) that serve as bridge-heads for further covalent coupling. CovaLink Modules may be purchased from Nunc Laboratories. DNA molecules may be bound to CovaLink exclusively at the 5′-end by a phosphoramidate bond, allowing immobilization of more than 1 pmol of DNA (Rasmussen et al., (1991) Anal. Biochem. 198 (1) 13842).

[0354] The use of CovaLink NH strips for covalent binding of DNA molecules at the 5′-end has been described (Rasmussen et al., (1991). In this technology, a phosphoramidate bond is employed (Chu et al., (1983) Nucleic Acids Res. 11 (8) 6513-29). This is beneficial as immobilization using only a single covalent bond is preferred. The phosphoramidate bond joins the DNA to the CovaLink NH secondary amino groups that are positioned at the end of spacer arms covalently grafted onto the polystyrene surface through a 2 nm long spacer arm. To link an oligonucleotide to CovaLink NH via an phosphoramidate bond, the oligonucleotide terminus must have a 5′-end phosphate group. It is, perhaps, even possible for biotin to be covalently bound to CovaLink and then streptavidin used to bind the probes.

[0355] More specifically, the linkage method includes dissolving DNA in water (7.5 ng/ul) and denaturing for 10 min. at 95° C. and cooling on ice for 10 min. Ice-cold 0.1 M 1-methylimidazole, pH 7.0 (1-MeIm₇), is then added to a final concentration of 10 mM 1-MeIM₇. A ss DNA solution is then dispensed into CovaLink NH strips (75 ul/well) standing on ice.

[0356] Carbodiimide 0.2 M 1-ethyl-3-(3-dimethylaminopropyl)-carbodiimide (EDC), dissolved in 10 mM 1-MeIM₇, is made fresh and 25 ul added per well. The strips are incubated for 5 hours at 50° C. After incubation the strips are washed using, e.g., Nunc-Immuno Wash; first the wells are washed 3 times, then they are soaked with washing solution for 5 min., and finally they are washed 3 times (where in the washing solution is 0.4 N NaOH, 0.25% SDS heated to 50° C.).

[0357] It is contemplated that a further suitable method for use with the present invention is that described in PCT Patent Application WO 90/03382 (Southern & Maskos), incorporated herein by reference. This method of preparing an oligonucleotide bound to a support involves attaching a nucleoside 3′-reagent through the phosphate group by a covalent phosphodiester link to aliphatic hydroxyl groups carried by the support. The oligonucleotide is then synthesized on the supported nucleoside and protecting groups removed from the synthetic oligonucleotide chain under standard conditions that do not cleave the oligonucleotide from the support. Suitable reagents include nucleoside phosphoramidite and nucleoside hydrogen phosphorate.

[0358] An on-chip strategy for the preparation of DNA probe for the preparation of DNA probe arrays may be employed. For example, addressable laser-activated photodeprotection may be Fodor et al. (1991) Science 251 (4995) 767-73, incorporated herein by reference. Probes may also be immobilized on nylon supports as described by Van Ness et at (1991) Nucleic Acids Res. 19 (12) 3345-50; or linked to Teflon using the method of Duncan & Cavalier (1988) Anal. Biochem. 169 (1) 104-8; all references being specifically incorporated herein.

[0359] To link an oligonucleotide to a nylon support, as described by Van Ness et al. (1991), requires activation of the nylon surface via alkylation and selective activation of the 5′-amine of oligonucleotides with cyanuric chloride.

[0360] One particular way to prepare support bound oligonucleotides is to utilize the light-generated synthesis described by Pease et al., (1994) PNAS USA 91 (11) 5022-6, incorporated herein by reference). These authors used current photolithographic techniques to generate arrays of immobilized oligonucleotide probes (DNA chips). These methods, in which light is used to direct the synthesis of oligonucleotide probes in high-density, miniaturized arrays, utilize photolabile 5′-protected N-acyl-deoxynucleoside phosphoramidites, surface linker chemistry and versatile combinatorial synthesis strategies. A matrix of 256 spatially defined oligonucleotide probes may be generated in this manner.

### 4.21 Preparation of Nucleic Acid Fragments

[0361] The nucleic acids may be obtained from any appropriate source, such as cDNAs, genomic DNA, chromosomal DNA, microdissected chromosome bands, cosmid or YAC inserts, and RNA, including mRNA without any amplification steps. For example, Sambrook et al. (1989) describes three protocols for the isolation of high molecular weight DNA from mammalian cells (p. 9.14-9.23).

[0362] DNA fragments may be prepared as clones in M13, plasmid or lambda vectors and/or prepared directly from genomic DNA or cDNA by PCR or other amplification methods. Samples may be prepared or dispensed in multiwell plates. About 100-1000 ng of DNA samples may be prepared in 2-500 ml of final volume.

[0363] The nucleic acids would then be fragmented by any of the methods known to those of skill in the art including, for example, using restriction enzymes as described at 9.24-9.28 of Sambrook et al. (1989), shearing by ultrasound and NaOH treatment.

[0364] Low pressure shearing is also appropriate, as described by Schriefer et al. (1990) Nucleic Acids Res. 18 (24) 7455-6, incorporated herein by reference). In this method, DNA samples are passed through a small French pressure cell at a variety of low to intermediate pressures. A lever device allows controlled application of low to intermediate pressures to the cell. The results of these studies indicate that low-pressure shearing is a useful alternative to sonic and enzymatic DNA fragmentation methods.

[0365] One particularly suitable way for fragmenting DNA is contemplated to be that using the two base recognition endonuclease, CviJI, described by Fitzgerald et al. (1992) Nucleic Acids Res. 20 (14) 3753-62. These authors described an approach for the rapid fragmentation and fractionation of DNA into particular sizes that they contemplated to be suitable for shotgun cloning and sequencing.

[0366] The restriction endonuclease CviJI normally cleaves the recognition sequence PuGCPy between the G and C to leave blunt ends. Atypical reaction conditions, which alter the specificity of this enzyme (CviJI**), yield a quasi-random distribution of DNA fragments form the small molecule pUC19 (2688 base pairs). Fitzgerald et al. (1992) quantitatively evaluated the randomness of this fragmentation strategy, using a CviJI** digest of pUC19 that was size fractionated by a rapid gel filtration method and directly ligated, without end repair, to a lac Z minus M13 cloning vector. Sequence analysis of 76 clones showed that CviJI** restricts pyGCPy and PuGCPu, in addition to PuGCPy sites, and that new sequence data is accumulated at a rate consistent with random fragmentation.

[0367] As reported in the literature, advantages of this approach compared to sonication and agarose gel fractionation include: smaller amounts of DNA are required (0.2-0.5 ug instead of 2-5 ug); and fewer steps are involved (no preligation, end repair, chemical extraction, or agarose gel electrophoresis and elution are needed.

[0368] Irrespective of the manner in which the nucleic acid fragments are obtained or prepared, it is important to denature the DNA to give single stranded pieces available for hybridization. This is achieved by incubating the DNA solution for 2-5 minutes at 80-90° C. The solution is then cooled quickly to 2° C. to prevent renaturation of the DNA fragments before they are contacted with the chip. Phosphate groups must also be removed from genomic DNA by methods known in the art.

### 4.22 Preparation of DNA Arrays

[0369] Arrays may be prepared by spotting DNA samples on a support such as a nylon membrane. Spotting may be performed by using arrays of metal pins (the positions of which correspond to an array of wells in a microtiter plate) to repeated by transfer of about 20 nl of a DNA solution to a nylon membrane. By offset printing, a density of dots higher than the density of the wells is achieved. One to 25 dots may be accommodated in 1 mm², depending on the type of label used. By avoiding spotting in some preselected number of rows and columns, separate subsets (subarrays) may be formed. Samples in one subarray may be the same genomic segment of DNA (or the same gene) from different individuals, or may be different, overlapped genomic clones. Each of the subarrays may represent replica spotting of the same samples. In one example, a selected gene segment may be amplified from 64 patients. For each patient, the amplified gene segment may be in one 96-well plate (all 96 wells containing the same sample). A plate for each of the 64 patients is prepared. By using a 96-pin device, all samples may be spotted on one 8×12 cm membrane. Subarrays may contain 64 samples, one from each patient. Where the 96 subarrays are identical, the dot span may be 1 mm² and there may be a 1 mm space between subarrays.

[0370] Another approach is to use membranes or plates (available from NUNC, Naperville, Ill.) which may be partitioned by physical spacers e.g. a plastic grid molded over the membrane, the grid being similar to the sort of membrane applied to the bottom of multiwell plates, or hydrophobic strips. A fixed physical spacer is not preferred for imaging by exposure to flat phosphor-storage screens or x-ray films.

[0371] The present invention is illustrated in the following examples. Upon consideration of the present disclosure, one of skill in the art will appreciate that many other embodiments and variations may be made in the scope of the present invention. Accordingly, it is intended that the broader aspects of the present invention not be limited to the disclosure of the following examples. The present invention is not to be limited in scope by the exemplified embodiments which are intended as illustrations of single aspects of the invention, and compositions and methods which are functionally equivalent are within the scope of the invention. Indeed, numerous modifications and variations in the practice of the invention are expected to occur to those skilled in the art upon consideration of the present preferred embodiments. Consequently, the only limitations which should be placed upon the scope of the invention are those which appear in the appended claims.

[0372] All references cited within the body of the instant specification are hereby incorporated by reference in their entirety.

### 5.0 EXAMPLES

### 5.1 Example 1

### Novel Nucleic Acid Sequences Obtained From Various Libraries

[0373] A plurality of novel nucleic acids were obtained from cDNA libraries prepared from various human tissues and in some cases isolated from a genomic library derived from human chromosome using standard PCR, SBH sequence signature analysis and Sanger sequencing techniques. The inserts of the library were amplified with PCR using primers specific for the vector sequences which flank the inserts. Clones from cDNA libraries were spotted on nylon membrane filters and screened with oligonucleotide probes (e.g., 7-mers) to obtain signature sequences. The clones were clustered into groups of similar or identical sequences. Representative clones were selected for sequencing.

[0374] In some cases, the 5′ sequence of the amplified inserts was then deduced using a typical Sanger sequencing protocol. PCR products were purified and subjected to fluorescent dye terminator cycle sequencing. Single pass gel sequencing was done using a 377 Applied Biosystems (ABI) sequencer to obtain the novel nucleic acid sequences. In some cases RACE (Rapid Amplification of cDNA Ends) was performed to further extend the sequence in the 5′ direction.

### 5.2 Example 2

[0375] Novel Contigs

[0376] The novel contigs of the invention were assembled from sequences that were obtained from a cDNA library by methods described in Example 1 above, and in some cases sequences obtained from one or more public databases. The sequences for the resulting nucleic acid contigs are designated as SEQ ID NO: 1-8051 and are provided in the attached Sequence Listing. The contigs were assembled using an EST sequence as a seed. Then a recursive algorithm was used to extend the seed EST into an extended assemblage, by pulling additional sequences from different databases (i.e., Hyseq's database containing EST sequences, dbEST version 115, gb pri 115, and UniGene version 103, and exons from public domain genomic sequences predicted by GenScan) that belong to this assemblage. The algorithm terminated when there was no additional sequences from the above databases that would extend the assemblage. Further, the inclusion of component sequences into the assemblage was based on a BLASTN hit to the extending assemblage with BLAST score greater than 300 and percent identity greater than 95%.

[0377] The novel predicted polypeptides (including proteins) encoded by the novel polynucleotides (SEQ ID NO: 1-8051) of the present invention are incorporated in the attached Sequence Listing. A subset of the predicted polypeptide sequences contain an unknown amino acid; a stop codon; a possible nucleotide deletion; or a possible nucleotide insertion. These sequences have also been shown in their entirety in Table 2. Table 2 also shows the corresponding start and stop nucleotide locations to each of SEQ ID NO: 1-8051. Table 2 also indicates the method by which the polypeptide was predicted. Method A refers to a polypeptide obtained by using a software program called FASTY (available from http://fasta.bioch.virginia,edu) which selects a polypeptide based on a comparison of the translated novel polynucleotide to known polynucleotides (W. R. Pearson, Methods in Enzymology, 183:63-98 (1990), herein incorporated by reference). Method B refers to a polypeptide obtained by using a software program called GenScan for human/vertebrate sequences (available from Stanford University, Office of Technology Licensing) that predicts the polypeptide based on a probabilistic model of gene structure/compositional properties (C. Burge and S. Karlin, J. Mol. Biol., 268:78-94 (1997), incorporated herein by reference). Method C refers to a polypeptide obtained by using a Hyseq proprietary software program that translates the novel polynucleotide and its complementary strand into six possible amino acid sequences (forward and reverse frames) and chooses the polypeptide with the longest open reading frame.

[0378] The nearest neighbor results for SEQ ID NO: 1-8051 were obtained by a BLASTX version 2.0al 19 MP-WashU search against Genpept release 123 and Geneseq release 200110 (Derwent), using BLAST algorithm. The nearest neighbor result showed the closest homologue for SEQ ID NO: 1-8051. The nearest neighbor results for SEQ ID NO: 1-8051, having identifiable function(s) are incorporated in the attached Sequence Listing.

[0379] Using eMatrix software package (Stanford University, Stanford, Calif.) (Wu et al., J. Comp. Biol., Vol. 6 pp. 219-235 (1999) herein incorporated by reference), all the polypeptide sequences were examined to determine whether they had identifiable signature regions. The attached Sequence Listing provides the results obtained by eMatrix analysis for each polypeptide as follows: the signature region found in the indicated polypeptide sequences, the description of the signature, the eMatrix p-value(s) and the position(s) of the signature within the polypeptide sequence.

[0380] Using the pFam software program (Sonnhammer et al., Nucleic Acids Res., Vol. 26 (1) pp. 320-322 (1998) herein incorporated by reference) all the polypeptide sequences were examined for domains with homology to certain peptide domains. The attached Sequence Listing provides the results obtained by pFam analysis for each polypeptide, namely: the name of the domain found, the description, the p-value and the pFam score for the identified domain within the sequence.

[0381] Tables 1 and 2 follow. Table 1 shows the various tissue sources of SEQ ID NO: 1-8051. Table 2 shows the start and stop nucleotides for the translated amino acid sequence for which each assemblage encodes. Table 2 also provides a correlation between the amino acid sequences set forth in the Sequence Listing, the nucleotide sequences set forth in the Sequence Listing and the SEQ ID NO: in U.S. Ser. No. 09/577,408.

LENGTHY TABLE REFERENCED HERE
US20070060743A1-20070315-T00001
Please refer to the end of the specification for access instructions.

LENGTHY TABLE REFERENCED HERE
US20070060743A1-20070315-T00002
Please refer to the end of the specification for access instructions.

LENGTHY TABLE
The patent application contains a lengthy table section. A copy of the table is available in electronic form from the USPTO web site (http://seqdata.uspto.gov/?pageRequest=docDetail&DocID=US20070060743A1). An electronic copy of the table will also be available from the USPTO upon request and payment of the fee set forth in 37 CFR 1.19(b)(3).

What is claimed is:

1. An isolated polynucleotide comprising a nucleotide sequence selected from the group consisting of SEQ ID NO: 1-8051, a mature protein coding portion of SEQ ID NO: 1-8051, an active domain of SEQ ID NO: 1-8051, and complementary sequences thereof.

2. An isolated polynucleotide encoding a polypeptide with biological activity, wherein said polynucleotide hybridizes to the polynucleotide of claim 1 under stringent hybridization conditions.

3. An isolated polynucleotide encoding a polypeptide with biological activity, wherein said polynucleotide has greater than about 90% sequence identity with the polynucleotide of claim 1.

4. The polynucleotide of claim 1 wherein said polynucleotide is DNA.

5. An isolated polynucleotide of claim 1 wherein said polynucleotide comprises the complementary sequences.

6. A vector comprising the polynucleotide of claim 1.

7. An expression vector comprising the polynucleotide of claim 1.

8. A host cell genetically engineered to comprise the polynucleotide of claim 1.

9. A host cell genetically engineered to comprise the polynucleotide of claim 1 operatively associated with a regulatory sequence that modulates expression of the polynucleotide in the host cell.

10. An isolated polypeptide, wherein the polypeptide is selected from the group consisting of:
(a) a polypeptide encoded by any one of the polynucleotides of claim 1; and
(b) a polypeptide encoded by a polynucleotide hybridizing under stringent conditions with any one of SEQ ID NO: 1-8051.

11. A composition comprising the polypeptide of claim 10 and a carrier.

12. An antibody directed against the polypeptide of claim 10.

13. A method for detecting the polynucleotide of claim 1 in a sample, comprising:
a) contacting the sample with a compound that binds to and forms a complex with the polynucleotide of claim 1 for a period sufficient to form the complex; and
b) detecting the complex, so that if a complex is detected, the polynucleotide of claim 1 is detected.

14. A method for detecting the polynucleotide of claim 1 in a sample, comprising:
a) contacting the sample under stringent hybridization conditions with nucleic acid primers that anneal to the polynucleotide of claim 1 under such conditions;
b) amplifying a product comprising at least a portion of the polynucleotide of claim 1; and
c) detecting said product and thereby the polynucleotide of claim 1 in the sample.

15. The method of claim 14, wherein the polynucleotide is an RNA molecule and the method further comprises reverse transcribing an annealed RNA molecule into a cDNA polynucleotide.

16. A method for detecting the polypeptide of claim 10 in a sample, comprising:
a) contacting the sample with a compound that binds to and forms a complex with the polypeptide under conditions and for a period sufficient to form the complex; and
b) detecting formation of the complex, so that if a complex formation is detected, the polypeptide of claim 10 is detected.

17. A method for identifying a compound that binds to the polypeptide of claim 10, comprising:
a) contacting the compound with the polypeptide of claim 10 under conditions sufficient to form a polypeptide/compound complex; and
b) detecting the complex, so that if the polypeptide/compound complex is detected, a compound that binds to the polypeptide of claim 10 is identified.

18. A method for identifying a compound that binds to the polypeptide of claim 10, comprising:
a) contacting the compound with the polypeptide of claim 10, in a cell, under conditions sufficient to form a polypeptide/compound complex, wherein the complex drives expression of a reporter gene sequence in the cell; and
b) detecting the complex by detecting reporter gene sequence expression, so that if the polypeptide/compound complex is detected, a compound that binds to the polypeptide of claim 10 is identified.

19. A method of producing the polypeptide of claim 10, comprising,
a) culturing a host cell comprising a polynucleotide sequence selected from the group consisting of a polynucleotide sequence of SEQ ID NO: 1-8051, a mature protein coding portion of SEQ ID NO: 1-8051, an active domain of SEQ ID NO: 1-8051, complementary sequences thereof and a polynucleotide sequence hybridizing under stringent conditions to SEQ ID NO: 1-8051, under conditions sufficient to express the polypeptide in said cell; and
b) isolating the polypeptide from the cell culture or cells of step (a).

20. An isolated polypeptide comprising an amino acid sequence selected from the group consisting of SEQ ID NO: 8052-16102, the mature protein portion thereof, or the active domain thereof.

21. The polypeptide of claim 20 wherein the polypeptide is provided on a polypeptide array.

22. A collection of polynucleotides, wherein the collection comprises the sequence information of at least one of SEQ ID NO: 1-8051.

23. The collection of claim 22, wherein the collection is provided on a nucleic acid array.

24. The collection of claim 23, wherein the array detects full-matches to any one of the polynucleotides in the collection.

25. The collection of claim 23, wherein the array detects mismatches to any one of the polynucleotides in the collection.

26. The collection of claim 22, wherein the collection is provided in a computer-readable format.

27. A method of treatment comprising administering to a mammalian subject in need thereof a therapeutic amount of a composition comprising a polypeptide of claim 10 or 20 and a pharmaceutically acceptable carrier.

28. A method of treatment comprising administering to a mammalian subject in need thereof a therapeutic amount of a composition comprising an antibody that specifically binds to a polypeptide of claim 10 or 20 and a pharmaceutically acceptable carrier.

The application's sequence listing, which the Patent Office published only in electronic form, follows.

SEQUENCE LISTING (16102 sequences)

SEQ ID NO: 1 - DNA, 534 bp, Homo sapiens
  SIMILAR (38)..(421): 1001254mologous to Homo sapiens alpha globin,accession number V00489,Smith-Waterman Score=657.
actcttctggtccccacagactcagagagaacccaccatggtgctgtctcctgccgacaagaccaacgtcaaggccgcctggggtaaggtcggcgcgcacgctggcgagtatggtgcggaggccctggagaggcacttcgacctgagccacggctctgcccaagttaagggccacggcaagaaggtggccgacgcgctgaccaacgccgtggcgcacgtggacgacatgcccaacgcgctgtccgccctgagcgacctgcacgcgcacaagcttcgggtggacccggtcaacttcaagctaagccactgcctgctggtgaccctggccgcccacctccccgccgagttcacccctgcggtgcacgcttccctggacaagttcctggcttctgtgagcaccgtgctgacctccaaataccgttaagctggagcctcggtagccgttcctcctgcccgctgggcctcccaacgggccctcctcccctccttgcaccggcccttcctggtctttgaataaagtctgagtgggcggca

SEQ ID NO: 2 - DNA, 463 bp, Homo sapiens
tttcaatattcaattattatttatattaatatgatgtcatgaattcctttcttcactgggttataattctgtgactgtcaccattttattctgatgttcaaatcgccccatatttggcctgttggaatcttttcaagttggcttctctgctttttttgggcatgtctccatcattctttgagcattgccttactttcttgtacaaaaagatattctgggctcatcttatactttctgtgctctagctttgaaattaccgtttcttcaaagagctctgtttccttttagaggaggatggtttttagaaaccaagttctaggtagcaggtgtgcttgttgctgttgaggtgttgcagctcccaggccctttccgtgaacagagccaggctcagatgaggcgagtgggcggccggggctgcagctggcgttggccattgaggagcttctgcgcgacagtgcgatcg

SEQ ID NO: 3 - DNA, 1072 bp, Homo sapiens
  SIMILAR (562)..(1032): 1001254mologous to Homo sapiens dJ798A10.1 (novel protein),accession number AL137802,Smith-Waterman Score=822.
atggctccagcccgcccccaggcgagcggcctccttcgcccggagcgcgtcggtccagcccccgcgcacgcgcgcacccccagcctcctaccttcgctcgccttctccgcagccgctgccgccgaggccgaggggccgcaccggtgctgccgcccaccggtcaccctgtcctgtcaccaggtggtgactggcccagtgacccccaagacaacccgccagaaaagaatcatgccaggtgctcacctgctcactgcagagggctctaaatctgcaactcagaaaaatagccatatcagtcgcgaacgccagcaagacgtagcccagcgcgtcggccgccatgccggcgataatggcctgcttctcgccgaaacgtttggtggcgggaccagtgacgaaggcttgagcgagggcgtgcaagattccgaataccgcaagcgacaggccgatcatcgtcgcgctccagcgaaagcggtcctcgccgaaaatgacccagagcgctgccggcacctgtcctacgagttgcatgataaagaagacagtcataagtgcggcgacgatagggagctctttgctcaggccccggtggatcagtttcctggcacagctgtggagagtgtgacggattccagcaggtacttcgtgatccgcatcgaagatggaaatgggcgacgggcgtttattggaattggcttcggggaccgaggtgatgcctttgacttcaatgttgcattgcaggaccatttcaagtgggtgaaacagcagtgtgaatttgcaaaacaagcccagaacccagaccaaggccctaaactggacctgggcttcaaggagggccagaccatcaagctcaacatcgcaaacatgaagaagaaggaaggagcagctgggaatccccgagtccggcctgccagcacaggagggctgagcctgcttccccctcccccaggggggaaaacctccaccctgatccctccccctggggagcagttggctgtggggggatccctcgtccagccagcagttgctcccagttcagatcaacttccagccagacccagccaggcacaggctgggg

SEQ ID NO: 4 - DNA, 628 bp, Homo sapiens
  SIMILAR (448)..(5): 961254mologous to Mus musculus putative,accession number AK009391,Smith-Waterman Score=733.
cgcgtgtccctttaacaagagtgctgaggatcttctcaatcttgtcagggtctgacagcagggcagctcccattcctcccttggtggaatattgttttggacagcccatgttgacatcaataccagccacatcattttctacaagcttggccacagcaagggctcgctctgcgtctgaagtccccatctggaagaccaccctgttctgctctctttcacaggtgcggaagacaactcgatcatcaggggcgacaaagtccactgtgctgagcacctcattaacaactctcttgcactgaatcatcttgaggtcgatcagctcctcacagtaaacaatgtccgctccataatccagggccagcagcctcattggaagagtccctacccgaaccattggggccaggattagcttattatggtaacacagagagaggctattcaaaatcatttcctcctctgttacagcctattattttgttctgatacttcaggattactttgatatatgtgttctggctttgtacagagtaattctttgtttgatatctcgcagctgaactcttaaaaagaacctcgcttcttcctcacggtgctccagctccacacaccgtactgagcctcgaattcc

SEQ ID NO: 5 - DNA, 948 bp, Homo sapiens
  SIMILAR (328)..(717): 1001254mologous to Homo sapiens putative dipeptidase,accession number AJ295149,Smith-Waterman Score=678.
atggggtggggcctgtcgtcaaggaagggactcagccctggaggtttctgtgagagctcaagccacaggagccacaggataagaggagtgtggctgcagaacccaggtggcaggcctttcctcaggccccttactcctgacctggacgaggccggggcttcctcaaggaggtaggaggtatcctggccagcagatcagccagaagctctaggaggaaggtgctgcggccggggactctgctgccctagacaagacttcatttccttccatgcagatggctgtgctctctgactgccacccctgcctgcctgcccggccctgcacaacatgcagccctccggcctcgagggtcccggcacgtttggtcggtggcctctgctgagtctgctgctcctgctgctgctgctccagcctgtaacctgtgcctacaccacgccaggcccccccagagccctcaccacgctgggcgcccccagagcccacaccatgccgggcacctacgctccctcgaccacactcagtagtcccagcacccagggcctgcaagagcaggcacgggccctgatgcgggacttcccgctcgtggacggccacaacgacctgcccctggtcctaaggcaggtttaccagaaagggctacaggatgttaacctgcgcaatttcagctacggccagaccagcctggacaggcttagagatggcctcgtgggcgcccagctacacacttgtacaagcacaattacacatgcatatgccactacgtacacagacacatgtcctcagccgtgttcgtgctccgaggaggtgctcagcacagtggactttgtcgcccctgatgatcgagttgtcttccgcacctgtgaaagagagcagaacagggtggtcttccagatgcctttggtgaacacctataaagtcaattcccattctgtccccactaactcctga

SEQ ID NO: 6 - DNA, 493 bp, Homo sapiens
  SIMILAR (58)..(492): 981254mologous to Homo sapiens UBASH3A protein,accession number AJ277750,Smith-Waterman Score=764.
gcgagaagtcctcatttctgtgtgcaggcgagcttcttggcctaagggcaggaagagatggcagcgggggagacgcatctctacgccaaggtctccaacaagctcaagagccgcagcagcccctcgctcctggagcccctcctggccatgggcttcccggtgcacaccgcgctgaaagtgttggcagccacggggaggaagacggcggaggaggccttggcctggctgcatgatcattgcaatgacccttccctagacgaccccatcccccaggagtatgcccttttcctctgtccaacggggcccctgctggaaaaacttcaagagttctggagagagagcaagcgccagtgtgcaaagaacagagctcatgaggtcttcccacacgtgacactctgtgacttcttcacgtgtgaagaccagaaggtggaatgcctgtacgaggcgctgaagagagctggagacaggctcctgggctccttccccacggccg

SEQ ID NO: 7 - DNA, 406 bp, Homo sapiens
  SIMILAR (23)..(406): 811254mologous to Homo sapiens alpha globin,accession number V00488,Smith-Waterman Score=532.
acaaactcagagagaacccaccatggtgctggctcctgccgacaaaaacaacgtcaaggccggctggggaaagggaggcgcgcacgctggcgaacatggcgcggaggccctggacaggaagatcctgtacttccccaccaccaaaaactacttcccgcacttttacctgagccacggctctgcccaggggaagggccacggtaagaaggaggacgacgcgctgaccaacgccgtggggcacggggaccacatgcccaacgcgctgtgcgccctgagcgacctgcacgcgcacaagcttggggtggacccggacaactgtaagctcctaatccactgcctgctggtgaccctgtgcgcccacctccccgccgagttcacccctgcggtgcacgccaccctggacaag

SEQ ID NO: 8 - DNA, 654 bp, Homo sapiens
  SIMILAR (618)..(427): 441254mologous to Mus musculus putative,accession number AK016929,Smith-Waterman Score=131.
aatagccactgtcatatcatttttaaaggaatataaattataggggatgttgtttctttgggtttttttttttttagagacaagatctctccgtgttgtctaggctggactcaaacttctggactcaagcaatcctcgcaacatcattaatagctgagagtagagacttgagccaccacacctgactatagggtctttttgaaaggaaaattgacatcatcaaaattttaaatatattcagtctatttcttataaactcaaagaatactaataaatgtgtactcaggtatatgtacagaaattgctgtaacattataattttaaacaatttaaaacagactgagcttccaaaggtagggtacaatgaaagaaaaggtggcttatttatactctggaatattttccaagagttgaaaaggatgaggatacacacacacacacacacacacacacacacacacacacacacacacacacacagtttgggtatccctaatccagaaattcaaatgctccaaagtccaaaactttctgacccaccaacatgactgatgctcaaaggaaatggccactggaagatttcagattttcagatttggaatgctcaaccagtaagtatataatgcaaataatccaaaatacaaaaaaaaaaaa

SEQ ID NO: 9 - DNA, 584 bp, Homo sapiens
  SIMILAR (1)..(66): 861254mologous to Homo sapiens BAT1,accession number Y14768,Smith-Waterman Score=97.
  misc_feature (1)...(584): n = a,t,c or g
gacaatgagctcttggactatgaagatgatgaggtggagacagcagctgggggtagtatgtctgagcccctgccaagaaggatgtcaagggctcctatttctccatccacagctctggctttcgtgacttcctgctcaagccagagttgctccgggccattgtcgactgtggctttgagcattccttcagaagttccagcatgagtgcatccctcaggccattctgggaatggatttcctgtgccaggccaagtcgggcatgggaaagacagcagtgtttgtcttggccacactgcaacagctggagccagttactgggcaggtgtctgtactggtgatgtgtcacactcgggagttggcttttcagacacggtagaagactcgcccattttggaatgtgaccgtctgtccttcaggagaggacaccagggtgggggtgaaggagacactactgcccccacccctgacagcccccaccccatggcttccatcttttgcatcaccaccactcctgaacccccatttctgatttgtcagaatttttttttnnnnnnnnnnnnnnnnnnnnnnnnnnnnnnnnnnnn

SEQ ID NO: 10 - DNA, 1034 bp, Homo sapiens
  SIMILAR (834)..(1034): 1001254mologous to Sus scrofa putative RNA helicase,accession number AJ251914,Smith-Waterman Score=349.
tgagacgttagtttcctttatatcttttgttactggcggtagcagtgaagttagaaacggttttaaaacaaatttcagacaggcattttccaaaggcaagcctggagcgcacggatctgtataaccgcggaaggccctgtttccggtcccttgcgcctgcgctcttgcagccaagaaggcgggaggctggagtagagggaagcctgcaaccggaagtgaaggcagatttccctccttcgtcgctgttgctgccgccatacgcgctctccctgtttaggtaagctttggccttcgctacaatccgtttccatctgcgcttctccgcacccatcccgtcacatgggttcctgatacccttttcacaggcgatggtctggtcgctggggcctagttggttcgctatttccttagcttgcatccctttcgagagcaaagagctcctgggggaaggaagggaagctaaggggggacccaatccaagatggtgtcctcggcgccattgtgttcgttttgctcccttcttccaatgggttcttctcatattggaggcctcagcatcaatgagaggcggtgctcggcgtcccttggtcttggtatttgcggagggcggggctcttctcaccttccttgttctttcttgagctctttttcggccctcggtgggactgggaggaggagctggtttctgggcccaggtggatttttctcaccttgacttgcccaacttaatttggagtgccttccaagtgtttacgatacgattggtgtcattgtatgtttctccaaaaggagtctcaccttcgtagcgtaacagtgatgtgagaccacttgttatggcagagaacgatgtggacaatgagctcttggactatgaagatgatgaggtggagacagcagctgggggagatggggctgaggcccctgccaagaaggatgtcaagggctcctatgtctccatccacagctctggctttcgtgacttcctgctcaagccagagttgctccgggccattgtcgactgtggctttgagcat

SEQ ID NO: 11 - DNA, 1724 bp, Homo sapiens
  SIMILAR (475)..(1518): 921254mologous to Mus musculus nuclear RNA helicase Bat1,accession number AF118128,Smith-Waterman Score=1615.
ggcacgaggcaaccggaagtgaaggcagatttccctccttcgtcgctgttgctgccgccatacgcgctctccctgtttagctcttctgttagaaatagtatctttgttttcctttgctgttcctcagtcccctgactcttcaccccttgttttcacctattttgcgagaacccatccagatcccccttcccttcttcccctgccggcccagttatggcagagaacgatgtggacaatgaagctcttggactatgaaagatgaatgaggtgggagacagcagctgggggagatggggctgaggcccctgccaagaaggatgtcaatgggctcctatgtctcccatcccacagctctggctttcgtgacttcctggctcaagccagagttgctccgggccatttgtcgacttgtggctttgagcatccgtcagaagtccagcatgagtgcatccctcaggccattctggggaatgggatgtcctgtgccagggccaagtcgggcagtggggaaagacaggcagtgttttgtcttggccacactgcaacagctggagccagtttactgggcaaggtgtctgtgctgggtgatgttgtcacactcgggagttggcttttcagatcagcaaggaatatgagcgcttctctaaatacatgcccaatgtcaaggttgctgttttttttggtggtctgtctatcaagaaggatgaagaggtgctgaagaagaactgcccgcatatcgtcgtggggactccaggccgtatcctagccctggctcgaaataagagcctcaacctcaaacacattaaacactttattttggatgaatgtgataagatgcttgaacagctcgacatgcgtcgggatgtccaggaaatttttcgcatgaccccccacgagaagcaggtcatgatgttcagtgctaccttgagcaaagagatccgtccagtctgccgcaagttcatgcaagatccaatggagatcttcgtggatgatgagacgaagttgacgctgcatgggttgcagcagtactacgtgaaactgaaggacaacgagaagaaccggaagctctttgaccttctggatgtccttgagttcaaccaggtggtgatctttgtgaagtctgtgcagcggtgcattgccttggcccagctactagtggagcagaacttcccagccattgccatccaccgtgggatgccccaggaggagaggctttctcggtatcagcagtttaaagattttcaacgacgaattcttgtggctaccaacctatttggccgaggcatggacatcgagcgggtgaacattgcttttaattatgacatgcctgaggattctgacacctacctgcatcgggtggccagagcaggccggtttggcaccaagggcttggctatcacatttgtgtccgatgagaatgatgccaagatcctcaatgatgtgcaggatcgctttgaggtcaatattagtgagctgcctgatgagatagacatctcctcctacattgaacagacacggtagaagactcgcccattttggaatgtgaccgtctgtccttcaggagaggacaccagggtggggtgaaggagacactactgcccccacccctgacagcccccaccccatggcttccatcttttgcatcaccaccactcctgaacccccatttctgatttgtcagaattttttttttaacaaaactaaaaatgaaaaaaaaaaaaaaa

SEQ ID NO: 12 - DNA, 385 bp, Homo sapiens
ggcacgagccacccttgtctcggccacctcaaggataatcactaaattgtgccgaaaggactgaggaacggtgcctggataagggccataatatcactggatgggcatgagtaacttgaaactgctgaagtacgtcctgtttttattcaacttgctcttttgggtaagagcatctcttctgagcacgggttagctcacctttacccagctaacctctcctcattcctctactgaaaaggctggtgtggggtaaaatgcgtgcctgtttgggtcatgttcagcacagccatcctagaaacgaaagagtaattattctttccctcttactgccacacaataaacctgcacaattgaaaggtaccaacgcttgtattactggaggtgg

SEQ ID NO: 13 - DNA, 422 bp, Homo sapiens
  misc_feature (1)...(422): n = a,t,c or g
cccacgcgtccgtgtgaccacagggcagggcagccaccaggagagatatgcctggcaggggccaggacaaaatgcaaacnnnnnnnnnnnnctgaaacaaagtcttgctctgcccccaagtgggagggcagggggccgatctaggcccattgaacgccttgctgggggagtaaacgggattcccttgccttggccaccaaaaaggatnnnnnnnnnnncgcaaaacaacctccccgggggccttttatttgggggggaaagggggttaccccggtcgagtaaggggggccgtaaaaaagcccccgggggaattttggggggggccccaacttcgggggggggaccccgggggcacccccccctccggaattaagggctctcggggaaaaaaaagattttttggggcttcggggggaaacccc

SEQ ID NO: 14 - DNA, 477 bp, Homo sapiens
  SIMILAR (328)..(477): 801254mologous to Homo sapiens FLJ00061 protein,accession number AK024468,Smith-Waterman Score=224.
tatcgtgtcgccggaagttcggtgggctccaggcgtcgcgatggaggagagcgggtacgagtcggtgctctgtgtcaagcctgacgtccacgtctaccgcatccctccgcgggctaccaaccgtggctacagggctgcggagtggcagctggaccagccatcatggagtggccggctgaggatcactgcaaagggacagatggcctacatcaagctggaggacaggacgtcaggggagctctttgctcaggccccggtggatcagtttcctggcacagctgtggagagtgtgacggattccagcaggtactttcgtgatccgcatcgaagatggaaatgggcgacgggcgtttatttgaatttggcttcggggaccgaggtgatgcctttgacttcaatgttgcattgcaggaccatttcaagtgggtgaaacagcagtgtgaatttgcaaaacaagcccagaacccagaccaaggc

SEQ ID NO: 15 - DNA, 416 bp, Homo sapiens
  SIMILAR (173)..(412): 551254mologous to Homo sapiens KRAB zinc finger protein HFB101S,accession number AB029149,Smith-Waterman Score=216.
ctgagctgaaggattgtggttggggaaagcgtagtcccagcaaggaagcagtttgtgggtaactgctgggaggtgagtggagtgagcttgtcacggagctgctggtggagcctggaggggaatggagggaggcagtgatagagatcgcggtgggggttgtgaggatgaattccgcactcatgactgacaacttacttgtgtgaaacataattgacgtgtggaagttcatttcaagagctgtgactgtcaaaaggccgaggaaggcggctgttctcagaaaaacttcacccggggtcctttatcagatacgtgtattggaattctcaaggggagccacatttgccgatacagtgaatgtggtaaaatattccccgacccacgatacttttgtgtgagtaggaacatccatacccggt

SEQ ID NO: 16 - DNA, 682 bp, Homo sapiens
  SIMILAR (1)..(246): 661254mologous to Homo sapiens Unknown (protein for IMAGE:3459656),accession number BC000862,Smith-Waterman Score=253.
agagacttcattactgaaatctgcaaggatgatcaggagcagcaattagaatttggagcagtatataccgccacaataactgaaatcagagatactggtgtaatggtaaaattatatcccaaatatggactgcggtactgcttcataacacacaacttgatcaacgaaagattaaacatcctactgccctaggattagaagttggcccaagaaattcaggtgaaatactttggacgtgaccccagccgatggaagaatgaggctttctcggaaaagtgcttcagtcgccagctacaaccgtggtcagaactttgaatgacagaagtagtattgtaatgggagaacctatttcacagtcatcatctaattctcagtgattttttttttttaaagagaattctagaattctattttgtctagggtgatgtgctgtagagcaacattttagtagtatcttccattgtgtagatttctatataatataaatacattttaattatttgtactaaaatgctcatttacatgtgccatttttttaattcgagtaacccatatttgtttaattgtatttacattataaatcaagaaatatttattattaaaagtaagtcatttatacatcttagaaaaaattacatagttttgtttttacaattctgaaatatatgaaaaacttagatag

SEQ ID NO: 17 - DNA, 2700 bp, Homo sapiens
  SIMILAR (441)..(569): 341254mologous to Saccharomyces cerevisiae N1366,accession number X78898,Smith-Waterman Score=45.
ggacttgtcggccgccgtagcccctgctaggacagcccgtgcgagcctgctggaggaggaagagaaaggcagaggagagtcgggttacaagatggcggatctgtagtagttaccgcggcggcgggagagcaagcgagccctggggggcaaagagacgggagagtgggtgtatgcgcgggtgaagtgagaggtaacggggcctccgggcggagaggcctcagtggctcttgtcaccccttctcgcggctgaacctttggagccatggtgaattcgggcctctccgaagccgccgccgccgccaccgccactactgcctttaccgtctcctaagagtgaggagcgcggacgaggtaagcgaggaggcggcggctagagcggtggagacagcagccaccatgtcggatacgcggcggcaagttgaaggtctataccctgaaacgaagaccggcaatgggacgaccgaggcaccgggcacgtctcctccacttacgtggaggagctcaaggggatgtcgctgctggttcgggcagagtccgacggatcactactcttgggaatcaaagataaatccaaatactgcatatcagaaacaacaggatacattaattgtttggtcagaagcagagaactatgatttggctctgagttttcaggagaaagctggctgtgatgagatctgggaaaaaatttgtcaggttcaaggtaaagacccatcagtggaagtcacacaggacctcattgatgaatctgaagaagaacgatttgaagaaatgcctgaaactagtcatctgattgacctgcccacatgtgaactcaataaacttgaagagattgctgacttagttacctcagtgctctcctcacctatccgtagggaaaagctggctctcgccttggaaaatgaaggctatattaaaaaactattgcagctgttccaagcttgcgagaacctagaaaacactgaaggcttacaccatttgtatgaaattattagaggaatcttattcctaaataaggcaactctttttgaggtaatgttttctgatgagtgtatcatggatgtcgtgggatgccttgaatatgaccctgctttggctcagccaaaaagacatagagaattcttgaccaaaactgcaaagttcaaggaagttataccaataacagactctgaactaaggcaaaaaatacatcagacttacagggtacagtacattcaggacatcattttgcccacaccatctgtttttgaagagaattttctttctactcttacgtcttttattttcttcaacaaagttgagatagtcagcatgttgcaggaagatgagaagcctttgtctgaagtttttgcacaattaacagaagaggctacagatgatgataaacggcgtgaattgggcatggatgatttgcaagtcagatcagctgctacagatatattttcttatctagtagaatttagtccatctatggtccgagagtttgtaatgcaagaagctcagcagagtgatgacgatattcttcttattaatgtggtaattgaacaaatgatctgtgatactgatcctgagctaggaggcgctgttcagttaatgggacttcttcgtactctaattgatccagagaacatgctggctacaactaataatacctttacccaggaaagatatggggaatccctgaataaactattactgccccctctctactccctgcaagagacaagacttctaaaaactgatatttggccaacggacagtggcatgttaacagctctatcagtcccattgccccactcaggcccgtggcttcaggactggctctgccccactgctgcttcccatcgcgttgtgtgggacggttgccctccaccagcagagggcaaagggccacaagctaagttcctaggaacgtcacatactggtgccatccaacaacatgacgacgtgcggaaccgaagtccccttccacctagcggcctctcgcggcgcaggcgtggacggggagatcgcgagaacctcccgcccaattgcgaccccgcgccaagaggcggggccgaaagaggaggaagtcgggccgaaagaggaggaagtctcgccgaagtactcccgccccagtcgggtacccctcctcgcgagagcgccgagcattccggcctgggaagcgcgtgcagaagcggagcccctgctaggacagcccgtgcgagcctgctggaggaggaagagaaaggcagagagagtcgggttacaagatggcggatctgtagtagttaccgcggcggcgggagagcaagcgagccctggggggcaaagagacgggagagtgggtgtatgcgcggagtgaggagcgcggacgaggtaagcgaggaggcggcggctagagcggtggagacagcagccaccatgtcggatacgcggcggcgagtgaaggtctataccctgaacgaagaccggcaatgggacgaccgaggcaccgggcacgtctcctccacttacgtggaggagctcaaggggatgtcgctgctggttcgggcagagtccgacggtaagtgtctccgggtaaacagtgtcgaaggtgaattggagaacacccacctggtgtctaatatggaactgattgattattggtggggagaaatcctcacacttcttggtgatgaaggtgacagcagtgatttgtgttgtgatagtgtagtatga

SEQ ID NO: 18 - DNA, 439 bp, Homo sapiens
gccctaaatccattaaactttggattcatttacagccgcatgtttctgtgagcacagagttggggctaaagttataggctaacaacatctcaaagcagaaacaatttttcttagtacagatcaaaatggagtttcttatgtcttccttttctacacagacacagtaacaatctgatctttcttttccccacatggactaatgcgatatcatagatatggtgtgtcttcagttacaagatgctctgtttgaattatatacattttagaaaactatgtacagatgaataatttaaaattaattgtaagtggtatttgtggtcttgatagagttggccacgatgtccaaatgtaatattaagcctatgggaaagtcagagccacttttttttttttttgagtcagagtcttgctctgtcgcccagactggagtggagtggca

SEQ ID NO: 19 - DNA, 404 bp, Homo sapiens
  SIMILAR (167)..(388): 811254mologous to Mus musculus putative,accession number AK008973,Smith-Waterman Score=307.
gcgccccgcgccctgcttgcctccattatccagccttgccccggcgccctgacctgacgccctggcctgacgccctgcttcgacgcctcctttctctcccaggggctggaccagggactgagcgtcccccggagagggtccggggtgaccccgacaagaagcaaaaatggggaagaaactggatctttccaagctcactgatgaagaggcccagcatgtcttggaagttgttcaacgagattttgacctccgaaggaaagaagaggaacggctagaggcgttgaagggcaagattaaaaaggaaagctccaagagggagctgctttccgacactgcccatctgaacgagacccactgcgcccgcttgcttgagcccttaacacttgtttgggaaagacaaaagg

SEQ ID NO: 20 - DNA, 343 bp, Homo sapiens
  SIMILAR (44)..(313): 461254mologous to Homo sapiens gag,accession number AF156961,Smith-Waterman Score=216.
cctccgtgtctctacccttctctttaaacttgcctcctttactatgggcaaccttccaccctccatttctccttcttctcccttagcctgtgttctcaagagcttaaaacctcttcacctcttgcctgacctaaaatctaagcatcttattttcttctccaacaccgcttggccccaatacaaactcgacaatggttttaaatggccagaaaatgacactttcgatttctccatcccacgagacctagatactttttgtcgaaaaaagggcaaatggtctgaggtgccttacgtccaggcatttttcacactttgttccctcctgtcgtacatgacacatacc

SEQ ID NO: 21 - DNA, 341 bp, Homo sapiens
  SIMILAR (226)..(336): 1001254mologous to Mus musculus putative,accession number AK017858,Smith-Waterman Score=190.
ccgccatgttggccatggcgtattgaagagagcgagcgagagaggagcggagcggcacagcctcccaccctcccggctggtgttagtgcccggacggcgggctctgcgctccgcccctcaagtccccggcagcggttggcgagtggggaccgaacccccggttctccatgatcccgctggccggggccgtttccccagagcggagaggtatctgctgcgcctgagatgagtaaactgtcgtttcgggcgcgggcgctagacgcctcgaagccgctgccggttttccgctgtgaggatctgcccgacctgcacgaatacgcctcgataaacagggcccgtgc

SEQ ID NO: 22 - DNA, 408 bp, Homo sapiens
  SIMILAR (130)..(405): 1001254mologous to Homo sapiens There are three putative hydrophobic domains in the central region,accession number D79988,Smith-Waterman Score=461.
atggaacctaaagactagaggcggttgtgtgagtcaggaagaggggccagatatctgagtgttcctctttagtttcttcaattgcaggaaagacagtggttcctgactcaggaagacagtctcagaaacatgtggaatgatattgagctgctaacaaatgatgataccggaagtgggtacctgagtgtcggttcaagaaaagaacatggaactgctttatatcaagtagatttgctagtgaagatctcttctgaaaaggcctcattaaatccaaagatacaggcatgcagcttaagtgatgggtttattattgtagccgaccaatcagtgatattgcttgacagtatttgtagatcacttcaattgcatcttgtctttgatactgaagtggatgtagttggcctttgg

SEQ ID NO: 23 - DNA, 644 bp, Homo sapiens
gcggttgtgtgagtcaggaagaggggccagatatctgagtgttcctctttagtttcttcaattgcaggaaagacagtggttcctgactcaggaagacagtctcagaaacatgtggaatgatattgagctgctaacaaatgatgataccggaagtgggtacctgagtgtcggttcaagaaaagaaacatctctgcactttctccaagcttctaatttttaccccagtgccaagaaatagcagaaccaaactggaagccacctggctagaagtctgggaggagtggtccgcaactgtaaacccccagcactgcagccggtggcctagaaaggcgtgtggagcaaaaagccagcacacagaagtgttaattacacctgttattctgactttgtagtcctttgccatacttgcgaataacttaagtgaatttgatgttactggaattagtttgcctttattttgccagttgaaaaaaaagatttctaaaaaactcaatgaaacatgattcaacacaggtttcgaagtaaaataagtctggatttgagttctagttctatcacttactagctgtgtgggcctgaacaagttatttaatttcccacagagagaaacaagggtggtgctgctgtcacccaagctgagaaga

SEQ ID NO: 24 - DNA, 480 bp, Homo sapiens
  SIMILAR (321)..(479): 831254mologous to Mus musculus putative,accession number AK014045,Smith-Waterman Score=230.
gcacgagtgaagactgaaagagtcgaatggtttgttggcaggacctataagaatcccttaggatgaagctgagtcttaccaaggtagttaatggctgtcgcctaggaaaaataaaaaacctgggcaaaacaggggaccacaccatggatattccaggctgccttctgtataccaagactggctccgccccacacctcacccatcacacgctgcataatatccacggggttcctgccatggctcagcttacgctgtcatccctagcagaacatcatgaagtcttgacagaatataaagaaggagttggaaagtttataggcatgccagaatcactcttgtactgctccctgcacgatccagtcagcccctgcccggctggttatgtaacaaacaagtctgtgtctgtgtggagtgttgcacgacgagtggaaatgactgtttccaagttcatggcaattcaaaaggcccttcagccagact

SEQ ID NO: 25 - DNA, 426 bp, Homo sapiens
  SIMILAR (98)..(424): 1001254mologous to Homo sapiens fibrillin 15,accession number X62008,Smith-Waterman Score=637.
  misc_feature (1)...(426): n = a,t,c or g
atcgcgctgcaggaattcggacgagangnacaaagagcttgctccctacgatgagaactggttctacacgcgagctgcttccacagcgcggcacctgtaccattcaactcccgataggctattttgtgttgacattgatgaatgcagcataatgaatggtggttgtgaaaccttctgcacaaactctgaaggcagctatgaatgtagctgtcagccgggatttgcactaatgcctgaccagagatcatgcaccgacatcgatgagtgtgaagataatcccaatatctgtgatggtggtcagtgcacaaatatccctggagagtacaggtgcttgtgttatgatggattcatggcatctgaagacatgaagacttgtgtagatgtcaatgagtgtgacctgaatccaaatatctgcctaagtgggaa

SEQ ID NO: 26 - DNA, 399 bp, Homo sapiens
  SIMILAR (64)..(387): 421254mologous to Human endogenous retrovirus W polyprotein,accession number AB021921,Smith-Waterman Score=220.
tgacttggtaccaagggcttctatgtgaaaacccttacacacctttagaacactaaacaccctaacctggctattgtgctcccagtcgaacaggcagctcttctccataactgtgtcaaaacagtagacgaggtatttcccaatgagaaagatcttacagacagacccctcagagacccagatgtcaagtacttcacaggtggaagtagttttgtgctggaagagtttggacatgccaggtatacagtggtaacatcagactcagtagtagaggctcagcctctgcctaccggaacatcagctcaaaaggcagaattaatagccctgacaagagcactgttgctagcaaaagagaagaaagtcagtatttacactaattctaagtatgcttctcgtgcc

SEQ ID NO: 27 - DNA, 664 bp, Homo sapiens
attcggcacgcggagccaggcagaggcaggcatctatagtcccaaagtgctgggattacaggtgtgagccaccacatctggcccaagtcacccaaattttttacagcttggtttggaaggcaatgtagtatattaaaattatgggccctggagtcagaaagatccaggtttgaatacagagtccgtcatttattagctttatgaatttgagcaatttcgtctcacttgtaaatatagggaatagctcctacctctcaggtatgttgccaaaaaactatattaaaagcacttagcataagtggcccatgacagagtaagcactcagtaaatcatgccatttatctcatcttataaggcatgaaagtagaattttacaagttgtacagaaatagaaggcttggagtggacactacattaaaaggataaaaaaatggagccaggcagaggcaggcatctatagtcccagctattgaggaggcctgaggctggaggatcccttgaacctaggagtttgaggccagcctggacaacaatgtgagattgtggctccaaaaaaataataaaaaataggctgctctgcctatggagtagccattcttttattcctttacttttttaataaacttgcttttactttatggaaaaaataaatttttaaatgaca

SEQ ID NO: 28 - DNA, 366 bp, Homo sapiens
  SIMILAR (1)..(213): 1001254mologous to Homo sapiens Human secreted protein, SEQ ID NO: 5090,accession number AAG01009,Smith-Waterman Score=370.
ctctcttccagcctccgaccgccctccgatttcctctccgcttgcaacctccgggaccatcttctcggccatctcctgcttctgggacctgccagcaccgtttttgtggttagctccttcttgccaaccaaccatgagctcccagattcgtcagaattattccaccgacgtggaggcagccgtcaacagcctggtcaatttgtacctgcaggcctcctacacctacctctctcctccaggacatcaagaagccagctgaagatgagtggggtaaaaccccagacgccatgaaagctgccatggccctggagaaaaagctgaaccaggcccttttggatcttcatgccctgggttctgcccgcacgg

SEQ ID NO: 29 - DNA, 782 bp, Homo sapiens
  SIMILAR (314)..(469): 981254mologous to Homo sapiens ferritin light chain,accession number M11147,Smith-Waterman Score=259.
aatagactcactaataggaaatttgcccctcgaggcccaagaattcggcacgaaggggcggtcccgcgggtctgtctcttgcttcaacagtgtttggacggaacagatccggggactgggcttccagcctccgaccgccctccgatttcctgctccgcttgcaacctccgggaccatcttatcggccatctcctgcttctgggacctgccagcaccgttttttgtggttagctccttcttgccaaccaaccatgagctcccagattcgatcagaattattccaccgacgtggaggcagccgtcaacagcctgggtcaatttgtacctgcaggcctcctacacctacctatctctgggcttctatttcgaccgcgatgatgtggctctggaaggcgtgagccacttcttccgcgaactggccgaggagaagcgcgagggctactagcgtctcctgaagatgcaaaaccaagcgtggcggccgcgctctcttccaggacatcaagaagccagctgaagatgagtggggtaaaaccccagacgccatgaaagctgccatggccctggagaaaaagctgaaccaggcccttttggatcttcatgccctgggttctgcccgcacggacccccatctctgtgacttcctggagactcacttcctagatgaggaagtgaagcttatcaagaagatgggtgaccacctgaccaacctccacaggctgggtggcccggaggctgggctgggcgagtatctcttcgaaaggctcactctcaagcacgactaa

SEQ ID NO: 30 - DNA, 608 bp, Homo sapiens
  SIMILAR (497)..(592): 781254mologous to Homo sapiens dJ1049G16.2.2 (continued from bA456N23.2 in Em:AL353777 and dJ237J2.1 in Em:AL021394),accession number AL034418,Smith-Waterman Score=144.
gccccctcgtatctctgagaagttgctcagagtaggacacagagaaatatggcccccaccctgggaagtactgctgtcactgtttaagtgtatttcagttctgttactccaattcatacacacagtcttccatgaggatggtaggatgaacctggttagctggctttggataagtagatcagcatgactacctggaataaaagtgactgactctaggataaaaaattaaaaaaagattctttcacagcaacgagtctttgcaaaacctctctcctaataatcacaaaccaggggaagaaaagtgggagcagggaacacaggaacacagccaaagggaatattgcaaaatgcttcccgagcttcatcagacagacttcttgcaatgccacgactggatgcatctgcacacaattccgggaaatgcccaccttgctgttctcctatccccaattttctttctttctttctttttttttttctttttttgagacagagtctctgttacccaggctggagtgcagtggtgcaatctcggctcactgcaacctcgacctcctgggctcaactgatcctcccaccttggccccccaaataacctgcactacacg

SEQ ID NO: 31 - DNA, 431 bp, Homo sapiens
  SIMILAR (168)..(425): 721254mologous to Mus musculus putative,accession number AK012885,Smith-Waterman Score=306.
tgcatcgcatcagctcccaacgcatctagcaggaaaggagagggagctttccccgaagaccctcctggaccagccccaggctcctgtgctggttgcacgccagggcctgtactgaccacctccacgtaccactggggctgtattgaggaatggcggccgtgggcaacctgcttggccgggtgaggcaaagcaccgtgaaggtcaccggacctgcactccaccgcctgcacacatccttctggcgagctgacagcaacagggcctcactcactcgtgtgcaccgccaggcttatgcacgactctacccagagctgttggagaagcaggatggctgcaccatccacatacgctacagggagccacggcgcatgctggcgatgcccatagatctggacaccctgtctcctgaggagcgccgggccaggctgtga

SEQ ID NO: 32 - DNA, 700 bp, Homo sapiens
  SIMILAR (495)..(698): 761254mologous to Mus musculus putative,accession number AK012885,Smith-Waterman Score=256.
gtggtggaattcccttccttttaaaaagatctcttcattctctgcctagcaggttgcacgccagggcctgtactgaccacctccacgtgccactggggctgtaaggaggaatggcggccgagggcaacctgcttgggtaagcatggacttttaggtccctggggattactgtcaggggccaacccaaggaacccctctcttcagcaggaaaccgccattctaatcctccctaggccttgctattggccactgtcccctgtgctggaagcctttgtgcccttgctcagcctggcagcctcttcctggctagggggccagaacgcctctgaccacagcctgtggctcctgaggaagccccgaggctcatcctgccccggcacgggtcaccagctctggtaatgtctcctgtggcccggcagtgcccaatcacagccagcctcagtcatgttggcactctgctgcagcactgtcggctgaccagagcttgaacatttatctgcagccggctgaggcagagcaccgtgaaggccaccggacctgcactccgccgcctgcacacatcctcctggcgagctgacagcagcagggcctcactcactcgtgtgcaccgccaggcttatgcacgactctaccccgtgctgctggtgaagcaggatggctccaccatccacatccgctacagggagccacggcgcatgct

SEQ ID NO: 33 - DNA, 1442 bp, Homo sapiens
  misc_feature (1)...(1442): n = a,t,c or g
gcggccgcaggttggcgcctcgtgtgggccgggaacattggcgggaggcgctgtaccctcccggtggagtcgggagggagggaggcagggaaggggacagggggctgcacctgtaataagcccttgtccccatgcagtctagcaggaaaggagagggagctttccccgaagaccctcctggaccagccccaggctcctgtgctggtgaggccgagggagagggatgtgggcatagggacacggtaacaaggatattccattntttaaaggggaacgcgactcgggtttccgggggctttccttttggggggggaaaaaagaggnngnccccacccacaaaaaaagagttggcttttttggggggctttttttttcggtgtgggtgttggaaaaagggnnnnnnnnnngggccctcccccccaaatttcctggggaatccgggcccaccaaaaagcctgggccttcattctcctttaagcaagcatgacaatcctcacttcactgagtttttattaaaactagcaatgaccttagaaagcaaggcatgacctcagctccacttttgaggctgcagtccattcagagaggtttcgcagactcggtaacggccagaacagacagcctgggccctgccgcaggctgactcagaatctttgggagtagtgaccaacttctgcttttggaaaaacctctacaggcggttctgagaagtccaagggttgctgggagaggttggttgcacgccaagggcctgtactggaccacctccacgtgccactggggctgtaaggaggaatggcggccgtgggcagcctgcttggccggctgaggcagagcaccgtgaaggccaccggacctgcactccgccgcctgcaacacatcctcctggcgaagctgacagccagcagggccctcactcactcggtgtgcaaccgcccaggctttatgcacgactcttcccccgtgctgcttggtgaagcaggatggctccaccatccacatccgctacagggagccacggcgcaatgctggcgaatgcccatagatctggacaccctgtctcctgaggagcgccgggccaggctgcggaagcgttgaggcttcagcttccagttcgaggaaggagttacggagcaggagctcagttgatgactttgcatgtggagctgctaccgacagttcttggaccaggaccaagaagtgaccgtggctccagccaccccgggacattgctaagatgggagggctgttcttaaatcactcgttcttgaaaaaaaaaaaaaaaaaaaaaaaaaaaaaaaaaagcgcggccgaaagtttttttcctttagtnagggttattttagnttggnattggcctcttttnaaaactcgtnattggggaaaacctgggggtttacccatttaattcgctttnaagaanatccccttttngcaantgg

SEQ ID NO: 34 - DNA, 426 bp, Homo sapiens
  SIMILAR (164)..(424): 981254mologous to Mus musculus putative,accession number AK012619,Smith-Waterman Score=451.
cccgcggacccaccagccccgaacggggattcttggcccagccggccggcgcgcgtgaggaggggcgttagggcgcgcggggtctccaccttctgtcgaccccgcgtcgggtgttgcagtctccgaggcggcgaggagtcctctgggctcgggcttcacctctcgggaaggagtcaagactgagaacaacgatcatattaatttgaaggtggcggggcaggatggttctgtggtgcagtttaagattaagaggcatacaccacttagtaaactaatgaaagcctattgtgaacgacagggattgtcaatgaggcagatcagattccgatttgacgggcaaccaatcaatgaaacagacacacctgcacagttggaaatggaggatgaagatacaattgatgtgttccaacagcagacgggaggtgt

SEQ ID NO: 35 - DNA, 2352 bp, Homo sapiens
  SIMILAR (2129)..(2230): 261254mologous to Homo sapiens putative p150,accession number U93563,Smith-Waterman Score=41.
atggtaaagggatcaattcaacaagaagagctaactatcctaaatagatatgcatccaatacaggagcacccagattcataaagcaagtcctgagtgacctacaaagagacttagactcccacacattaataatgggagactttaacaccccactgtcaacattagacagatcaacgagacagaaagtcaacaaggatacccaggaattgaactcagctctgcaccaagtggacctaataggcatctacagaactctccaccccaaatcaacagaatatacatttttttcagcaccacaccacagctattccaaaattgaccacatacttggaagtaaagctctcctcagcaaatgtaaaagaacagaaattataacaaactatctctcagaccacagtgcaatcaaactagaactcaggattaagaaactcactcaaaaccgctcaactacatggaaaatgaacaacctgctcctgaatgactactgggtacataacgaaatgaaggcagaaataaagatgttctttgaaaccaacgagaacaaagacacaacataccagaatctctgggacgcattcaaagcagtgtgtagagggaaatttatagcactaaatgcccacaagagaaagcaggaaagatctaaaattgacaccctaacatcacaattaaaagaactagaaaagcaagagcaaacacattcaaaagctagcagaaggcaagaaataactaaaatcagagcagaactaaaggaaatcgagacacaaaaaacccttcaaaaaattaatgaatccaggagctggttttttgaaaggatcaacaaaattgatagaccgctagcaagactaataaagaagaaaaaaagagagaagaatccaatagacgcaataaaaaatgataaaggggatatcaccaccgatcccacagaaatacaaactaccatcagagaatactacaaacacctctacgcaaataaactagaaaatctagaagaaatggataaattccttgacacatacactctcccaagactaaaccaggaagaagttgaatctctgaatagaccaataacaggatctgaaattgtggcaataatcaatagcttaccaaccaaaaagagtccaggaccagatggattcacaaccgaatcctaccagaggtacaaggaggaactggtaccattccttctgaaactatcccaatcaatagaaaaagagggaatcctccctaactcattttatgaggccagcatcatcctgataccaaagccaggcagagacacaaccaaaaaagagaattttagaccaatatccttgatgaacattgatgcaaaaatcctcaataaaatactggcaaaccaaatccagcagcacatcagaaagcttatccaccatgatcaagtgggcttcatccctgggatgcaaggctggttcaatatatgcaaatcaataaatgtaatccagcatagaaacagagccaaagacaaaaaccacatgattatctcaatagatgcagaaaaggcctttgatgaaattcaacaatgcttcatgctaaaaactctcaataaattagaaccatctaatcatactgcgctggctggtgtgggtgtgcaccaggaggactccattgcagctctggcctatgatctggatgaaaatcacaatttttcacaggccttagctgcgccccaggactcccatatcatccagtcatgtaggaaaaaccaactgtctgctcccttctcagcagccggctctgcagttcatgcagctcccatgcacagctgcatggccagctctccctatagggtgcggacccgccacctcttttgtgaagcagcagctgaggagactccggtgttcaccatggccaacgaaaagcccacagaagaagtcaagactgagaacaacaatcatattaatttgaaggtggcgggacaggatggttctgtggtgcagtttaagattaagaggcagacaccacttagtaaactaatgaaagcctattgtgaaccacggggattgtcaatgaagcagatcagattccgatttggtgggcaaccaatcagtggaacagacaaacctgcacagttggaaatggaagatgaagatacaattgatgtgtttcaacagcctacgggaggtgtctactgaaaagggaacctgcttctttactccagaacgctgttctttaaagaccaagattactgcattctcaattagaaaactgcaatttggttccaccacattctgactactacagtatagttttctctattcttttgtttcccccttccacattcctttattatacatgaagtaactggtatgtgtacacaagcatattgctttttt

SEQ ID NO: 36 - DNA, 450 bp, Homo sapiens
  SIMILAR (65)..(448): 561254mologous to Mus musculus putative,accession number AK012052,Smith-Waterman Score=244.
  misc_feature (1)...(450): n = a,t,c or g
cgggaaaccccgtcgttccctttcccctggctggcagtgcacaggccgggccgcatgatgcctgggagttactgtaaaagacgtgaaccagcaggagttcgtcagagctctggcagcgcttccatcaaaaagtccgggaagctgaaagtccccgaatggttgggataccgtcaagctgctggccaagcacaaagagcttgctccctacggatgagaactggttctactacgcgagctngtgaggaacttagcttccacagcgcggcacctgttacctccggggtgggcgctgggggttggctccattgaccaagatctatgggggggacgttcagaggaaacgggcgttcattgccccagccattttcagccgaggcttccaagagtgtggcccgccgggtcctccaagccctgggaggggctgaaaatggtggaaaaggaccaagatgg

SEQ ID NO: 37 - DNA, 1172 bp, Homo sapiens
  SIMILAR (350)..(514): 581254mologous to Mus musculus putative,accession number AK012619,Smith-Waterman Score=125.
atgaggaaagagcagaagatggaaggggacacctatgagattatgcagggtggggggagggagcgcacgacgtgcgcgcaccctctcccctcgtccaccgctgccgcctccttcttctgccgctcctggtgctgcttgtgtgcctcgtttggtgcggacctgcgtacctcttyttgtgaaagcggcagctgaggagactccggcggctcgccatggcccgacgaaaagcccaaggaaggagtcaagactgagaacaacgatcatattaatttgaaggtggccggggcagrgatggttctgttgtgcaagtttaagattaagaggcatacaccacttagtaaactaatgaaagcctattgtgaaccgacagggattgtcaatgaggcagatcagattccggatttgaccgggcaacccaatccatgaaacagacacacctgcaccagttgggaaatggaaggatgaaagataccaattgatggtgttccaacaagcaagaccgggaggtgtctacttgaaaaagggaacctgcttcttttactccaagaactctgtttctttttaaaggacccaagattacatttcttcaattaggaaaacttgcaatttgggttccacccacatccctgacttacttaccctattagttttctcttattcttttcatttccccctttcccccattcctttatttgttacataaagtaactgggtatatgtggcaccaagccatattggcattttttttttttttttttaactaaacgagccaatggtatgttttgattgacatccaagtgggagacggggatggggaaaaaatactgaatccgtgaaaaatacccccctttctcccattagtggcatgctccattcagctcttatctttatattccgagtaagttattttgctctcactgttttaacaaaaaaaaaaaaacaacaacataaaaatccttgcataccttgttcaattggagaattttaatgtttttcatttatcattgtaaaaccaaggacaattttataacttttttgtacgtagctgttacatgtagggcaatctgtctttaagtagggataaattactctaaaacaaaaaagaatcctagatagttttcccttcaagtcaagcgtcttgttgtttaaataaacttcttgtttaaaaaaaa

SEQ ID NO: 38 - DNA, 406 bp, Homo sapiens
  SIMILAR (246)..(353): 941254mologous to Homo sapiens cyclin D-binding Myb-like protein beta,accession number AF202144,Smith-Waterman Score=177.
gaggtttttaaaatttatcagagcaaacagattctttgagatatctaattctaaataatgggtataaatttgggaaaggcagattttgaaatctgaactctcattgcaattttacatgaagaacactgtaggcagatacccaaataaatgtgtggggtatttcaggggattataagggaatacttcatatttgggaataatttttgaaatcctgatctggaatctgttcttgtacagatttgactatgaccacagtggaagaggattctgacacagtaacagtaaaaactgtgaactctgtgactttgactcaggacacagaagggaatctcattcttcactgccctcagaatggtaggagaacttgctgacatataattctgactctctgaatttatgaattccg

SEQ ID NO: 39 - DNA, 787 bp, Homo sapiens
  SIMILAR (572)..(787): 561254mologous to Homo sapiens Human myelin oligodendrocyte glycoprotein gene,accession number AAZ29204,Smith-Waterman Score= 177.
aattcggaacgaggcctagttcaggcttactatctagaacctcatgctagcttaggttgcatgtttacattgctgcagtgtctttactggaagcttagttggatcgaaatggacaccgagatggagatgcttctggctacatttcgcagaaccccaggagacctgcatttagaccactctgtccatttgtgtgcccacccccacccccagggtctaagtgtagactccaagaggagcagcccagagcttggaggagaggtgtgtctggggcaccactggtgggtggtgctgctcttctttttgttgtagttaatgcggtgtcttttaatgggactctcaggcctcccagacagccttgttcctttaaggcagaagctcttctttcattgtgtacctcctggggattcatgaggtgtgagatttggcctgcttgactttgaatttcaagtttttcaagtgactctcagtgtcagaagaagcatttcatgctgtccacatgtggtatgtccacagctcaccttcaaaggcttagatgtagccatcacagagagtggtattttattaagaacccaagtcccagcctgaccaacatggtgaaaccccatctctactaaaaatacaaaaattagccgggcgtggtggcacgtgcctatactcccagctacttaggaggctgaggcaggagaatcacttgaacccgggaggcagaggttgcagtgagccaagatcacaccactgcactctagcctgggcgacagtgagactccccctcaaaaaaaaaaaaaaa

SEQ ID NO: 40 - DNA, 401 bp, Homo sapiens
  SIMILAR (71)..(400): 801254mologous to Homo sapiens Similar to Cip1-interacting zinc finger protein,accession number BC004119,Smith-Waterman Score= 468.
acagacaccagacctgctgcctgaggccctggaagcccaagtgctgccagcaaagagattgaggagctcagaagagcccacagagaaggaacctccagggcagttacaggtgaaggcccagccgcaggcccggatgacagtaccgaagcaggtgaggtccagagatatatccagagaggagtggaagggctcggagacctacagccccaatactgcatatggtgtggacttcctggtgcccgtgatgggctatatctgccgcatctgccacaagttctatcacagcaactcaggggcacagctctcccactgcaagtccctgggccactttgagaacctgcagaaatacaaggcggccaagaaccccagccccaccacccgacctgtgagccgccggtgcg

SEQ ID NO: 41 - DNA, 454 bp, Homo sapiens
  misc_feature (1)...(454): n = a,t,c or g
ccccgnnnnnnnnnnnnnnnnnnnnnnnnnnnnnnnnnnnnnnnnnnnnnnnnnnnnnnnnnnnnnnnnnnnnnnnnnnnnnnnnnnnnnnnnnnnnnnnnnnnnnnnnnnnnnnnnnnnnnnnnnnnnnnnnnnnnnnnnnnnnnnnnnnnnnnnnnnnnnnnnnnnnnnnnnnnnnnnnnnnnnnnnnnnnnnnnnnnnnnnnnnnnnnnnnnnnnnnnnnnnnnnnnnnnnnnnnnnnnnnnnnnnnnnnnnnnnnnnnnnnnnnnnnnnnnnnnnnnnnnnnnnnnnnnnnnnnnnnnnnnnnnnnnnnnnnnntcaaagttaaaacaggttaccactttcacctattaccatcaggttgcttatttttgttttatgaatatatatttgtatgcatgtttactttatgtttcagtttaccgggcgcgtgggtcgacacggaaattcgaga

SEQ ID NO: 42 - DNA, 2795 bp, Homo sapiens
  SIMILAR (2537)..(2794): 1001254mologous to Homo sapiens LSFR1 protein,accession number Y17454,Smith-Waterman Score=471.
ttcaagaccagcctggccaacatggtgaaaccccgtctctactaaaaatacaaaagttagkcgggtgtggtggtgcatgcctgtaatcccagcvtcttgggaggccaaggcacyagaatcgcttgaaccaggagacggaggtttcagtgaatgaagatcgtgccattgtattccagcctcggcaacacagcaggactgtgattttctttggagactcctagattttctgtggttttgaactgaathtgttggatgttggcaagtgcgctcttatgagctgtgtctvtatcctgcatgtgcccgcacagagacttatctgggaggtgagcaaagtatgtttggtagtgaggtcasaaaggcaatcagccccttcctcccggactcccattgccatcttctcagtccttctccctttctttcccaagtagtttacccacccctccttcttttcctcccctgtccctaaaataatccacgtgtctttcttaaaattctctctttgatcctgtcctttggataacaccgtcagtggcctactactggggtctaggacaggacctctgttgaggcagtcaggagtcttccctggacttccacaatggcccctttcctggggttggaccagtatgactactggtacccaccttaatcttctttatacatacctccctacaactatgggagtaccatccctctattcacccattcattcatgaccatttttggactaccaagctccccccctcccgaaggaggctgaggtttttgtgactctctagactctattgtgggatggaatgaacattgctaaagaatcttgtgttcgctttacttttaaaaaggtattttttttcctaattataaaaactgatgtgtccagttaacggggaaaattagaaatgccagccacaaataacatgtaatattttacccacaaaattgcccatataatatcttgtcttttttggggggtgtgaattttttgcattgttctggtcatagtgctttatcatgtaatttatgttcttttttactaagtattatgtgtggttattatagattttcacaaagatatattgctggtaatatattttattgtgtagtcttataatttacttaaccttctttcaattgttagaaatttaggctatttccagattttcagtattgtaaataatgctgtgatgaccaattttgtgaataaaatgtttttatgtatttcagattattcccttaggatagtctctcagtgccaagttgtcaaaaacatctctattttgcttatcttcctgctctcttgcttgccttagggggtagtaaactgaaacataaagtaaacttgcttacaaataaaaaccttaaaccaaaattaggcaccctgatggtaataggggaaaggggtaacctgttttaactttgaatttttgccgggagccaccatgcccagccagattttttgcagtttaacacgtttccaaaaagggggttttaggtcaggccctggggctggaagcagggacccatgagggccaaggcctggtccttgccttcaaaggctgacccagttatagtccaggggggggaggggccagctggggctgctcatagcctttggcagccaaagtggggtattgaggggctggggaggaagcgttgtggtgggggggcctgcagtcctaggcagggtagtatgaggcccagcttcattgctcagtagtcacatcatctcaggcaagccacttggcctctctgagcctcagttgcctctgctcagaagtaacaacctgaacttggactatcagggaagcccagggcccacagcttggtcctaggaagggcttagcaaacgggggtggttgtccttcttggaagccacatttgtttgcctggagagtggaggagggcactgctaggcctgctagggctgacacggccagagtcagatgacctcatctcacatccagcaggtgaaatgcagtctttgatcccttgaaacccaccctctaggaccaaggtcactgcagtattggataggacctcagggagttagcagggggctcatggttaagagtgtgaactacggcttagacctacagggttccctgcccagctcctccacaaaccagctgtgcaaccctagacaagtgagttaatgtccctgggcctcagtttcttcttagtaaaatgtgtgtaagccatagagggctgttatgaggattcagtcaaatgacacatgatgtcttgggcacacctggcgtggattatggcgcctgtaggagcaggagggcttcctgggaggagggggctagttgaacagagtctagaaaagtatagattgggaagagcacttttggggaggcaggattcaccatgtgcaaaggctcaggagaattgccacccaattaccttcctggaaaatcaaggggattctgtgtgtcccaaagggcaattggtggtcttctaggccccccgacctgtgtcttgggaggtgtcaaggggaagcccagatccgaggcccacacttgcatgttttcaggtgaggtccagagatatatccagagaggagtggaagggctcggagacctacagccccaatactgcatatggtgtggacttcctggtgcccgtgatgggctatatctgccgcatctgccacaagttctatcacagcaactcaggggcacagctctcccactgcaagtccctgggccactttgagaacctgcagaaatacaaggcggccaagaaccccagccccaccacccgacctgtgagccgccggtgcgcaatcaacg

SEQ ID NO: 43 - DNA, 1385 bp, Homo sapiens
  misc_feature (1)...(1385): n = a,t,c or g
ccagataacaagaggggcccccccaggccccagcttgatttaggagtgtaagttccactcagcactcagcccacgctgagtctgatgcccacaggtaaagggtaatgctggccatcgaaatacaaaagctaaaggaagcacaccattctctctgcctccctgccttgcacctggcctccttatctgtctcccagacttgaaagatcagtgtatacacatcaacgcggtagaccagggggagtctgccaatgaaaggagagacagccatgagatcagggtgggactggtaagggagctcttctctgaatccaaaatactttatcaccaaagatttcatgaaatgacatttattgtttaaaaaagcgtgagtctggaattagatagtcggtgatggttgaacaagtttgtgaatttactaaaaccactcaattgtacgcttaaaaaaaaaagcaagcttgagctgcctaagtcccgctcacacacactgggacttgtactaaatgctcaacgattccattctctcaggactatgggaacattctgtcacatttttttccttcagggggatttccctaaggaaggagctgtttgcaaaatattgcacttaatttggaatccgggggggacctggatgtctcctggggaggaaaacgtacacttcacatggccttcctggcctggcggcaggatgggccgggagtgggtgggggacaaggggggcttcaacaggcagtttttcccatggaacattgttttccctttttcccctttgtttatacacacagagacacagatttaaaggaaagtatcatctgggctgaaggcggtgaatggtatcccccaaacagggatgtgaacttttgaatgttttcagctcagaggcagtatggtcgtcctaatacctcaggacttatgttcagtgagatgttaagagacaggtggcaaccttggctcaaacactggacttaatttattttattcttgctagtctttcacttctcaaagacgatgctctcaatcttcatccaggtgaactgctccccactaatcctagcccacccattcaagtcaacacccctacgtccctcgtttccctcnatgctttcagcgttccgacacctcagtgcacttgaactttagaggctatggttcggttgtccttgaaggaaaaaaactgcaacatgaccatcatttgttttcatttcctgagtaagctttgcagtccctcacagacctgtgaataagatgaatcacataaagtgaatcatatcctccaggggggcttatcacaatcaagatttgccaaaaaacagccaggcatggtggcttgtgcctgcagtcccggctgcttgggaggctgaggtgggaggatcccttgaagcaag

SEQ ID NO: 44 - DNA, 1457 bp, Homo sapiens
  SIMILAR (1267)..(1419): 621254mologous to Homo sapiens Human secreted protein, SEQ ID NO: 7519,accession number AAG03438,Smith-Waterman Score=172.
gtgtagcacggggatgcatctaatcattttcagtagagtctgaagaaacatttggttgcctcctcccacccaagtcctttgatatggacttatgaactgagtaattatgaagcaatgaagactgcttggggtcttcatctagcccgacatctaggggctaggtgtcaggatgccaaagaaaatttatcagagagtaaagtgtcccttacggaaattatgaagtaggttaagacagatgttaagaggaggaggttgtcattcattgcacagctagaaagattagaagagactggtagatacagccaagagttgtctctggtaaccataatgagagcagtttccgtgaactgatgagacaattaggagggtggctacagggaatgaagagggagtttccagggcagcagtgaaaacatgagctctggaccttgtttagtcttggatatttcaccatcctctcacaaaaataaacactctggtacccagtaaatacctgatgaatgaatctttgggaaagaaaatcactgaatgcataatttttctttattgaaaatattgggatagcactgcattacatatagtcaatatccataaatgaagggtcacacatttctgaatggacaatactgttttacatagagaacacagcatctggatatgctctcacaattatagtatcatggactaaactaggtcagagtgaagtatatgcaaaatgaccattttgtttttttccattttattaataggcatatgggttgcaggatgggtgtaaatgggtaaacgtggatatccatggggacattcctggatatctcacaccaacacattatttaacgagcaggttaaggtgaaactgccagtatgctgttaggtcaagagtcctcagtagggagaacttgaggtgaaacgtacacccaggctacagatttaaaaattttatgccattcatttaaatttgcatggaattaaggagtataataattgttgatctgacaggaggccactggacaatttgttctctttcacaaaatgtctaaaataggagaataatgtaaaggaagtattctaagaattgcttttttaaatgccagatatgtaaatagtacttgttatacatttttcctttccaaaaattaccggggaaataatttatgacagaccatttttcagctttggttattatttgaaaatttttccaacaaagcaacaagtctttggctttcataaaagtctggtaatcaataatattggttaagtaagtctttattattattattattgttattatttttaagacagagtctcgctgttacccaggatagagtgcagtggcacgatcttggctcactacaacctctgcttcccggattcaagcaattctcctgcctcagcctcccgagtaggtgggattacaggtgcccgccacatagtcggctaatatttgtacttttagc

SEQ ID NO: 45 - DNA, 438 bp, Homo sapiens
  SIMILAR (176)..(418): 851254mologous to Homo sapiens A human TANGO 262 polypeptide clone,accession number AAB18467,Smith-Waterman Score=332.
ggcggcggggcagtcccggtaagcgcccgggagcctctgcctttggccctcacggatctgcaggtgacgaggaggaacctatcacctgccatcctattacccaatttgccacttccagcagctttaacccatgaggaggatgtgaccgggactgattcaggagccctctggaagcatggacactgcggtgattgttgccataagagggctggccaccatctttctggcttcgtttgcaaacctggggctggttttcaggcagcgctactgccggccgcgagacctgctgcagcgctataattctaagcccattgtggacctcattggcgccatggagacccagactgagccctctgagatagaactggacgatgtcggtatcaccaacccccacattgatgcccctcttgagaatgaaaaaagggatcaaatatgcct

SEQ ID NO: 46 - DNA, 2389 bp, Homo sapiens
  SIMILAR (1328)..(2380): 841254mologous to Homo sapiens putative p150,accession number U93564,Smith-Waterman Score=1491.
gagtatgcatcaacaattgtgtcaggaacttcaaagggacaatgtggacctatttgtacagtcttcattatcggctaaagagcgccaccttgctgcagttgccagtgcactgtggagacatttcttttcatttttgaagagtcagagaatgtcacaggtagtgcctttctcacaacttgcggatgcagctgcagactttactttgctagcaatggacatgccaagcacagctccatcagattttcagcctcagccagttatatcaattattcaactttttggttgggatgatatcatctgccctcaagttgtagcaagatatttaagtcatgtcctacaaaatagcacattatgtgaagcactttctcattcaggctatgtatcttttcaagccttaaccgtaagatcatggattcgttgtgttttgcaaatgtatattaaaaacctctctgggcctgatgatttgctcatagataaaaatctggaagaggcagttgaaaaagagtacatgaaacagttggtcaaactgacaagattactatttaatctctcagaagtaaagagtattttctcaaaggcccaagttgaatatttatccatctcagaagaccctaaaaaagcacttgttcgattctttgaggctgttggtgtaacttacgggaacgtccagacactttctgataaatctgccatggtcacaaagtccttggaataccttggtgaagtattaaaatatattaagccttatttgggaaaaaaagttttcagtgcagggctgcagctgacttatggaatgatgggaattcttgtgaaatcatgggcacaaatctttgccacttctaaagcccaaaaattactattccggatcatagattgtttactgctgccacatgcagtattacagcaagagaaggaactgcctgcacctatgttgtcagcaattcagaaaagtcttcctttgtatctccagggcatgtgtatcgtgtgttgtcaatctcaaaatccgaatgcctatttgaatcaattgctagggaatgttattgagcagtatattgggcgatttcttccagcttcaccatatgtttcagatcttggacaacatcctgttttgctggcattgagaaacacagccactattccaccaatatcatctctaaagaaatgcattgtgcaagtcataaggaaatcctaccttgagtataaggggtcctcacctcctcctcgcttagcatccattctggccttcatcctccaactcttcaaggaaactaacacagacatttatgaagttgaactactcctccctggcattttaaaatgcttggtgttagtcagtgaaccacaagaaatacaaactaccatcggagagtactataaagaactctacacaaataaactaaaaaatctagaagaaatggataaattcctagacacatacatcctcccaagactaaaccaggaagaagtcgaacatctgaatagaccaataacaggtattgaaattgaggcagtaattaatagcctaccaaccaaaaaaagcctaggaccagacagattcacaactgatttctaccagagttacaaggaggagctggaaacattccttgtgaaactattccaatcaatagaaaaagagggaatcctccctaattcattttatgaagccagcatcatcctgatactaaaacctggcagagacacaacaacaaaaaaaaattttagatcaatatccctgatgaacatcaatgcaaaaatcctcaataaaatactggcaaaccgaagccagcagcacatcaaaaagcttatccaccacgatcaagtcggcttcatccctgggatgcaaggctggttcaacatatgcaaatcaataaacataatccatcacataaacagaaccaatgacaaaaaccacatgattatctcaatagatgcagaaaaggcctttaacaaaattcaacagtacttcatgctaacaactctcaataaactaggtattgatggaacgtgtctcaaaataataagagctgtttatgacagacccacagccaatatcgtactgaatggacaaaaactggaaacattccctttgaaaactggcataagacaaggataccctctctcatcactcctcttcaacatagtgttggaagttctggccaggacagtcaggcaagagaaagccataaagcgtattcagttaggaaaagaggaagtcaaattgtctttgtttgcagatgacatgattgtatatttaggaaaccccatcgtctcagtccaaaatctccttaagctgataagccacttcagcaaagtctcaggatacaaaatcagtgtgcagaaatcacaagcattcctatacaccaataacagacagagagacaaatcatga

SEQ ID NO: 47 - DNA, 1809 bp, Homo sapiens
atttccagttgattgtcatatccaggaaaaaatggaacagtgcactcttctccctgttgacccatgtccacctattggttccccaaaatccacattctccctgggcccagatgactttgtctccctgggcccagattctttgtctctcttcaaccttcatctcaaattgtctctaagcactaccttccccagagcttgccaggttgggttttgagattagggtcaggtcatgggtatgtggagaatggtttggaggttgaggacaaccacaggtgtctcattgctgccatttctcctgaggacataatcacttggtcaccttggaccctgtcacttcctaaaattactcgttctgtcatgccatagaggtcagttttcctctctcttggcttctacccacaaacattcaccaatcatttattccgttcatttagcaaatatgcagcctccgcaagatgagctctcctgcagacaagcatggtctgaaacattctttgagcaatatttattgagtgcctactatgtgttaggtactgtgccaggcactggataagccagtggtaaggggaaacacagctctaacctcacctcattctccaggttacaaaggccatgtgcccctttgaatctggcagagaaagtttcctcgttgtaagtatttgcatctacttcaagccagattcttctgcctctttctcctttccagacccctactctgtgcagtgctgaccacagctagagccaccgccccattgctcaaccagtatttatttccctaaacgacccttcctcacattcccttccctccacctctccttaccaagcacccaaaagaggatttagaactagcagggtggacatcatctggttgtttctacttttctctgcctagcacaaaattgggagaaaactggagcctccatccgcagtcacacgtgtacagatctggggatttggatgtaggctctttctaacttctctctcagaagcttctacagaaacccttccatctgtagcctcaagggcccacctccacgggaaggcttaggcaatgatcctgtttctaccaacactgcaccttatcccaggaacctgccctaggacctccagaggaccatattttcttctccctccattttttacccaggacctccaggggctccttctggggaatcatagaacccgtaggaattggaaggaattttagaggttttctagttggagttgtgtccaacagaattcattaacaccagcctgggcttgtttttcctcctccctctggacttttttcatcttttcctccacctcaaaaaatacttacacacagattccttcttgtacaggcatcaaaaccaactcctctgcccctaaggctgtgtcccctgtggtctcccagccacccctaccccagttcactcgccccttcctcatctctggaatttggcccaggcagtccccagaagactctggagtgacctcctttgcctaaaaagcagacagataggcatgccccaggccctgagtgagcagaggaggactgtagggtgagagggaaagaaaatgaaggtgactttcatggaagtttcatttcttttccccgattgtaccaactgcatgttacttttggcctgggcttgcaaggaagcaatattggttttactctcgtatccttaaaaagttacagaactgtgtcttaagagaattatttatagttactataactgaattgacaaatgtcaacttaactgataaattatatttggtaaaataaagaggacgtttatttaaaagaaaaaaaaaaaagtcgac

SEQ ID NO: 48 - DNA, 1332 bp, Homo sapiens
  SIMILAR (145)..(1329): 911254mologous to Homo sapiens putative p150,accession number U93567,Smith-Waterman Score=1833.
atgaatagagggagcacaaaggattttggaggcagtggaaatgcactgtatgatattgcaatgatagatgcagaaatatgggactatgtgaaaagaccaaatctacgtctgattggtgtacctgatagtcacggggagaatggaaccaagttggaaaacactctgcaggatattatccaggagaacttccccaacctagcaaggagctggttttttgaaaagatcaacaaaattgatagaccactagcaagactaataaagaagaaaagagagaagaatcaaatagacacaataaaaaatgataaaggggatatcaccaccgatcccacagaaatacaaactaccatcagagaatactataaacacctctacacaaataaactagaaaatctagaagaaatggataaattcctggacacatacaccctcccaagactaaacaaggaagaagttgaatctctgaatagaccaataacaggatctgaaattgaggcaataattaatagcttaccaaccaaaaaaagtccaggaccagacagattcacagacgaattctaccagaggtacaaggaggagctggtaccattccttctgaaactattccagtcaatagaaaaagagggaatcctccctaactcattttatgaggccagcatcatcctgatacaaaagccgggcagagacacaacaaaaaaagagaattttagaccaagatccctgatgaacattgatgcaaaaatcctcaataaaatactggcaaaccaaatccagcagcacatcaaaaagcttatccaccatgatcaagtgggattcatccctgggatgcaaggctggttcaacatacgcaaatcaataaacgtaatccagcatataaacagaaccaaagacaaaaaccacatgattatctcaatagatgcagaaaaggcctttgacaaaattcaacagcccttcatgctaaaaactctcaataaactaggtattgatggaatgtatctcaaaataataagagctatttatgacaaacccacagccaatatcatactgaatgggcaaaaactggaagcattccctttgaaagctggcacaagacaaggatgccctctctcaccactcctattcaacatagtgttgaaagttctggccaggacaatcaggcaggagaaagaaataaagggtattcagttaggaaaagaggaagtcaaattgtccctgtttgcagatgacatgattgtatatccagaaaaccccaacgtctcaacccaaaatctccttaagctgataagcaacttcagcaaagtctcaggatacaaaatcaatgtgcaaaaatcataa

SEQ ID NO: 49 - DNA, 687 bp, Homo sapiens
  SIMILAR (3)..(338): 871254mologous to Mus musculus putative,accession number AK011064,Smith-Waterman Score=493.
acgcgtccgctcaccggctgctgcagcattatcagttgcacagtgcagcagtgaacgggctctctttccacccgtcgggaaactacctgatcacagcctccagtgactcaaccctgaagatcctggacctgatggagggccggctgctctacacactccacgggcatcagggaccagccaccactgttgccttttcaagaacgggggagtattttgcttctggaggctctgatgaacaagtgatggtttggaagagtaactttgatattgttgatcatggagaagtcacgaaagtgccgaggcccccagccacactggccagctccatggggaatctgccagaagtggacttccctgtccccccaggcagaggcaggagtgtggagtctgtgcagagccagccccaggagcccgtgagtgtgccccagacactgactagcacgctggagcacattgtgggccagctggatgtcctcactcagacagtctccattctggagcagcggttgacactgacagaagacaagctgaagcagtgtctggagaaccagcagctaatcatgcagagagcaacaccatgatcaggggagcaggaatcaggagctcggtggatttgcaggtggcaggccagggatttgtaccatgggacttgggtaaataaaggggactgaactctgtgggactccc

SEQ ID NO: 50 - DNA, 848 bp, Homo sapiens
  SIMILAR (123)..(161): 841254mologous to Mus musculus putative,accession number AK011064,Smith-Waterman Score=51.
cccttgacccgcgctgcaggaattcggcacgaggacagtcaaagtgtgggcaactcatcgccagaaattcctgttctccctgagccagcatatcaactgggtccgctgtgccaagttctcccccgacgggcgggctcatcgtgtctgccagtgatgacaagaactgttaagctgtgggacaagagcagccgggaatgtgtccactcgtattgtgagcatggcggctttgtcacctatgtggacttccaccccagtgggacgtgcattgccgctgccggcatggacaacacagtgaaggtgtgggacgtgcggactcaccggctgctgcagcattatcagttgcacagtgcagcagtgaacgggctctctttccacccgtcgggaaactacctgatcacagcctccagtgactcaaccctgaagatcctggacctgatggagggccggctgctctacacactccacgggcatcagtggaccagccaccactgttgccttttcaagaacgggggagtattttgcttctggaggctctgatgaacaagtgatggtttggaagagaaactttgatattggtgatcatggagaagtcacgaaagtgccgaggcccccaggcacactggccagctccatggggaatctgacagtctccattctggagcagcggttgacactgacagaagacaagctgaagcagtgtctggagaaccagcagctaatcatgcagagagcaacaccatgatcaggggagcaggaatcaggagctcggtggatttgcaggtggcaggccagggatttgtaccatgggacttgggtaaataaaggggactgaactctgtgggaatcac

SEQ ID NO: 51 - DNA, 1272 bp, Homo sapiens
  SIMILAR (1)..(624): 881254mologous to Mus musculus putative,accession number AK011064,Smith-Waterman Score=990.
gatgcagttacctgtgtggacttcagtatcaacacaaagcagctggccagtggctccatggactcatgcctcatggtctggcacatgaagccgcagtcacgcgcctaccgcttcactggccacaaggatgccgtcacctgtgtgaacttctctccttcgggacacctgcttgcttccggctcccgagacaagactgtccgcatctgggtacccaatgtcaaaggtgagtccactgtgtttcgtgcacacacagccacagtgaggagtgtccacttctgcagtgatggccagtccttcgtgacagcctctgacgacaagacagtcaaagtgtgggcaactcatcgccagaaattcctgttctccctgagccagcatatcaactgggtccgctgtgccaagttctcccccgacgggcggctcatcgtgtctgccagtgatgacaagactgttaagctgtgggacaagagcagccgggaatgtgtccactctcattgagatcatgtggggtttgttatctatgtgtgactttccacccccattgggacgtgcattgccgctgccggcatggacaacacagtgaaggtgtgggacgtgcggactcaccggctgctgcagcattatcagtggttgttggagttgaagcccacttggggctttgggctatggaggcagctggagccatttgtcttgcgctggctgactctcctagtgcacagtgcagcagtgaacgggctctctttccacccgtcgggaaactacctgatcacagcctccagtgactcaaccctgaagatcctggacctgatggagggccggctgctctacacactccacgggcatcagagacatatccagtgtgcaggactagtgggcctgttctccctgggccagcacatccagagggggtggctgctggccctggtctgccctcgtgggtttgctttgccgggtgccttggtgtacatgtccatgtgcactgccctttgtcaggcctgtccttccagtcatctcaagggcctgactcctggaggatggctggtggatcaggagacccgcgtggtggcactggtgccagtgccctatttgaggctctggaaagtcttgggaccagccaccactgttgccttttcaagaacgggggagtattttgcttctggaggctctgatgaacaagtgatggtttggaagagtaactttgatattgttgatcatggagaagtcacgaaagtgccgaggcccccagccacactggccagctccatggggaatctg

SEQ ID NO: 52 - DNA, 380 bp, Homo sapiens
  SIMILAR (93)..(287): 931254mologous to Homo sapiens proliferation-associated SNF2- like protein,accession number AF155827,Smith-Waterman Score=336.
ctcatctttgggtgtgattttttaaagagaagaaataaaatattgtactcctgtagttgtttatatccaagtttaaatacagtatctattattttgtccagatgctttgggaaaatggaattaatggcattttagcagatgaaatgggattgggtaagacagttcagtgcattgctactattgcattgatgattcagagaggagtgccaggaccttttcttgtctgtggccctttgtctacacttcctaactggatggctgaattcaaaagatttaccccagatgtaagacatgcttccttatgttaaaattataattttacatgttttcttatgctttgttgtagtaggaattaaattgtagaactcttataatcaaaa

SEQ ID NO: 53 - DNA, 1853 bp, Homo sapiens
  SIMILAR (1283)..(1002): 1001254mologous to Homo sapiens Human secreted protein fe366_1,accession number AAW79096,Smith-Waterman Score=488.
tcaaattcataggatgtctttttattatgctaataatttaatcacattccatggggtccacaataaactctttatattgaattccattccataataaaaaaaaaaaaagaacaaaaaaacaaaaacaaagcaaggagctctatttttggggaaaaccaatgggtgctccacctgccttaactggattggtattattatttggcttttccaacacggcaatacaaacatattatgaaatgagtgaaaagggcataataattttattctaggtttctactaccttcatgattaagacttaactagctactgctgcttggccataatccactacagtccctaaacaaaaaaactatgaacaaagacaaaaataatccggtaatttctcctacaaaggttaacccaaattaacttacagcagaggtgaacaaactactgcctgtgtgccaacataacccagcttggtttttattagtaaggttttacatattatctatgattgttttcacactacattgggcaaagctggaataactgcaacagaaatcacacagcctgcaaagccctaaataattactatctggccccctccacggacacaaaaatttgttgaccccttggacttttccccaaattaatgtaagtctccagaatagtatgctagccaaaaagtggactacttcttcctttttttaatgagaaaaatgaaaaagtccaattagcttgcatatatatatctatccaaattcactcagccagaacacatttgatactagaaaaataaaaagagagcaaaaatcatgtaatagatcacagaacagcccccaagatgataaatattagtgttatttatgcacatatgaattctagcaaagccagtaacagaaattaacaaccaattccaattccaatatcaatgtataagcatgcaataaataagctactttctaattattttagttggcattttaagaaaaaaaaagagaaggaaaaaaaagacgctaaaccaagttttcaattacaacattaaaggaacagttacataaccttttgtttaacttctctctggttctgtttctgagaataaatacatttctgaaaaatgttgacctgacatcaaatttaacagaagtattaataaattgggaccatatgttagactcaagtagaaaacaggttttgttttcctcagagattaatgaacgttccccctcccccgccctgccaaagcccactaaattaaggtatatcactaaagtagaacataataaatggtatatatacatgttaacacatttatagcttaaagatagctataattaatttgcttaactctgactaatatttttaagaaagaaaaagcggaatgatcagtctcattatcaaatattcagcacagccctgatgagataatggtggacataaacatcttttgtaagaatatcaaacaggaaattttctcgctggcaaaattttagctgatacgtatctttagataggtcattaaaaatctgtgctacctgggttacccgaattaccagcgtgattcaaatatgttgctagctaaaaaactaataagcaagcacatattggctgtgaattctaaatgtgcctattttatttttgttcacgaaggaaatatccaaaataactgcaaaggatggttagtgaatctttaagatttgtaacttgaaatatctgtttattacaggggaaacactagaaattcccgatacagtaatgggccttactttattagcagcaggaacaagcataccagacacaattgcaagtgtgttggttgcaagaaaaggtaagaactagagtccctcaagctgcaatggtcattctacaag

SEQ ID NO: 54 - DNA, 547 bp, Homo sapiens
tgataccctaatatgtcagttatttttacattcaaatctcagttttccacaatttacatccaagcacatatttatcacaaatctaaccactgttacacatcttcaaatcttacaatgtcagctctccctcctcttgccactgcccaaagcaaactagcacttttggtttttttttaagccgaaggcctaggaaggaccaaaggatacctgaattcaaggtcagtccagtcacccttcttgccctatgagctctcaggcaaacaagccaggagctgcccacactccggacccctgtaaggtgcagactacagccgaaaccaggaggattgctctcagaagcaagaaaagtgctgcctcctcggaagtcacaggcctgaaggctgaccctaccacatcatgtaagcctggaatccaagagacgaccttccctccccttccttcttgtgtcctctcttcacacagccccatcagcagcagtgaccacagtggctgctcaacttgggtaggagagcaagggagccacaggccagaaggcactacattgaat

SEQ ID NO: 55 - DNA, 1822 bp, Homo sapiens
  SIMILAR (1728)..(1201): 671254mologous to Homo sapiens CIRP,accession number D78134,Smith-Waterman Score=528.
  misc_feature (1)...(1822): n = a,t,c or g
caccagcagaactagctaaccggctggccgtctgaggtcgccctgggatgccacgtgcctctgctctctggcctgcttctagactgaggcagtccaggtcagcgtcaggtgcacgtccactgtccctgttaagctgcccgcacagtccagccctctggccaccactgccagaagcctcccagggctgccctgaggcctgagctgcccgctcccgtcccccgcctggctcccctaccctgaccagcgccagtctgctgggcctccctttctagctctgcaggccccagggaaggcttgcagacccgctgcttctccaccttctctctctgctcaggtctggctgcagtagcccgcagcaaggagtgtgtggtgcaatgcaagggaattgtcagagcaaggttcatttcacacggtcttttaatcggcttcgtaaagccaaagaaaactgcgtacaagaattcctcagccactgcaaatacaacatcgatggagtatgcgtacgtcttccagtaaaaaaggacaatataaataaacatcttcaagaacctctcagggacgtctgcacgtctactgtggggcgcacagcacagatgggacgcagagggctggggctccaggggcagttgctgccacacccgccggggttcctaccacacttacacttcaggaaacgttcacacgggagttgggaaaaaaaggccacagctttgcttcagctttccggacaaagaggcgggatttcacagttccgtttcgatctttcaggaggaagtgagtgggggggcacccatttttcatggggggggcccaacccccactttaaaaaaaaaaaggggcaacgcaaccaaaaactaaaacaaaaaccaaaaacccacacaacccccgaatttttttgaaaactcatgggctcgtgggtcaaaaaagtaaatgcttttcaaaatgttttgaaaacccctcaaaaaaaaaaacagcacttccttaaaaagaaaagtctattaacgaggccatccccggcgtcagaagcggtcaggctgggtttgacaagatcagaaccagaaatgactacgaaagtgggaatacaaggggggccatttgcctccccatgacggttgagcaaaagctgccccaatctgttaaccacccagccctttgaaaggactttcttgaccagaaagggtttttactcgttggtgtgaagcgaaactgttgtaactgttctttgtaggacccgcccgagctccggtcactgtagccaccactctgactccggctgctatagtagtcttctggagcctccgtagcccccacttcctggacttcgaaccggttccccccatagccntgggtcccctcctccttctagagaacccacgggccccgtccctcgggccccccaagggaaagaaagccccgggcccccgggcaagagccaaccaagggtaccccacgggaatcggtttgtctgaacgacttgccctgccctggtctactcgggatctgccgtcccatcctacagacttccccattcatggccatcatggcatccttagcgtcgtcaatgttctcaaaggtgacaaacccaaatccccgagatctctgggtctccctgtctttcacaaccaccacttcagagatctgtccgtactttgagaagacctgctccagcgactgctcattggtgtcaaaactcagccctccaacaaaaagtttgccttcatctgatgccatggcggccactgagtcgggcaggtccctgacgcaagcaggaagacagcgcaccacaacgaccccgagcctccacgaaatcgtggacccgggaatt

SEQ ID NO: 56 - DNA, 1296 bp, Homo sapiens
  SIMILAR (527)..(646): 1001254mologous to Mus musculus putative,accession number AK008627,Smith-Waterman Score=203.
cggacgcgtgggcagtggtgcaggccaatcgcaaccagtcctctggaggcagggagactggggtggagacttcggagactgcagttgcagttgttccgtgtaggctgttgttgactctcgtatgaaagcccacgcgatccaagtgccctgcaggttttggtccagggaaaagttggtctctgcagatgactgtaaatgactacctggaggtcgattaaagtgcggtactgcgggattcaaccgatttccttcttcctctgactgcccggaaatatcagccaaaggccagcgttctaaggacatatggaattggctatggataattcatatgctttcaatcaacgaagcacatgtaatggaattccatctgagaagaaaaacaacttccttgtatcagaagatcatggacaaaaaatcttaagtgtactacagaattttagagaacaaaatgtcttttatgatttcaaaataattatgaaagatgaaataatcccgtgtcatcgttgtgtgttagcagcatgcagttgactttttcagggctatgtttgaagtaaacatgaaagaaagagatgatggaagtgttaccattactaatttgtcctccaaggcagtaaaagcatttctcgattatgcctatactggaaaaatatggaattggcctatggataattccatatgcttttccaatccaacgaagcacatgtaatggaattcccatctgagaagaaaaacaacttccttgtatcagaagatcatggacaaaaaatcttaagtgtactacagaattttagagaacaaaatgtcttttatgatttcaaaataattatgaaagatgaaataatcccgtgtcatcgttgtgtgttagcagcatgcagtgactttttcagggctatgtttgaagtaaacatgaaagaaagagatgatggaagtgttaccattactaatttgtcctccaaggcagtaaaagcatttctcgattatgcctatactggaaaaacaaaaataacagatgataatgtggaaatgttcttccagttgtcatcatttcttcaagtttccttcctatccaaagcttgcagtgactttttaataaaaagtattaatcttgtcaattgtttacagttattatctatatcagatagctatggctccaccagtttgtttgatcatgcattacactttgtacaacatcacttttctttattatttaaatccagtgatttcttagagatgaattttggagtactacagaaatgtctggaatcagatgaattaaatgttcctgaagaagaaaaa

SEQ ID NO: 57 - DNA, 447 bp, Homo sapiens
  misc_feature (1)...(447): n = a,t,c or g
ntttnnnnnnnnnnnnnnnnnnnnnnnnnnnnnnnnnnnnnnnnnnnnnnnnnnnnnnnnnnnnnnnnnnnnnnnnnnnnnnnnnnnnnnnnnnnnnnnnnnnnnnnnnnnnnnnnnnnnnnnnnnnnnnnnnnnnnnnnnnnnnnnnnnnnnnnnnnnnnnnnnnnnnnnnnnnnnnnnnnnnnnnnnnnnnnnnnnnnnnnnnnnnnnnnnnnnnnnnnnnnnnnnnnnnnnnnnnnnncacatgcatgtttatatcagcccagtttgcaattgcaaaatcatggaaccaccccaaatgcccctcaatcaatgagtggataaaaaaactctnnnnnnnnnnnnnnnnnnnnnnnnnnnnnnnnnnnnnnnnnnnnnnnnnnnnnnnnnnnnnnnnnnnnnnnnnnnnnnnnnnnnnnnnnnnnnnnnnnnnnnnnnnnnngattg

SEQ ID NO: 58 - DNA, 1173 bp, Homo sapiens
  SIMILAR (778)..(1008): 761254mologous to Mus musculus protein kinase related to Raf protein kinases; Method: conceptual translation supplied by author,accession number U43585,Smith-Waterman Score=274.
atggaacacgtctataacatattttccagtaacatcaaaaaggaggtagttggaagaaaaatgtattgcgataagaaacatcacacaactaagagaaactgtccgaataaacttcgccaaaactctggaaaatggtcaaaagattacaacatccaagtgaaagcagactcaagaaaaagacaactggaaaactttacgacatttttaacttgcctttgccccagcaaattggcagttctgaagtgtcagaagcccacgttcccagctttttgccccaccgccgacacagctttttgcaccctcgccgccgtggctttttgccgccgcggctttctgccgccgcggctttctgcccccccgccgccaccgccgctgctttttgccccaccgccgccgtggctttttgcccgccgcggctttttgccccccgctgtcacggctttttgcccccccgccgcagcgactttttcctcgccgcggctttttgccgccgccgctgttgccgccgctttttgcgcccgcggctttttgccgctgttgccgccgccttttgcccccgccgcagcggctttttgtccccgccgccgcggctttttgctaccgcgactttttgccccggtcgccgccgctttttgccaccgcgactttttgccctcgccgccgaggatttttgtccccgccgccgcggctctgagggcgggagcggcaggctcggctgccagctctactggcgtcctggcaagggcagcgcccaggggtgctccaggcccctgtggcctgcatagagcggcgctgcctgcggaggcgatgggggagaagaaggatggtggtggtgggggtgatgcggcggccacggagggtggcacaggggctgcggccagccgggcgctgcagcagtgcgggcagctccagaagctcatcgtcatcttcattggcagcctgtgcgggctgtgcaccaagtgcgctgtgtccagtgacctcacccagcaggagatacagaccctggagaatagtgttgaaattaagcctgcatccccacgattttcagcggtgctgatgcctaataaactcagccccttgcatgccaaaattggcttaaagcccatctgttacccaagctacacttcaagcatcaaggttcaaaaatgtgattttgaatatgcaagagtttga

SEQ ID NO: 59 - DNA, 1125 bp, Homo sapiens
  SIMILAR (736)..(972): 741254mologous to Mus musculus protein kinase related to Raf protein kinases; Method: conceptual translation supplied by author,accession number U43585,Smith-Waterman Score=276.
atgaacacaagaaagaaagaaggaaagaaagaaaaagaaagagagagagaaagaaagaaaggagaaagggaggaaggaaaggaggaagagagaatggaatttattgattattccagctttacttgtcatggtggtgcctatttgcgtctgttctatgtaagtgcatccgtcctctttcgccttgcaggctttttgccccaccgccgacacagctttttgcaccctcgccgccgtggctttttgccgccgcggctttctgccgccgcggctttctgcccccccgccgccaccgccgctgctttttgccccaccgccgccgtggctttttgcccgccgcggctttttacccgccacggcgttttacccgccgcggctttttgccccccgctgtcacggctttttgcccccccgccgcagcgactttttcctcgccgcggctttttgccgccgccgctgttgccgccgctttttgcgcccgcggctttttgccgctgttgccgccgccttttgcccccgccgcagcggctttttgtccccgccgccgcggctttttgctaccgcgactttttgccccggtcgccgccgctttttgccaccgcgactttttgccctcgccgccgaggatttttgtccccgcccgccgcggctctgagggcgggagcggcaggctcggctgccagctctactggcgtcctggcaagggcagcgcccaggggtgctccaggcccctgtggcctgcatagagcggcgctgcctgcggaggcgatgggggagaagaaggatggtggtggtgggggtgatgcggcggccacggagggtggcacaggggctgcggccagccgggcgctgcagcagtgcgggcagctccagaagctcatcgtcatcttcattggcagcctgtgcgggctgtgcaccaagtgcgctgtgtccagtgacctcacccagcaggagatacagaccctggagggcagagatgacccagagaaagcccaagtggctgctggaacaaagtcagacatcgtgccacctgtccacactccttggctctgccatcatgctgaagatcgctttaaaggactggcttccctccccgcaaaattaaaagagcacaaactgagaaactga

SEQ ID NO: 60 - DNA, 392 bp, Homo sapiens
  SIMILAR (34)..(390): 771254mologous to Rattus norvegicus RBL-NDP kinase 18kDa subunit (p18),accession number M91597,Smith-Waterman Score=475.
agccgtcgcccggaccctccaggttgccggaccatggccaacctggagcgcaccttcatcgacgtcaagccggacggtgggcaccgcagtctggtgggcgaaatcatcaatcgcttcgagcagaagggattccgcctcctggccatgaacttcctccgggcctttgaaaaacacctgaagcaccactacattgacctgaacgaccgaccatgcttccctgggctggtgaaatacatgaactcaaggtcggttgcggccatggtctgggaggggctgaacgcgttgaaaacaggcccagggatgcttgtggagaccactccatcccattctatgccaggctccattcggggggacttctgcattcaagtaggcacgaacatcattcatggcag

SEQ ID NO: 61 - DNA, 436 bp, Homo sapiens
  SIMILAR (77)..(232): 1001254mologous to Homo sapiens Similar to zinc finger protein 254,accession number BC006408,Smith-Waterman Score=277.
tttcgtccttcactgctctgtgtcctcagcgtgtgtggcttcgtgacctgaagatactgggaaatccatagctaagatgccaggaccccctgaaagcctagacatggggccgttgacatttagggatgtggccatagaattctctctggaggagtggcaatgcctggacactgctcagcaggatttgtataggaaagtgatgttagagaactacagaaacctggtcttcttgggtgagaataactttaatacaaaatcccttatataccctaaagttttcatttctctgttttcatagaataatttttggtaatttatgctttgcataagtgagtttctgatgcctgttttaaagaaatcttgaagaactgtccgtgtggaaaaaaatttcttcaggatgttttatcttggcctcctgggtgctgggattacagaa

SEQ ID NO: 62 - DNA, 489 bp, Homo sapiens
  SIMILAR (349)..(483): 771254mologous to Homo sapiens PRO2550,accession number AF130089,Smith-Waterman Score=173.
cgtcttcactgctctgtgtcctctgctcctagaggcccagcctctggtcctgtgacctgcaggtattgggaatccacagctaagacgccgggacaccctggaagcctagaaatggacaacctgaggtatggagtgtatcctgtcaagggggcaagtggataccctggggctgagaggaatcttctggagtactcttattttgaaaagacggagtttcgctcttgttgcccaggctggagtgcaatggcgcgatctcagctcacctcaacctccgcctcccgggttcaagcgattctcctgcctcagcctcccgagtagctgggattacaggcatgcaccaccaccctggctaattttgtatttttagtagagacggggtttctccatgttggtcaggctggtcttgaactcccgacctcaggtgacctacctacctcgacctcccaaaatgctgggattacaggcatgagccaccgtgccaggctggga

SEQ ID NO: 63 - DNA, 582 bp, Homo sapiens
atggccattcttggcagggcacaatggctcatgcttgtaatcccagcactttgggaggctgaggcacgcagcttgagcggagaggacggcttccgggatgtggcgggatttgtccgcttctttgtctttggctgccgctggaactccgggtctcgtcttcactgctctgtgtcctctgctcctagaggcccagcctctggtcctgtgacctgcaggtattgggaatccacagctaagacgccgggacaccctggaagcctagaaatggacgacctgaggtatggagtgtatcctgtcaagggggcaagtggataccctggggctgagaggaatcttctggagtactcttattttgaaaaggtgtggggtctggttcgtttcactttggaactttttcacactaatgaggaggaacgagagtacagcaaagtaacagaagaggttacagagcatgtttatttaccagctaaagagaaagcggcaaaggaaggagaggttcatccctacccttctgcacaccctccttattattttgaagaaaaagaccctccagatctttcttttccagaggacactggatga

SEQ ID NO: 64 - DNA, 507 bp, Homo sapiens
  SIMILAR (240)..(506): 831254mologous to Homo sapiens Krueppel-related DNA-binding protein,accession number M61866,Smith-Waterman Score=389.
ggcacgagtgtggcctgagctccaggtctcgtcttcagcgctctgtgtcctctgctgctagaggtccaggctctgtggccctgtgacctgcaggtattgggagatctacagctaagacgccaggaacccctggaagcctagaaatggagaacctgaagtctggagtgtatcctctcaaggaagcaagtggatgccctggggctgacaggaatcttctggtgtactctttttatgaaaaggggccattgacatttagggatgtggccatagaattttctctggaggagtggcaatgcctggacactgctcagcaggatttgtatagaaaagtgatgttagagaactacagaaacctggtcttcttggcaggtattgctggttctaagccagatctgatcacctgtctagagcaaggaaaagagccctggaatatgaagagacatgcgatggtagccaaacccccagttatatgttctcattttccccaagacctttgggcagagcagg

SEQ ID NO: 65 - DNA, 1046 bp, Homo sapiens
  SIMILAR (896)..(994): 1001254mologous to Homo sapiens Similar to zinc finger protein 254,accession number BC006408,Smith-Waterman Score=181.
gatgtggcgggatttgaccgcttctttgtctctggctgccgttggaactccgggtctcgacttcactgctctgagacctctgctcctagaggcccagcctctggtcctgtgacctgcaggtattagggaaaccacagctaatacgccgggacaccctggaagcctagaaatggacaacctgaggtatggagtgtatcctgtcaagggggcaagtggataccctgcggctgagaggaatcttctggagcactctcattttgaaaaggggccgctgacatttaaggatgtggtcatagaactctctcatgaggagaggcacagcctggacactgctcagcaggattttgtataggaaagtgatgttagagaactacagaaacctggtcttttggggtgagaataactttaatacaaatccccttatataccctaaagttttcatttctctgttttcatagaataatttttggtaatttatgctttgcataagtgagtttctgatgcctgttttaaagaaatcttgaagaactgtccgtgtggaaaaaaatttcttcaggatgttttatcttggcctgatctttttacatttctgagccggtctgtatccttcactctacagtagtggtaatttcagaaatttagtagtataaaatattgttgtcccatatgttaaaatctatatgccaccactaattttttatccatgaatactgggtggcaaaattaagcacctacaaatttaaaatattttctaaatgttaagaactttctgtcattaaatagtattttgggataaattttctagaatattctattacatcctctttactaagcatggtactaggtaggtaattagagaatatgagcaagattcatgttatttatttttaataaagcaggtattgctgtctctaagccagatctggtcacctgtctggagcaaggaaaagatccctggaatatgaagggacacagtacggtagtcaaacccccaggtaggtgagagtgaatgaaacagttgacatagatgaaaggttgaaagattt

SEQ ID NO: 66 - DNA, 340 bp, Homo sapiens
  misc_feature (1)...(340): n = a,t,c or g
ntcccaggttcgagagaggctggaactcaatttctgcagaaaatctcccagtttttcctgtttggnnnnnnnnnnnnnnnnnnnnnnnnnnnnnnnnnnnnnnnnnnnnnnnnnnnnnnnnnnnnnnnnnnnnnnnnnnnnnnnnnnnnnnnnnnnnnnnnnnnnnnnnnnnnnnnnnnnnnnnnnnnnnnnnnnggagctcccggtttttaagcactgcacgatactagaagagctgaccttttttctggcctcacagcttatgctgaagctgagtgtgaggaacagagagacctttctgtgacgaccgctggggcagagtggtctatgcgccgagatc

SEQ ID NO: 67 - DNA, 573 bp, Homo sapiens
  SIMILAR (400)..(573): 841254mologous to Homo sapiens ribosomal protein L23a,accession number U43701,Smith-Waterman Score=247.
gaaattatcttatcctacttattattttacttccttattctgtgggacagaagaatctcttgagtcctctaaaaaactatatgctgatagcaggagttacagaacaattcagtagtgtctggaatagaacagtggtttgaaaagtaaagggcttgttaaagcacgggatgctgattcagtaggccttgagtggggataatttacatatccaacaggccaggtgatgccctggcttggggatcacattttgtgactgatgcagagtactgatggtcatccagtccccttccttcggtgtttgagaccacttcatctggaccgagctaaagtctaggaagaaataaagtttcaaacccagtagagttacctcaaagatacacttgagacccttttcagaagatggcaccgaaagtgaagaaggaagctcctggcccgcctaaagctgaagccaaagcaaaggctttaaaggccaagaaggtagtgttgaaaggtgtccacggccacaagaaaaagaagatccgcatgtcacccaccttccagcggcccaagacactgagactctggatgccgcca

SEQ ID NO: 68 - DNA, 539 bp, Homo sapiens
aaattctgtttccttctggcaactgccctagaaatacttttcatattaagttcacaggattcgcagaccacacaggtagtataaatttgaatcccaaactggtgaaaaggtaggtctatggtgaccaattccccagaaatgacttttattctctgtaccatgagtccaagctaacacaagcactagagggtggattttgttttttaatccttccattgagggtgaatgtctttaaaggtcctggctttgtatgtggatctcaatccaacttctcaccttgtaggggggcctaagactttacctcgagtgtccttgcgtgacctttaaaacccgagcatactggttacagaagctagggaatgtctttacgcccaggcagtcacaaagcataaaccacacaccatactgttgttaaatttcctgtttagggctccgcccaggctggaatgcaatggcatgatctcagctcactgcaacctccatctcccaggttcaaatgattctgccccagcctcccacataaagttataattctcaaa

SEQ ID NO: 69 - DNA, 664 bp, Homo sapiens
  SIMILAR (129)..(662): 911254mologous to Homo sapiens Sequence of human bone osteopontin Ia,accession number AAR05161,Smith-Waterman Score=820.
actgattgccgggtcgacccacgcgtgcgcccacgcgtccggcagagcacagcatcgtcgggaccagactcgtctcatgccagttgcagccttctcagccaaacgccgaccaaggaaaactcactaccatgagaattgcagtgatttgcttttgcctcctaggcatcacctgtgccataccagttaaacaggctgattctggaagttctgaggaaaagcagctttacaacaaatacccagatgctgtggccacatggctaaaccctgacccatctcagaagcagaatcttctagccccacagacccttccaagtaagtccaacgaaagccatgaccacatggatgatatggatgatgaagatgatgatgaccatgtggacagccaggactccattgactcgaacgactctgatgatgtagatgacactggatgattctcaccagtctgatgagtctcaccattctgatgaatctggatggaactggtcactgattttcccacggacctgccagcaaccgaagttttcactccagttgtccccacagtagacacatatgatggccgaggtgatagtgtggtttatggactgaggtcaaaatctaagaagtttcgcagacctgacatccagtaccctgatgctacagacgaggacatcacctcaca

SEQ ID NO: 70 - DNA, 613 bp, Homo sapiens
  SIMILAR (119)..(289): 801254mologous to Homo sapiens nephropontin,accession number M83248,Smith-Waterman Score=241.
cccacgcgttcgcccacgcgtccgggaggaggcagagcacagcatcgtcgggaccagacttgtctcaggccagttgcagccttctcagccaaacgccgaccaaggaaaactcactaccatgagaattgcagtgatttgcttttgcctcctaggcatcacctgtgccataccagttaaacaggctgattctggaagttctgaggaaaagcagctttacaacaaatacccagatgctgtggccacatgggttaaaccctgacccatctcagaagcagaatctcctagccccacagaatggctgtgtcctctgaagaaaccaatgactttaaacaagagacccttccaagtaagtccaacgaaagccatgaccacatggatgatatggatgatgaagatgatgacgaccatgtggacagccaggactccattgactcgaacgactctgatgatgtagatgacactgatgattctcaccagtctgatgagtctcaccattctgatgaatctgatgaacttgtcactgattttcccacggacctgccagcaaccgaagttttcactccagttgtccccacagtagacacatatgatggccgaggtgatagtgtgggtt

SEQ ID NO: 71 - DNA, 1509 bp, Homo sapiens
  SIMILAR (185)..(307): 821254mologous to Homo sapiens OPN-a,accession number D28759,Smith-Waterman Score=185.
actgattgccgggtcgacccacgcgtgcgcccacgcgtccgggtagagcacagcatcgtcgggaccagactcgtctcatgccagttgcagccttctcagccaaacgccgaccaaggaaaactcactaccatgagaattgcagtgatttgcttttgcctcctaggcatcacctgtgccataccagttaaacaggctgaatcctggaagttctgaagaaaagcagctttacaacaaatacccagatgctgtggccacatggctaaaccctgacccatctcagaagcagaatctcctagccccacaagacccttccaagtaagtccaaccgaaagccatggaccacatgggatgatatgggatgatgaagatggatgatggaccatgtggggacagccagggactccattggactcggaacgactctggatggatgtaggatggacactggatggatttttcaccagttttgatggagtcttcaccatttttggatggaatctggatggaactggtcactggatttttccccacgggaccttgcccaggcaaccgaagtttttcaattccagtttgttccccacagtagacacatatgatggccgaggtgatagtgtggtttatggactgaggtcaaaatctaagaagtttcgcagacctgacatccagtaccctgatgctacagacgagggacatcacctcacacatggaaaggcgaggagttgaatggtgcatacaaggccatccccgttggcccagatcctgacgcgccttctgattgggacagccgtgggaaggacagttatgaaacgagtcagctggatgaccagagtgctgaaacccacagccacaagcagtccagattatataagcggaaagccaatgatgagagcaatgagcattccgatgtgattgatagtcaggaactttccaaagtcagccgtgaattccacagccatgaatttcacagccatgaagatatgctggttgtagaccccaaaagtaaggaagaagataaacacctgaaatttcgtatttctcatgaattagatagtgcatcttctgaggtcaattaaaaggagaaaaaatacaatttctcactttgcatttagtcaaaagaaaaaatgctttatagcaaaatgaaagagaacatgaaatgcttctttctcagtttattggttgaatgtgtatctatttgagtctggaaataactaatgtgtttgataattagtttagtttgtggcttcatggaaactccctgtaaactaaaagcttcagggttatgtctatgttcattctatagaagaaatgcaaactatcactgtattttaatatttgttattctctcatgaatagaaatttatgtagaagcaaacaaaatacttttacccacttaaaaagagaatataacattttatgtcactataatcttttgttttttaagttagtgtatattttgttgtgattatctttttgtggtgtgaataaatcttttatcttgaatgtaataag

SEQ ID NO: 72 - DNA, 1553 bp, Homo sapiens
  SIMILAR (845)..(1126): 981254mologous to Homo sapiens OPN-b,accession number D28760,Smith-Waterman Score=482.
cttgaaacgcctattgatagtcctcggaaccgccccggaaatcccggggcgacccacgcgtccgggaggaggcagagcacagcatcgtcgggaccagactctgtctcaggccagttgcagccttctcagccaaacgccgaccaaggaaaactcactaccatgagaattgcagtgatttgcttttgcctcctaggcatcacctgtgccataccagttaaacaggctgattctggaagttctgaggaaaagcagctttacaacaaatacccagatgctgtggccacatggctaaaaccctgacccatcttcagaaggcagaatctcctaggccccacagaatggctgtgtcctctgaaggaaaccaatgactttaaacaaggaggaccctttccaagttaaggtccaacggaaaggccatggaccacatgggatgatatgggatgatggaaggtggatggatggaccatgtgggacagccaggactccattgactccgaacgactctgatgatgtagatgacactggatgattctcaccagtctgatgagtctcaccattctggatgaatctgatgaactggtcactggattttccacggacctgccagcaaccgaagttttcactccagttgtccccacagtagacacatatgatggccgaggtgatagtgtggtttatggactgaggtcaaaatctaagaagtttcgcagacctgacatccagtaccctgatgctacagacgagcacatcacctcacacatggaaagcgaggagttgaatggtgcatacaaggccatccccgttgcccaggacctgaacgcgccttctgattgggacagccgtggggaaggacagttatgaaacgagtcagctggatgaccagagtgctgaaacccacagccacaagcagtccagattatataagcggaaagccaatgatgagagcaatgagcattccgatgtgattgatagtcaggaactttccaaagtcagccgtgaattccacagccatgaatttcacagccatgaagatatgctggttgtagaccccaaaagtaaggaagaagataaacacctgaaatttcgtatttctcatgaattagatagtgcatcttctgaggtcaattaaaaggagaaaaaatacaatttctcactttgcatttagtcaaaagaaaaaatgctttatagcaaaatgaaagagaacatgaaatgcttctttctcagtttattggttgaatgtgtatctatttgagtctggaaataactaatgtgtttgataattagtttagtttgtggcttcatggaaactccctgtaaactaaaagcttcagggttatgtctatgttcattctatagaagaaatgcaaactatcactgtattttaatatttgttattctctcatgaatagaaatttatgtagaagcaaacaaaatacttttacccacttaaaaagagaatataacattttatgtcactataatcttttgttttttaagttagtgtatattttgttgtgattatctttttgtggtgtgaataaatcttttatgtt

SEQ ID NO: 73 - DNA, 1000 bp, Homo sapiens
  misc_feature (1)...(1000): n = a,t,c or g
ggagagtggnnattgaacccctnnatagtagatcactagtccagngcggtggaattcagtnnnnnnnnnnnnnnnnnnnnnnnnnnnnnnnnnnnnnnnnnnnnnnnnnnnnaaaaggcacttcttacatggcaggggcaagagaaaaatgaagaagcagaggcagaaatccctgnnnnnnnnnnnnnnnnnnnnnnnnnnnnnnnnnnnnnnnnnnnnnnnnnnnnnnnnnnnnnnnnnnnnnnnnnnnnnnnnnnnnnnnnnnnnnnnnnnnnnnnnnnnnnnnnnnnnnnnnnnnnnnnnnnnnnnnnnnnnnnnnnnnnnnnnnnnnnnnnnnnnnnnntggggtttggccagtctagcccaggattggctcgacttggctcgggtcattttgtgaatagtgtgctcctcacatttcaccttttctgggcccagtaggccatccaggacatgtgcaagccagcgacactatgggcagctctgggagccagtttatataccaactcctgatggtacgtccagcctgctgcccaggaaggaagccagtgctggcacctggaaggcccccggccgtgtatgggagcacccaagagcatggggagatgccactgcagcaggcagcacagacctacagtctgttatcacagtctcgctctctgtaataagcaggttaataaggtaataaggaggttacattgctgtttgaatttgctttccttgactaagcatctcttcatgctcaaaagtcttttacatgtcttcttctgtgaattcttttgtgtcatttgctcatttatctacttgtatggtttttgccttgaagaaaatgtaaattttaacttagttaaatgtataaagttttatcttcatagcctctggatttctttttttctttcttcccctgagatagaccttccctattacatgataattttaaaaattctccaatttttttctagtacatttatagtttctttccattttgtatttgttttgc

SEQ ID NO: 74 - DNA, 1101 bp, Homo sapiens
  SIMILAR (94)..(1098): 1001254mologous to Homo sapiens dJ146H21.2 (similar to CYTOCHROME B-245 HEAVY CHAIN),accession number Z83819,Smith- Waterman Score=1798.
atggggtttcaccatgttggccaggctggtcttgaactcctgatctcaagtgatccacccgccttggcttcccaaggtgctgggattacaggctcttggaagtggatccttgcaccggtcattctttatatctgtgaaaggatcctccggttttaccgctcccagcagaaggttgtgattaccaaggtaaagaatatgcactttcctcttgctgtgataagagttatcttctaccggactacagaactaaatttttatgttgtcaccctgaaagaggaacttggaaactgggcacagtgggtggttgttatgcacccatccaaagttttggaattgcagatgaacaagcgtggcttcagcatggaagtggggcagtatatctttgttaattgcccctcaatctctctcctggaatggcatccttttactttgacctctgctccagaggaagatttcttctccattcatatccgagcagcaggggactggacagaaaatctcataagggctttcgaacaacaatattcaccaattcccaggattgaagtggatggtccctttggcacagccagtgaggatgttttccagtatgaagtggctgtgctggttggagcaggaattggggtcaccccctttgcttctatcttgaaatccatctggtacaaattccagtgtgcagaccacaacctcaaaacaaaaaagatctatttctactggatctgcagggagacaggtgccttttcctggttcaacaacctgttgacttccctggaacaggagatggaggaattaggcaaagtgggttttctaaactaccgtctcttcctcaccggatgggacagcaatattgttggtcatgcagcattaaactttgacaaggccactgacatcgtgacaggtctgaaacagaaaacctcctttgggagaccaatgtgggacaatgagttttctacaatagctacctcccaccccaagtctgtagtgggagttttcttatgtggccctcggactttggcaaagagcctgcgcaaatgctgtcaccgatattccagtctggatcctagaaaggttcaattctacttcaacaaagaaaatttttga

SEQ ID NO: 75 - DNA, 3185 bp, Homo sapiens
  SIMILAR (123)..(1649): 1001254mologous to Homo sapiens lanosterol 14- demethylase,accession number D55653,Smith-Waterman Score=2661.
gctgggtttagtaggagacctggggcaaggccccctgtggacgaccatctgccagcttctctcgttccgtcgattgggaggagcggtggcgacctcggccttcagtgtttccgacggagtgaatggcggcggcggctgggatgctgctgctgggcttgctgcaggcgggtgggtcggtgctgggccaggcgatggagaaggtgacaggcggcaacctcttgtccatgctgctgatcgcctgcgccttcaccctcagcctggtctacctgatccgtctggccgccggccacctggtccagctgcccgcaggggtgaaaagtcctccatacattttctccccaattccattccttgggcatgccatagcatttgggaaaagtccaattgaatttctagaaaatgcatatgagaagtatggacctgtatttagttttaccatggtaggcaagacatttacttaccttctggggagtgatgctgctgcactgctttttaatagtaaaaatgaagacctgaatgcagaagatgtctacagtcgcctgacaacacctgtgtttgggaagggagttgcatacgatgtgcctaatccagttttcttggagcagaagaaaatgttaaaaagtggccttaacatagcccactttaaacagcatgtttctataattgaaaaagaaacaaaggaatactttgagagttggggagaaagtggagaaaaaaatgtgtttgaagctctttctgagctcataattttaacagctagccattgtttgcatggaaaggaaatcagaagtcaactcaatgaaaaggtagcacagctgtatgcagatttggatggaggtttcagccatgcagcctggctcttaccaggttggctgcctttgcctagtttcagacgcagggacagagctcatcgggaaatcaaggatattttctataaggcaatccagaaacgcagacagtctcaagaaaaaattgatgacattctccaaactttactagatgctacatacaaggatgggcgtcctttgactgatgatgaagtagcagggatgcttattggattactcttggcagggcagcatacatcctcaactactagtgcttggatgggcttctttttggccagagacaaaacacttcaaaaaaaatgttatttagaacagaaaacagtctgtggagagaatctgcctcctttaacttatgaccagctcaaggatctaaatttacttgatcgctgtataaaagaaacattaagacttagacctcctataatgatcatgatgagaatggccagaactcctcagactgtggcagggtataccattcctccaggacatcaggtgtgtgtttctcccactgtcaatcaaagacttaaagactcatgggtagaacgcctggactttaatcctgatcgctacttacaggataacccagcatcaggggaaaagtttgcctatgtgccatttggagctgggcgtcatcgttgtattggggaaaattttgcctatgttcaaattaagacaatttggtccactatgcttcgtttatatgaatttgatctcattgatggatactttcccactgtgaattatacaactatgattcacacccctgagaacccagttatccgttacaaacgaagatcaaaatgaaaaaggttgcaaggaacgaatatatgtgattatcactgtaagccacaaaggcattcgaagagaatgaagtgtacaaaacaactcttgtagtttactgtttttttaagtgtgtaattctaaaagccagtttatgatttaggattttgttaactgaatggttctatcaaatataatagcatttgacacattttctaatagttatgatacttatacatgtgctttcaggaagttccttggtgaaacaattgttgaggggggatctaggtaattggcagattctaaataatataatttccagatagtaattttaagagtactcatcgctcttgccaaataagttcagggtattcaaatcttggactagtcctgcaaggtataaagaataaaaatcccagtgagatacttggaaaccacagtttattattatttatctgggcaattattgtgtgtgtgaggatggaagggtagggaataatcgaacatctaaagccttgaataagagaatactaattgttttggtatgatgatactcagaaatggaggatattataggaaaaagaaatcctttggaattttaactaaaatcactgcatatgggaaattaagagatccaggaccatatttgataagagttcctaaaaataatgtaattattaatgctaaagactgctcatgtatcttgatctaattactaaataaattacatatttatttacctgataaatatgtatctagttctacaaggtcacatttatgtggaagtccaaagtcaagtccttaggggataattttgttttgggctcagttgttccctgcttccttttttttttttttttttttttgagatggagtctcgctctgttgcccaggctggagtgcagtggtgcgatctcagctcactgcatcctctgcctcccgggttcaagcaattctctgcctcagcctcccaagtagttgggattacaggcacctgccaccatgcctggctaatttttttgtatttttagtagagacaggggtttcactatgttggctaggctggtcttgaactcctgagcctcgtgagtccacccgccttggcctcccaaagtgctgggattacaggcatgagccaccgcacctgggccttccctgcttcctctctagaatccaattaggggatgtttgttaactaattcatattgattaaaacagttaaacaaactttttttctttttaaaatgtgagatcagtgaactctgggttttaagataatctgaaacaagggtccttgggagtaataaaattgggtcacattctgtaaagcacattctgtttaggaatcaacttatctcaaattgtaactcggggcctaactatatgagatggctgaaaaaatcccccatagtctgttttcaataggtgatgccaaaatactttgctttatgtatattacagttcttcttaaaacactggaagactcatgttaatctctaattgtgaaggcacactctatgttaatttttcagattaaaattctctttgaaaaaatac

SEQ ID NO: 76 - DNA, 1000 bp, Homo sapiens
  SIMILAR (794)..(1000): 641254mologous to Homo sapiens Human secreted protein, SEQ ID NO: 7868,accession number AAG03787,Smith-Waterman Score=223.
tttttttttttcaaaaaggtaaatttataaaggaaccagtaaaatttaaaaagaaacaattcaaagacaaataagaacactgaaattaatttgctaacagacacaaaacttgtcaacatccacagagtaatatcaattaaatctccatgggacaaaattcatttgcctctatgaacaagagtcattcgcattaccctcagttctttacaaattcaaaagaactgtaaaatagctcaaatgacaaggaaagatggggacccctgtaggcatcacggtcagtcccgaaaggtctgctagggtaactccctaggatcttgtccaggaaggacacccgggggattgtcttgcccatctcaaaggttcttcatagttttcatggaaaacccatgcccacacacacgaggcagctcataatcataataatggcactttataaaagtcagcatttttctctgattataaaatacatgttgtcaaaaagcttaaaaatgcaaaaagtacaaaacattaaagacaatctcatataacctcttctccctccccacatcccctctctttcaaaagaacttgtgaacattttggtgagaattttcacaagtgaagtacgtccatatcaccaacatgggccccaacactccagatgcccctcggggttctctcccaggtaccacgctatgacttctgactgaggatgggttttgattgtgcctgtttaagtcctatgaatagaatcacagagtatataccctttgagtctggcttcttttgctcaatattatgtttgtgagattcatttatgccattgtcccagctttatttaatttattttttctcaagacccagtctggctctgttgcccagggtagagtgcagtggtgtgatctcagctcactgcaacctccgcctcccaggttcaagcaattctcctgcctcagcctcccaagtagctgggattacaggcacctgccaccatgcctggctaatgttttgtatttttagt

SEQ ID NO: 77 - DNA, 2178 bp, Homo sapiens
  SIMILAR (996)..(760): 481254mologous to Mus musculus putative,accession number AK020699,Smith-Waterman Score=220.
tgggcgcctgcctgtgtgcaggcccaagggctcagctgcttctgtctgttcccagacccctcctcctgtagagagtggtgctgccctctcgggatgtacctgcaggtggagacccgcaccagctcccgcctccatctgaagagggctccaggcatccggtcctgggtccctgctggttggaatcttgtcgattggcctggctgctgcctactacagcggagatagcctgggctggaagctcttctacgtcacaggctgcctgtttgtggctgtgcagaacttggaggactgggaggaagccatcttcgacaagagcacagggaaggttgttttgaagacgttcagcctctacaagaagctgctgactcttttcagagctggccacgaccaggtggtggtcctgctccatgatgtccgtgatgtgagcgtggaggaggagaaggtccggtacttcgggaaaggctacatggtggtgctccggcttgcgacgggcttctcccaccccctcacgcagagtgcagtcatgggccaccgcagtgatgtggaagccatcgccaagctcatcaccagcttcctgggagctgcactgcctcgagagccccacagagctgtctcagagcagcgacagtgaggccggtgaccctgcaagccagagctgacagccccattgtgccttgagcccgtgcaccgcccagagggacccatgggcacatttcccggtgttgcttgagcccgttgcaccgaccacaggacccgtgggcacattcccggtgtgcctgagcccgtgcaccgcccacaggacccgtggcacattcccggtgtgcctgagcccgtgcaccgcccacaggacccgtggcacattcccggtgtgcctgagcccgtgcaccgcccacaggacccgtggcacattcccggtgtgcctgagcccgtgcaccgcccacaggacccgtggcacattcccggtgtgcctgagcccgtgcacgcgcccacaggacccgtggccttggcttcagttggagcctccagccgagatggcctattgcctgctcatgctgcggcttgcacactgcatgaaacagcaggccagaccaggacatccagactttctccatcgtgaggcctgggcctgcctttctgcagccggaggtctcgccagccctggactcctgctttgggccacagcaagacctcgggcgagtggagaggcggggccaggccgggcccttgtgggtgctgatgctgcatgttgtccccgacacagcagcctctccctggtggacatccccagcgagcacgtgcttccccaagggcaggtgaggggtgaacatccagggcctacctggctgtgcacgctgcagccacactgtggaagctgcccctccccgaggacccgcctcccttgcttgatgccaggatctcggcgcatagaccactctgccccagcggtcgtcacagaaaggtctctctgttcctcacactcagcttcagcataagctgtgaggccagaaaaataggttagctcttctagtatcgtgcagtgcttaaaaaccgggagctccagccgggcgcagtggttcatgccagtaatcccaggcacttttcggagggccgaggttgggaggatttgcttgaggccagggagtttcaagaccagcctgggcaacacagcaagatcctgtctttgtaaaaaaactaaccaaacaggaaaaactgggagattttctgcagaaattgagttccagcctctctcgaacctgggaagacctggcaggagggggctgggctctcggctacagactttcccccaccccgtaggagctgaacgccaaccatcctgacccgccagtgctcttggtctcctgagtgtacccagggtcctccccaggtgcggtgtgcaccgaagcgcgcctggtcctgatgccctggtctgggatcgtcggggacctctggctcctgtgtgcccttatgcggacaggcccaggaatggctgggtaggacagggaacacctttgccccacgtctggctgtgacctcggtgaaagccgacaggagagagatgggacccgtcctcctcagtagtggctgccagtccctcgttgcaggacagggtcatcataaccataaataacccttcacgtgtcaaaaaaaaaaaaaaaaaaaaaaaaaaagtcgtatcga

SEQ ID NO: 78 - DNA, 1196 bp, Homo sapiens
  SIMILAR (360)..(524): 781254mologous to Mus musculus putative,accession number AK003574,Smith-Waterman Score=222.
aacagaggtagcctgaaagaagcaggaactccaggatcccaaaccagagcagaccctatagtaaagtatttttacatcttttcctttccccagaagagatccctaacctattgttttattgacagccttgctgttagaggctctttcccagaagttggacgaagaggctcaggcgttgctgtttcttgtcttccaagtcaagtggttactctggtaatggattgcctctctccgagctttcaccctggtgagactgtccagatctagtctgtaaacccagcttagaagcactgttgtaaaaatgactgaagagcccatcaaggagatcctgggagccccaaaggctcacatggcatgcgacgatggagaagagccccaagagtgaagttgtgatcaccacagtccctctggtcagtgagattcaaatgatggctgctacagggggtaccgagctctcctgctaccgatgcatcatcccgtttggtgtgggtgccttcatcgccggcatcgtggtcaccgcgctgggaatttgcggacgttttcgtgaaaatttagagtataagatgaaaaaggggaacgaagggcagttttgggggacgtcagttcgacaccgaaccccttctgcttctgtggtgttggaaaaatctggaaaaaaacaatctcagtgccatggaattcatgctatgataaaaagatacccacagtctattccagattacacagcatgggcatcttctagaatttgggaggagatggatgacacagagggagtattagaaaggcttccatggcagcagacacctgacctgaaacctgacatgcaaagtgatttcctacctgtccgcgtttgccaatatcagagttggctgctgtttgcacataatagtaagacggaaggattattagggaaatttggtcaccctagctgtggcatagtgcaaagattttttggagagaagaaagaaacttgggaactctatgaacaagaatgcaacggagagactgtggtctactgggaagtgaagtacccttttcccatgtccaacagagacgtatcctttccacaagctgcagtctattgcagagaggtagagctggtttctcagcaggcacagataacattgtctctgattcttgcagcagcatttgctaaagatattgcttcttgtatggtgtttggagagctcagagtgtga

SEQ ID NO: 79 - DNA, 756 bp, Homo sapiens
  SIMILAR (326)..(712): 911254mologous to Homo sapiens phosphatidylcholine transfer protein,accession number AF151638,Smith-Waterman Score=627.
gtttcgtggcccacactaagggtgtccgcggcctgccctccatgcggaggagcccggactgcggaaggatggagctggccgccggaagcttctcggaggagcagttctgggaggcctgcgccgagctccagcagcccgctctggccggggccgactggcagctcctagtggagacctcgggcatcagcatctaccggctgctggacaagaagactggactttatgagtataaagtctttggtgttctggaggactgctcaccaactctactggcagacatctatatggactcagattacagaaaacaatgggaccagtatgttaaagaactctattgaacaagaatgcaacggagagacttgtggtctactgggaagtgaagtacccttttcccatgtccaacagagactatgtctaccttcggcagcggcgagacctggacatggaagggaggaagatccatgtgatcctggcccggagcacctccatgcctcagcttggcgagaggtctggggtgatccgggtgaagcaatacaagcagagcctggcgattgagagtgacggcaagaaggggagcaaagttttcatgtattacttcgataacccgggtggccaaattccgtcctggctcattaactgggccgccaagaatggagttcctaacttcttgaaagacatggcaagagcctgtcagaactacctcaagaaaacctaagaaagagaactgggaacattgcatccatgggttgatgtctc

SEQ ID NO: 80 - DNA, 1131 bp, Homo sapiens
  SIMILAR (355)..(939): 501254mologous to Feline leukemia virus gag-pol precursor polyprotein gPr80,accession number M18247,Smith-Waterman Score=466.
atgcatgagatttggtgccgtgactcggatcaggagacctcccttgggagatcaatcccctgtcctgctgctctttgctccgtgagaaagatccacgtacaacctcaggtcctcagaccaaccagcccaagaaacatctcaccaatttcaaatctgcgactgaagagtgacgctgcctcatcgccttggaaaccccctggaccatcacggacgccaagctttggcctcctttgcgtcttcctctcatatccccccaccttaaccacaagtataggacatctctactccttccctggcaaccgatcacatgcccattaccatcccactaaacctaatcacccttaccccactcaacgccaatatcccatcccaccgcacgctttaaaaggattaaagcctgttatcactgacctgctacagcataggcttctaaaacctataaactctccttacaattcccccattttacctgtccaaaaacccgacaagtcttacagattagttcaggatctgcgccttaccaaccaaattgttttgcctatccaccctgtggtgcccaacctgtacactcttttgtcctcaataccttcctccacaactcactattctgtgcttcatcttaaagatgcttttttcactattcccctgcacccctcatcccagcctctctttgctgtcacctggactgaccctgacacccaacagtcccagcagcttacctgggctgtgctgccgcaaggtttcagggacagccctcattacttcagccaagctctttctcatgatctactttctttccacccctctgcttctcaccttattcaatatattgatgaccttcttctttgtagcccctcctttgaatcttctcaacaagacacacttctgcttcttcagcatttattctccaaaggatatcagtctgatgacagaccagcctttactagtcaaatcacccaagcagtttctcaggctcttggtattcagtggaaccttcatatcccttaccatcctcaatcttcaggaaaggtagaatggactaatggtcttttaaagcttctgctcctacttctgactgctaatatcgatgacaccagttatctgcaaattcctcataaggggctccaatga

SEQ ID NO: 81 - DNA, 863 bp, Homo sapiens
  SIMILAR (107)..(235): 811254mologous to Homo sapiens calbindin D28K,accession number S46006,Smith-Waterman Score=183.
cccgcctgcacccaggtgaaataaacagccatgttgctcacacaaagcctgttgtggtctttcacacggacgcgcatgaaatttggtgctgtgactcggatcgggggacctcccttgggagatcaatcccctgtcctcctgttctttgctccgtgagaaatatctacctacaacctcagatcctcagaccaaccagcccaaggaacatctcactaattttaaatcagacaaaggagacacgttttatctgtggacccaaaactccggcgccggtcacggactgggatggcagccttcccttggtgtttaatcattgcagggatgcctctctgattgttcacccacgtttcaaaggtgtcagagcacgcagggacgcctgccttggtccttcacccttagcggcaagtcctgcttttctggggaaggggcaagctgctcctcgccaggccgagctaggtcccaatgcttcctcagcctccgctcctccaccctataatctttttatcgcctcccctcctcacacctggtccggcttacagtttcgttcggtgactagccctcccccacctgcccagcaatttactcttaaaaaggtggctggagccaaaggcatagtcaagcacgctttaaaaagattaaagcctgttatcactcgcctgctacagcatggccttttaaagcctataaactctccttacaattcccccattttacctgtcctaaaaccagacaagccttacaagttagttcaggatctgcgccttatcaaccaaattgttttgcctatccaccccgtgatgccgaaacatactgacggttaccaaaatgttggccccaatattacccagtgtgtgattcactga

SEQ ID NO: 82 - DNA, 915 bp, Homo sapiens
  SIMILAR (481)..(894): 381254mologous to Human endogenous retrovirus tripartite fusion transcript PLA2L,accession number Z14310,Smith-Waterman Score=199.
atgactgacaacattctggaattagctcaaaacatggataaatacacaaagtatgaaatgactactacttcaatcttaagtcaaccctcatcctcacagagggagcaagatggccaaggtttccaggaattgacggtcacttctgaaatgttcaggaaaggaaaaggaagtttctgctcccatcctcaccctgagaagttcctcagaacatttaatgaaatagaaacttacctcataggcaattttcaggacttagaattagaaagtagtgatgacctgccaagaggctgcacaaatgaaaaggccaggaagacctatgacccaaagaagcttccactcccatacacagcaggccttgctggatactggctagtaaattacacatatgagaatcatatgggtgaaggcagtgagcatagtgatgccatcagtagacaccatggccacggcctgtttggtggtctcttcacacggaggcgcatgaaatttggtgccgtgactcggatcaggggacttcccttgggagatcaatcccctgtcctcctgttctttgctcgtgagaaagatccacgtacgacctcaggtcctcagaccgaccagcccagtaaacatctcaccaatttaaaatccgcctccactcctccaccctataatccttttatcacctcccctcctcacacccggtccggcttacagtttcgttccacctctagccctccggcacctgctcagcaatttactcttaaaaaggtggctgaagctaaaggcatagtcaaggttaatgctcctttttccttatcagacctctcccaaatcagtgtgcgtttaggctctttcatcaaatatgaaaaatccagcccagttcatggctcgtttggcagcaaccctgagacactttacagccctagaccctga

SEQ ID NO: 83 - DNA, 1671 bp, Homo sapiens
  SIMILAR (1147)..(1668): 801254mologous to Homo sapiens Human secreted protein encoded by gene 3 clone HNHCT15,accession number AAB38012,Smith-Waterman Score=675.
atggagagcgaggaaaaacagggtagagtgacagcctacccggaagccacacaggaccattcccgccagcatcaggttggtgtccctttgggacagagcttccagaagaaggagcaggcagccatctttgatattctgctgcctccactggtgacatcgtcagcccgcctacacccaggtgaaataaacagccatgttgctcacacaaagcctgtttggtggtctcttcacacggacacgcatgaaatttggtgctgtgattcggatcgggggacctcctttgggagatcaatcccctgtcctcctgttctttgctccatgagaaagatccacctacgacctcaggtcctcagaccgaccagcccaagaaacatctcaccaatttcaaatccagctgctcctcgccaggctgagctaggtcccaattcttcctcagcctctgctcctccaccctataatccttttatcacctcccctcctcacacctggtccggcttacagtttcattccgtgactagccctcccccacctgcccagcaatttactcttaaaagggtggctgaagctaaaggcatagtcaagaccgtcacggacgccgagcttcgggtaactctcacagtggaagcacgctttaaaaagattaaagcctgttatcacttgcctgctacagcatggctttttaaagcctataaactctccttacaattccctcattttacctgtcctaaaaccagacaagccttacaagttagttcaggatctgcgccttatcaaccaaattgttttgcctatccaccccatggtgagccaggcgtgaagcagcaaagagtgtgtgagcaagtggacgtggggaccagccatagcacacagccaggagcaccagcacaggcgcgagcaatgtgggaggctgtggctggaccaggtgtgcctcaagtggcttccgccttgggcgccagcatctggatgaggggcagactgacacctcacacggccagatactcctctgagacaaaacttccagaggaacgatcaggcagcaacattggctgttcagcaatactcgctgttctgcagcctctgcagctgatacccaggcaaacagggtctggagtggacctccggcaaactccaacaaacctgcagctgagggtcatgactgttagaaggaaaactaacaaacagaaaggacatccacaccaaaaccccatctgtacgtcaccatcatcaaagaccaaagaaatacaaactaccatcagagaatactataaacacctctatgcaaataaactagaaaatctaggagaaatggataaattcctcgacacatacaccctcccaagactaaaccaggaagaagttgaatctctgaatagaccaataacaggctctgaaattgaggcaataattaatagcttaccaaccaaaaaaagtccaggaccagacagattcacagccgaattctaccagaggtacaaggaggagctggtaccattccttctgaaactattccaatcaatacaaaaagagggaatcctctctaactcattttatgaggccagcatcaacctgataccaaagcctggcagagacacagcaaaaaaagagaattgtagaccaatatccccgatgaacatcaatgcaaaaatcctcaataaaatactggcaaactga

SEQ ID NO: 84 - DNA, 1566 bp, Homo sapiens
  SIMILAR (768)..(797): 901254mologous to Rattus norvegicus potassium channel,accession number AF091247,Smith-Waterman Score=58.
atgaggaccagagaagtcagcataactggagcagattttacagctctactggtagatatcattggcaattctaccagctacctcacagagatttttaagtcaacctccatcctctcagtgaatcaaagcaatgaatcagattgcatcttcatctgtgtgatgacaggaaagtcaggaaggaatctttctgacttctgggagatagaagaaaaatatcccattatcaattacacatttaccagcggcttgtctggtgttctggctttattgctcacacaaagcctgtttggtggtctcttcacacggacgcgcatgaaatttggtgccgtcactcggatcgggggacctcccttgggaaatcaatccccgtcctcctgttctttgctccatgagaaagatccacctacgacctcaggtcctcagacagaccagcccaagaaacatctcaccaatttcaaatccgggaccgaggaagccatgaacactacaagccttttggcgcctgctgctgagataatggccacacctggcagcccatcccaggccagccctacctcgggagcattcacccatggcacacagactccgagtccaaccaaggcaacagcccccagatatccacaaacaggagcgcagagtcgacggccccgccgcttccgccggccccctgcgggggccgcccccaaagcagccgccccacggcacccgcacccgcggggcaccgccccccccccccggcggatatcacctgaatctattcgcccacacccccccccccccctagaccgcggcccccgcccccccgtcacgccgttcctgattgtcctggggtgcttgattctggctgtcctgaccacattcaaggagtatgagactgtctcgggagactggcttctgttactggagacatttgctattttcatctttggagccgagtttgctttgaggatctgggctgctggatgttgctgccgatacaaaggctggcggggccgactgaagtttgccaggaagcccctgtgcatgttggacatctttgtgctgattgcctctgtgccagtggttgctgtgggaaaccaaggcaatgttctggccacctccctgcgaagcctgcgcttcctgcagatcctgcgcatgctgcggatggaccggagaggtggcacctggaagcttctgggctcagccatctgtgcccacagcaaagaactcatcacggcctggtacatcggtttcctgacactcatcctttcttcatttcttgtctacctggttgagaaagacgtcccagaggtggatgcacaaggagaggagatgaaagaggagtttgagacctatgcagatgccctgtggtggggcctgatcacactggccaccattggctatggagacaagacacccaaaacgtgggaaggccgtctgattgccgccaccttttccttaattggcgtctccttttttgcccttccagcgggcatcctggggtccgggctggccctcaaggtgcaggagcaacaccgtcagaagcactttgagaaaaggaggaagccagctgctgagctcattcag

SEQ ID NO: 85 - DNA, 1404 bp, Homo sapiens
  SIMILAR (600)..(364): 551254mologous to Rattus norvegicus nucleoporin p58,accession number U63839,Smith-Waterman Score=222.
ttaatcctgctgtatcagtgaagcaggatatttccctgaccctctcgtgggactcacaacaggggtgcctggcttactcagtccgcagctctcaactctttgtgggaggtggtgcatgaacgaacaaggtggaaactggagtgtgtgaaggccagaatcagctggccactccttcgcctgtaagagtgaactccactcattcaaactgactacattccacccattgcttctttcatcatggaatgtgcctgctccctcttcaccttccaccatgagtgtaagcttcctgaagtctcccagcggaagaacacaccagcggaagaatacaccagcagacattcgcagacactggcaggccatcatttttcttgttttgtttccagttggaggtttcttcaactgaaagagctgccctcctgttccaaaacctacagagacaggattagacatcctgtatgtccaaccaacgggtactgtgatgccagaattgctgaagttaaatgcagatgttatttgagctgccaaagcttgcactaagatttctgaaggtttatttatttttccaaatccaaatgtggccttgctggtactttttctgccaatagcttgtcgcaaggacagaaaggctttctgtatctcagggtttcttgccttggtgtactgggagaatccgatcacacgtgggcttggagaatgagtgcaaggttttattgagtggaagtagctctcagaagatggggaagccagaggggagatggttttcacctggagtcgggccacccccgtgcttggcagccccggctctcctccgactgccctggaaatctccgcctcatcccaccggtggatggcctgccagcgtgcccgtgcctgtcggtgtgctcttctgccagcgtgctcctctggatgatcagctgcttgtgtgttggccagcgagggttttggagaagaggtattggcaaccacctctgtcctagttgtgcccatcacatgaatggctatggtagtggagcctatgtctgggtcctgactgagctgactgtggactttgctggattctgggcctgatactactagccagctttgttgaaaatgagttcgttgcaggtgtgtggtttcacgtgcatccgtgtgaagagaccaccaaacaggctttgtgtgagcaacatggctgtttatttcacctgggtgcaggcgggctgagtcctccactgtgagagttacccgaagctcggcgtccgtgatggtttgcccctttcccagaaaagcgggacttgccgctaagggtgaaggaccaaggcaggcgtccctgcgtggtctgacacctttgaaacgtgggtgaataatcagagaggcatccctgcaataattaaacaccaagggaaggctgccttcccagtccat

SEQ ID NO: 86 - DNA, 825 bp, Homo sapiens
  SIMILAR (670)..(554): 741254mologous to Homo sapiens unnamed protein product,accession number AK024120,Smith-Waterman Score=141.
atgtggaatgctgtgaccctctggcagcagcgtgaatcatgcattgaagaggaatcagagataggaacactagagacaaaggagacacattttatccgtggacccaaaactctggctccggtcacggactgggaaggcagccttcccttggtgtttaatcaatgcagggacgcctctctgattatacacccacgtttcaagggtttcagaccacgcagggacgcctgccttggtccttcacccttagcagcaagtcctgcttttctggggaaggggcaagctgctcctcgccaggccgagctaggtcccaattcttcctcagcctctgctcctccaccctacaatccttttatcacctcccctcctcacacctggtcaggcttacagtttcattccatgactagccctccccctcctgcccagcaatttcctcttaaaaaggtggctggagctaaaggcatagtcaagcggctgaagactgacactgcccgattgccttggaagcccccagaccatcatagacgccgagcttcgggtaactctcacagtggaagggtacagcctccctcccggctgccttcgtgggctcatgttgagtgtctcaggcttttccaggagcacggtgcaagctgtcagtggatctaccgttctgggatctggaggacagtggttttcatgtgcgtccgtgtgaagagaccaccaaacaggctttgtgtgagcaacatggctgtttatttcacctgggtgcagttacttcaggccatctgggcgtatacgtgcaagtcacaggggatgcgatggcttggcttgggctcagaggcctga

SEQ ID NO: 87 - DNA, 642 bp, Homo sapiens
  SIMILAR (123)..(1): 731254mologous to Homo sapiens Human secreted protein, SEQ ID NO: 7420,accession number AAG03339,Smith-Waterman Score=153.
atgtgggaaagtttggaactcaatagatacttgttgaatgactttgatcaaaagcccgatagtgatatggacaataaggtccaggctgaagtggtctcagatggagatgaggaacttgttgggaaccggagcaaagagacaaaggagacacgttttatccgtggacccaaaactccggcgctggtcacggactgggaaggcagccttcccttggtgtttaatcattgcagggaggcctgccttggtccttcacccttagcagcaagtcctgctttcctggggcaggggcaagatttaattaacctcgccttcaaggtgtacaataatagaaaaaagttgcaattcctggcctccactgtgagacaaaccccagccacatctccagcacacaagaacttccaaacgcctgaaccgcagcggccaggcgttcctccagaacctcctcccacaggagcttgctacaagtaccagaaatctgaccaccaggccaaggaatgcctgcagcccaggattcctcctaagccgtgtcccatctgtgcgggaccccactggaaattggactgttcaactcacctggcagccactcccagagcccctggaactctggcccaaggctctctgactgactccttctcggcttag

SEQ ID NO: 88 - DNA, 537 bp, Homo sapiens
  SIMILAR (174)..(521): 431254mologous to Homo sapiens Human secreted protein, SEQ ID NO: 5397,accession number AAG01316,Smith-Waterman Score=189.
cgtcgctgttgctgccgccatacgcgctctccctgtttagctcttctgttagaaatagtatctttgttttcctttgctgttcctcagtcccctgactcttcaccccttgttttcacctattttgcgagaacccatccagatcccccttcccttcttcccctgccggcccagttatggcagagaacgatgtggacaatgaagctcttggactatgaaagatgaatgaggtgggagacagcagctgggggagatggggctgaggcccctgccaagaaggatgtcaagggctcctatgtctcccatcccacagctctggctttcttgacttcctgctcttgctttaggtgctcccctccattgtccactgtgcctttgagcattcgacgcatttccggcatgagtgcatttctcaggccattctgggaaaggatgccctgtttcctgccctgttggacatttttcttaccggagtgttttttttgactattttttccccggtgctgcgggttctgctcaggtgtctgttctgtttatccc

SEQ ID NO: 89 - DNA, 1614 bp, Homo sapiens
  SIMILAR (1057)..(1602): 521254mologous to Murine leukemia virus reverse transcriptase,accession number M87550,Smith-Waterman Score=436.
atgggcctcgtgcatctgcagagacagtcatattggacagtgcagaggagctccataaatcacttcctaggctgcaacccacatactgggaaagataaaacgctttacatgagatggacaaaaagctttaggaaagtagaagatccacctacgacctcaggtcctcagaccgaccagcccaagaaacatctcaccaagtttaaatccgagacaaaggagacacgttttatccatggacccaaaactccggcgccggtcatggactgggaaggcagccttcccttggtgtttaatcattgcagggacgcctctctgattatacactcacatttcaagggtgtcagaccacgcagggatgcctgccttggtccttcacccttagcggcaagtcccgcttttctggggaaaaggcaacacgctttaaaaagattaaagcctgttatcactcacctgctacagcatggccttttaaagcctaaaaactctccttacaattcccccattttacctgtcctaaaaccagacaagccttacaagtttgttcaggatctgtgccttatcaaccaaattgttttgcctatccaccccatgctgtactcactctttgttgagtctcccacaattaccattgtttctggcccggacttcaatccggcctcccacattattccggataccacacctgaccctcatgactgcatctctctgatccacctgatgctctccccatttccccacatttccttcttccccatttctcaccctgatcacacttggtttattgatggcagttccaccaggcctaatcgccactcaccagcaaaggcaggctatgctataatatcttccacatctatcgttgaggctaccactctgcctccctccactacctctcagcaagccaaactagttgccttaactcaagccctcactcttgcaaaaggactacgcgtcaatatcttactgattctaaatatgcctttcatattcggcaccaccatgcagtcatatgggctgaaagagggattgttcaggtctcctccctttcctacacatcaagctaggggatttgcccctgcccaggactggcaaattgactttactcacatgcctcgagtcagaaaactaaaatatctcttagtctgggtagacgctttcactggatgggtagaggccttccccacagggtctgagaaggccactgcggtcatttcttcccttctgtcagacataatccctcggtttggccttcccgcctctacacagtctgataacggaccggcctttactagccaaatcacccaagcagtttctcaggctcttggtattcagtggaaccttcatatcatttaccgtcctcaatcttcaggaaaggtagaacggactaatggtcttttaaagacacacctcaccaagctcagcctccaacttaaaaaggattggacagtacttttaactcttgctcttctcagaatcagagcctgtcctcgagatgctacagggtacagtccatttgaactcttatatggacacactttcttgcttggccccaacctcatcccagacaccagccctctaggcaactatcttccagtcctccaacaggctagatag

SEQ ID NO: 90 - DNA, 1176 bp, Homo sapiens
  SIMILAR (451)..(1170): 361254mologous to Murine leukemia virus reverse transcriptase,accession number M87550,Smith-Waterman Score=373.
atgacaactatactgaatggccgactcaagaatcaagaggacctggatgcgcatgaaatttggtgctgtgactcggatcggggggacctcccttgggagatcaatcccctgtcctcctgctctttgctccgtgaaaaagatccacctacgacctcgggtcctcagacccaccagcccaaggaacatctcaccaattttaaatcagcacgcttcaaaaggattaaagcctgctattactcgcctgctacagcatggccttttaaagcctataaactccccttacaattcccccattttacctgtcctaaaaccagacaaggcttacagcataattctcataaaaacacacgtgctctccctgattatcgtctccggctaatctcccaaaccccaatcccttctacaaaacaacaactcctttccttcctaggcatggttagtaaggtcagaattcttacacaagagctgggaccacgtcctatagcctttctgtccaaacaactggaccttactgttttaacccaaccctcatgtctgcatgcagcggctgccgctgccttaatacttttaaaggccctaaaaatcacaaagtatgctcaactgactctctacagttctcataacttccaaaatctattttcttcctcatacctgatgcatatactctctgctccctggctccttcagctatattcactctttgttgagtctcccacaattaccattgttcctggcacggacttcaacccggcctcccacattattctggataccacacctgaccctcatgactgtatctctctgatccacctgacattcaccccatttccccgtatttccttctttcctgttcctcaccctaatcacatttggtttattgatggcagttccaccaggcctaaatgccactcaccagcaaaggcaggctatgctatagtatcttccacatctatcattgaggctaccgctctgcccccctccactacctctcagcaagccgaactagttgccttaacccaagccctcactcttgcaaaaggactatgcgtcaatatttatactgactctaaatatgcctttcatatcgtgcaccaccatgcaagaagtttcctcactaaacaagggtcctctatcattaatccctctttaataaaaacgcttctcaacgccgcttaa

SEQ ID NO: 91 - DNA, 618 bp, Homo sapiens
  SIMILAR (487)..(609): 921254mologous to Homo sapiens unnamed HERV-H protein,accession number U92818,Smith-Waterman Score=205.
atggggtttcgccattttggccaggctgctctcaaactcctgatctcaggagagacaaaggagatgcattttatccgtggacccaaaactccggtgccagtcacggactgggaaggcagccttctcttggtgtttaatcattgcagggacacctctctgattatacacccacatttcaagggtgtcagaccacgcagggacacctgccttggtccttcacccttagcggcaagtcccgcttttctgaggaagggacaagctgctcctcgccaggccgagctaggtcccaattcttcctcagcctctgctcctccaccctataatccttttatcacctcccctcctcacactgggtcctgcttacagtttcgttccgtgactagccctcccccacctgcccagcaatttactcttaaaaaggtggctggagccaaaggcatagtcaaggagcttgctacaagtgccagaaatctggccactgggccaaggaatgcccgcagcccaggattcctcctaagctgcgtcccatctgtgtgggaccccactgaaaatcggactgttcaactcacctggcagccactcccagagcccctggaactctggcccaagcctctctga

SEQ ID NO: 92 - DNA, 1260 bp, Homo sapiens
  SIMILAR (765)..(4): 671254mologous to Homo sapiens p40,accession number U93569,Smith-Waterman Score=813.
ttacaatttggcatgtttttgcagtggctggtaccagttgttcctttccatgtttagcgcttccttcaggagctcttttagggcaggcctggtggtgacaaaatctctcagcatttgcttgtctgtaaaggattttatttctccttcacttatgaagcttaatttggctggatatgaaattctgggttgagaattcttttctttaagaatgttgaatattggcccccactctcttctggcttgtagagtttctgccgagagatcagctgttagtctgatgggcttccctttgtgggtaacccgacctttctctctggctgcccttaacatttcttccttcatttcaactttagtgaatctgacaattatgtgtcttggagttgctgttctcaaggagtatctttgtggcattctctgtatttcctgaattcgaatgttggcctgccttgctagtttggggaagtttttctggataatatcctcaagagtgttttccaacttggttccattctccccgtcattcatttcattcatttgatcttccatcactgataacctttcttccagttgatcgaattggctactgaagcttgtgcattcatcacgtagttcttgtgccatggttttcagctccatcacgtcctttaaggacttctctgcattggttattctagttagccattcgtctaatcttttttcaaggtttttaacttctttgcgatggttcgaacttcctcctttggtctttgatgatggtgacatacagatggggttttggtgtggatgtcctttctgtttgttagttttccttctaacagtcaggaccctcagctgcagctctgttggagtttgctggaggtgcactccagatcctgtttgcctgggtatcagcagtggaggctcagttggaaatgcagaaatcattcgtcttctgcatcgctcacgctgagagctgtagactggagctgttcctattcggccatcttggaaccgcgctggtactgtcttctttacttcattcagagtatcattcttaagaaacaccgaggtcgtaggtggatctttctcatggagcaaagaacaggaggacagcggattgatctcccaaggggaggtcccccgatctgagtcacagcaccaaatctcatgcacgtccgtgtgaagagaccaccaaacaggctttgtgtgagcaacaaggctgtttatttcacctccaagagtggtcccctgagccaagatgttgttacggtagtaattcat

SEQ ID NO: 93 - DNA, 2223 bp, Homo sapiens
  SIMILAR (837)..(22): 771254mologous to Homo sapiens Human secreted protein encoded by gene 3 clone HNHCT15,accession number AAB38012,Smith-Waterman Score=1056.
tcaaagggaatgcttccagatttgtccattcagtatgacattggctgtgggtttgtcatagatagctcttattattttgagatatgtcccatcaatacctaatttattgagagtttttagcatgaagggctgttgaattttgtcaaaggccttttctgcatctattgagataatcacgtggtttttgtcattggttctgtttatatgctggattacatttattgatttgtgtatgttgaagcagccttgcatcccagggatgaagcccacttgatcatggtggataagctttttgatgtgctgctgtattccgtttgccagtattttattgaggatttttgcatcgatgatcatcagggatattggtaaaaaatctcttttttttgttgtgtcactgccaggctctggtatcaggatgatgctggcctcatcaaatgagttagggaggattccctctttttctattgattggaatagtttcagaaggactggtaccagctccttgtacctctggtagaattcggctgtgaatccatctggtcctggactttttttggttggtaagctattaattatttcctcaatttcagagcctgttattggtctattcagagattcaacttctttctggtttagtcttgggagggtgtatgtgtcgaggaatttatccatttcttccagattttctagtttatttgcctttggtctttgatgatggtgacgtacagatggggttttggtgtgggtgtcctttctgtttgtttgtttttctttctgacagtcaggaccctcagctgcaggtctgttggagtttgctggtggtccactccaggccctctttgactgggtatcagcagcagaggctgcagacagcaaatattgctgtacagcaaatgttgctgcctgattgttctctgggaatttcatcccaaaatctttcttcagtttaatctctcccaccgtaggttcccatgctgcccctaatcccactcgaagcagccctgagaaacatcgcccattatctctccataccaccccccaaaagtttcgctgccccaacacttcaccactattttgttttgtttttctctgtccatctgcaggaatgctgacattccatgtaaagaggggttgtgactttacttcttgtgcaagcctgaacccagagggcactcctcctgtggagatgtagtcaccctgaagtgctccagaaagactgtctataggcacactcatgctgagttcctggaagagaagccccagctgtatcagtgctggctgcaggcgttgcagtttttggtgcgtctcgttgatttgctgagcatatttatcatatgtaatggttcccccgggattcagaaagctcagcttgttgtatattctctggtggggtgacccaaagaccattagtggaccttcctgaattgggcattgtcgttttccattgagtttaatcacagagcatggtattactaagagacatcctaagagctctcctatattccagaaatactcttcttccttatatctattttggaggagcaatccagtttccccatagtagtcaggatcagtcagtccagtcagcatagtaacttccttctttgcctgttgattcagaggcttgagggacccaaggtggctggttggcagtcttaacttccagttcagtggaatcactatgtttcctggtagacacatttctgcctttggaactgagacctctcttccacagaccgttttgtcaccaattttccagtcatgttccttccaagtccctgaccatccagcaaaccagtggccatagctcatgaattgataactaattgtacatctaaccatttcttcttccagtaagtctaatgtagttgttgcttctcgctcattaggtccaatcagcataatgtcatcaatgtaatggatctgcctaatatcttgtaaaagggtggtcaagattcttgtgaaggtggtcaagattgtcacctttaggagtctgctgagacttgaactagttataggtgtagaagcaaagaggggtagtgggagtgaatcaggagtgtcttgcatggcagatacctcagaggagaccattgcagttttctcaggccaaatagagttaatatcagatatggatggagtggctgcttctactggcaaagaagactgagaatttaaggtttcaattttgccagcttcatcaggatcttcccaaataacctccat

SEQ ID NO: 94 - DNA, 423 bp, Homo sapiens
  SIMILAR (256)..(414): 581254mologous to Homo sapiens unnamed HERV-H protein,accession number U92818,Smith-Waterman Score=156.
tgggttcttggtcttgctgacttcaagaatgaagctgcggaccctcgcgaaacaaaggagacacattttatccgtggacccaaaactccggcgccggtcacggactgggaaggcagccttcccttggtgtttaatcattgcagggacgcctctgattattcacccacgtttcaaaggtgtcagaccatgcagggacgcctgccttggtccttcacccttagcggcaagtcccgcttttctaggggaggggcaagagcttgctacaagtgccagaaatctgaccaccaggccaaggaatgcctgcagcccaggattcctcctaagccgtgtccatctgtgcgggaccccactggaaatcggactgttcaactcacctggcaggcactcccagagcccctggaattctggcccaaggctctctga

SEQ ID NO: 95 - DNA, 522 bp, Homo sapiens
  SIMILAR (58)..(177): 901254mologous to Homo sapiens calbindin D28K,accession number S46006,Smith-Waterman Score=199.
atgctgaaggacctgcctagagcaattagacaagaaaaagaaacaaaaggatcgggggacctcccttgggagatcaatcccccgtcctcctacactttgctctgtgagaaagatccacctacaacctcaggtcctcagaccaaccagcccaagaaacatctcaccaatttcaaatccgagacaaaggagacacgttttatccgtggacccaaaactccggcgccagtcacggactgggaaggcagccttcccttggtgttaaatcactgcagggacgcctctctgattattcacccatgtttcaaaggagcttgctacaagtgccagaaatctgaccaccaggccaaggactgccggcagcccaggattcctcctaagccacgtcccatctgtgtgggaccccactgcaaatcggactgttcaactcacctggcagccactcccagagcccctggaactctggcccaaggctctctgactgactccttcccagatcttctcggcttagcggctgaagactga

SEQ ID NO: 96 - DNA, 5130 bp, Homo sapiens
  SIMILAR (2614)..(4473): 941254mologous to Homo sapiens putative p150,accession number U93572,Smith-Waterman Score=3044.
atgctgttttgggcctttgacaaaattcaacagcccttcatgctaaaaactctcaataaattaggtattgatgggacgtatctcaaaataataagagctgtttatgacaaacccacagccaatatcatactgaatgggcaaaaactggaagcattccctttgaaaactggcacaagacagggatgccctctctcaccactcctattcaacatagtgttggaagttctggccagggcaatcaggcaggagaaggaaataaagggcattcaattaggaaaagaggaagtcaaattgtccctgtttgcagatgacatgattgtatatctagaaaaccccatcatctcaacccaaaatctccataagctgataagcaacttcagcaaagtctcaggatacaaaaacaatgtgcaaaaattacaagctttcttatacaccaataacagacaaacagagagccaaatcatgagtgaactcccattcacaattgcttcaaagagaataaaatacctaggaatccagcttacaagggatgtgaaggacctcttcaaggagaactacaaaccactgctcaaggaaataaaagaggatacaaacaaatggaagaacattccatgctcatggataagaagaatcaatattgtgaaaatggccatactccccaagaggactccattattatcgctgcctagtacattatatgaggagctgtggagacttaggtcctacttcccattgtgccctcaactttacaacatggagcagaataccacagactgggtaatttataaagaacagtgcatttggctcacagctctggagactggggagtccaagagcactgcaccagcatttggcaagggttatcccatggcagaatacatcatatggggcagattgacacctcacatggctggctactcctctgagacaaaacttccagaggaacgatcaggcagcaacatctgctgttcaccaatatccgctgttctgcagcctctgctgctgatacccaggcaaacagggtctggagtggacctccagcaaactccaacagacctgcagctgagggtcctgactgttagaaggaaaactaacaaacagaaaggacatccacaccaaaaccccatctgtacgtcaccatcatcaaagaccaaaggatcaaattcacacataacaatattaaccttaaatgtaaatgggctaaatgctccaattaaaagacacagactggcaaattggataaagagtcaagacccatcagtgtgctgtattcaggagacccatctcacgtgcagagacacacacaggatcaaaataaagggatggagggagatctaccaagcaaatggaaaacaaaaaaaggcaggggttgcaatcctagtctctgataaaacggactttaaaccaacaaagatcaaaagagacaaagaaggccattacatgatggtaaagggatcaattcaacaagaagagctaactaccctaaatatatatgcacccaatacaggagcacccagattcataaagcaagtccttagagacctacaaagagacttagactcccacacattaataatgggagactttaacaccccactgtcaacattagacagatcaacgagacagaaagttaacaaggatatccaggatttgaactcagctctgcaccaagtggacctaatagacatctacagaactctccaccccaaatcaacagaatatacattcttctcagcactacaccacatttattccaaaattgaccacatagttggaagtaaagcactcctcagcaaatataaaacaacagaaattataacaaactgtctctcagaccacagtgcaatcaaactcgaactcaggattaagaaactcactcaaaaccgctcaactacatggaaactgaacaacctgctcctgaatgactactgggtacataacaaaatgaaggcagaaataaatacattatttgaaaccaacgagaacaaagacacaacataccagaatctctgggacacattcaaagcagtgtgtagagggaaattcatagcactaaatgcccacaagagaaagcaggaaagatctaaaattgacaccctaacatcacaattaaaagaactagagaagcaagaacaaacacattcaaaagctagcagaaggcaagaaataactaagatcagagcaaaactgaaggaaatagagacacaaaaaatccttcaaaaaatcaatgaatccaggagctggttttttgaaaagatcaacaaaattgatagaccactagcaagaccaataaagaagaaaagagagaagaatcaaatagatgcaataaaaaatgataaaggggatatcaccactgatcccacagaaatacaaactaccatcagagaatactataaacacctctatgcaaataaactagaaaatctagaagaaatggataaattcctcaacacatacaccctcccaagactaaaccaggaagaagttgaatctctgaataaaccaataacaggctctgaaattgaggcaataattaatagcttaccaatcaaaaaaagtccaggaccagatggattcatagccaaattccaccagaggtacaaggaggagctggaggccagcatcatcctgataccaaagcctggcagagacacaaccaaaaaagagaattttagaccaatacccctgatgaatattgatgcaaaaatcctcaataaaatactggcaaaccgaatccagcagcacatcaagaagcttatccaccatgatcaagtgggcttcatccctgggatgcaaggctcgttcaacatatgcaaatcaataaacgtaatccaggatataaacagaacgaatgacaaaaaccatatgattatctcaatagatgcagaaaaggcctttgacaaaattcaacaacccttcattctaaaaactctcaataaattaggtattgatgggacgtatctcaaaataataagagctatctatgacaaacccacagccaatatcatactgaatgggcaaaaactggaagcattccctttgaaaactggcacaagacaggggtgccctctctcaccactcctattcaacatagtgttggaagttctggccagggcaatcaggcaggagaaggaaataaagggcattcaattaggacaagaggaagtcaaattgtccctgtttgcagatgacatgattgtatatcgagaaaaccccatcgtctcaacccaaaatctccataagctgataagcaacttcagcaaagtctcaggatacaaaatcaatgtgcaaaaatcacaagcatttttatacaccaataacagacaaacagagagccaaatcatgagtgaactcccattcacaattgcttcaaagagaataaaatacctaggaatccaacttacaagggatgtgaaggatctcttcaaggagaactacaaaccactgctcaaggaaataaaagaggatacaaacaaatggaagaacattccatgctcatgggtaggaagaatcaatatcgtgaaaatggccatactgcccaaggtaatttatagatttaatgccatccccatcaagctaccaatgactttcttcacagaattggaaaaaactactttaaagttcatatggaaccaaaaaagagcccgcattgccaagtcaatcctaagccaaaggaacaaagctggaggcatcacactacctgacttcaaactatactacaaggctacagtaaccaaaacagcatggtactggtaccaaaacagagatatagaccaatggaacagaacggagccctcagaaataatgccacatatctacaaccatctgatctttgacaaacctgacaaaaacaagaaatggggaaatgattccctatttaataaatggtgctgggaaaactggctagccatatgtaggagaaagctgaaactggatcccttccttacaccttatacaaaaattaattcaagatggattaaagacttaaatgttagacctaaaaccataaaaaccctagaagaaaacctaggcaataccattcaggacataggcatgggcaaggacttcatgtctacaacaccaaaagcaatggcaacaaaagccaaaattgacaaatgggatctaattaaactaaagagcttctgcacagcaaaagaaactaccatcacagtgaacaggcaacctacagaatgggagaaaatttttacaatctacccatctgacaaagggctaatatccagaatctacaaagaactcaaacaaatttacaagaaaagaacaaacaaccccatcaacaagtgggtgaaggatatgaacagacacttctcaaaagaagacatttatacagccaaaaggcacatgaaaaaatgctcatcatcactggccatcagagaaatgcaaatcaaaaccacattgagataccatctcataccagttagaatggcgatcattaaaaagtcaggaaacaacagaccaagctccaatgtcttctctgtgaaactttctgagatccaatccttggctctcatagagactaggtgcttaatgaatgctgatgaacagggtgtgccactgattcaagaaatgctggaatcttgggcaagtatttgcaaagttcccaagtatccaaatgccgaagcagtgcggccagaagagcaaacaccccacctgcacccaggtgaaataaacagccatgttgctcacacaaagcttgtttggtggtctcttcacacggacacgcatgaaatttggtgccgtgactcggatcgggggacctcccttgggagatcaatcccctgtcctcctgctctttgctccgtgagaaagatccacctacgacctcaggtcctcagaccgaccagcccaagaaacatctcaccaatttcaaatccgcacacaagaacttccaaacgcctgaaccgcagcggccaggcgttcctccagaacctccttccccaggagcttgctacaagtgccagaaatctgaccaccaggccaaggaatgcctgcagcccaggattcctcctaagccgtgtcccatctgtgcgggaccccactggaaattggactgttcagctcacctggcagccactctcagagcccctggaactctggcccaaggctctctga

SEQ ID NO: 97 - DNA, 722 bp, Homo sapiens
  SIMILAR (106)..(186): 401254mologous to Feline leukemia virus gag-pol precursor polyprotein gPr80,accession number M18247,Smith-Waterman Score=43.
ggacgcgcatgaaatttgatgccatgactcaattgggagacctcccttgggagatcaatcccctgtcctcctgctctctgctccgtgagaaagatccacctacgacctcaggtcctcagaccgaccagcccaaggaacatctcaccaatttcaaatccacaaccaatcatgcaccccttaccatcccattaaaacctaatcactcttatcccgctgaatgccaatatcccgtcccacagcacgctttaaaaggattaaagtctattatcactcgcctgctacagcatggccttctaaagcctataaactgcccttacaattcccccattttacctgtcctaaaaccagacaaggcttacaggttacttcaggatctgcgccttatcaaccaaattgttttgtctatccaccccgtgttgccaaaaccaaatactctcctatcctcaatacctccctccacaacccattactctgttctggatctcaaacatgctttctttactattcctttgcacctttcatcccagcctctcttcgctttcacttggactgaccctgacacccatcaggctcagcaaattacgtgggctgtactgccacaaggcttcacagacagcccccattacttcaatcaagcccaaatttcttcctcatctgttacctatctcggcataattctcatgaaaacccacgtgctctccctgctgatcgtgtctggctaa

SEQ ID NO: 98 - DNA, 408 bp, Homo sapiens
  SIMILAR (148)..(186): 841254mologous to Homo sapiens calbindin D28K,accession number S46006,Smith-Waterman Score=57.
  misc_feature (1)...(408): n = a,t,c or g
ttgnnnnnnnnnnnnnnnnnnnnnnnnnnnnnnnnnnnnnnnnnnnnnnnnnnnnnnnnnnnnnnnnnnnnnnnnnnnnnnnnnnnnnnnnnnnnnnnnnnnnnnnnnnnnnnnnnnnnnnnnnnnnnnnnnnnnnnnnnntgggttatgaaatttggtgccgtgactcggatcgaggaccttcccttgggagatcaatcccccgtcctcctgctctttgctccgtgagaaagatccacctacgacctcaggtcctcagacggaccagaccaagaaacatctcaccaatttcaaatctggtaagcggcctctttttactctcttctccaacttccctcactatccctcaacctctttcttctttcaatcttgacgatacacttcaatctctcccttctcttaatttca

SEQ ID NO: 99 - DNA, 482 bp, Homo sapiens
  SIMILAR (151)..(306): 901254mologous to Homo sapiens Human sperm-specific antigen 6.7L,accession number AAW88376,Smith-Waterman Score=235.
gcgggagggggctgctcgcccaagggaaggcctgaagcgaagagcgggcagcgggactgggaactggtggccggggggccgccaggcatcagccggcgagaaggcacttgttgctctaggtttcccagccgcctgtcgcagccgtttcgcagtgcacaacagctccagctggcagcatcacttcccgccaatttatccaacttctgccaaggctctgaaatgccaacaacgtcgaggcctgcacttgatgtcaagggtggcacctcacctgcgaaggaggatgcccgccctgagaagagcacccttggccaatttcaaccctgctggtcatagataaccaagtctcatctaaaactagataacctgacgaatcagcaaatcaatactacgccagcgacactttcattatattatcgcgaacatacaacagatacatcttagtccatctctccaagtaaacatcacacgttcacgacggaccc

SEQ ID NO: 100 - DNA, 770 bp, Homo sapiens
  SIMILAR (245)..(277): 721254mologous to Homo sapiens Human secreted protein, SEQ ID NO: 5210,accession number AAG01129,Smith-Waterman Score=41.
tttggtgtcgtgactcagattgggggacctcccttgggagatcaatcccctgtcctcctgctctttgctctgtgagaaagatccacctacgacctcaggaccgaccaagaaacatctcaccaatttcaaatccagtaagcggcctctttttactctcttctccaacttgcctcactatccctcaacctctttctcctttcaatcttggcgctacacttcaatctctcccttctcttaatttcaattcctttcattttctggtagagacaaaagagacacgttttatccgtggacccaaaactccggcgctggtcacggactgggaaggcagccttcccttggtgtttaatcattgcagggaggcctgccttggtccttcacccttagcagcaagtcctgctttcctggggcaggggcaagatttaattaacctcgccttcaaggtgtacaataatagaaaaaagttgcaattcctggcctccactgtgagacaaaccccagccacatctccagcacacaagaacttccaaacgcctgaaccgcagcggccaggcgttcctccagaacctcctcccacaggagcttgctacaagtaccagaaatctgaccaccaggccaaggaatgcctgcagcccaggattcctcctaagccgtgtcccatctgtgcgggaccccactggaaattggactgttcaactcacctggcagccactcccagagcccctggaactctggcccaaggctctctgactgactccttctcggcttag

SEQ ID NO: 101 - DNA, 756 bp, Homo sapiens
atgggttcatggctacaaggactaagggctatggtttttgcactgaactacatggttaccagagttagaaacaaaaaagatccacctacaacctcaggtcctcagacccaccagcccaagaaacatctcaccaatttcaaatccgagacaaaggagacacgttttatctgtggacccaaaactccggcgccgctcatggactgggaaggcagccttcccttgatgtttaatcattgcagggacacctctctgattattcacccatgtttccaaggtgtcagaccatgcagggacgcctgccttagtccttcacccttagcggcaagtcccgcttttctggggaaggggcaagtacccctcaaccccttcttcacccttagtggcaagtcccgcttttctgggggaggagcaagtaccccaaccccttctttccatgtctctacgccttctctgcttttctggggaaggggcaagtacccctcaaccccttcttcacccttagtggcaagtcccgcttttctggggaaggggcaagtacccctcaaccccttcttcacccttagtggcaagtcccgcttttctggggaaggggcaaaagcccccgagaccatcacggatgccgagcttcgggtaactctcacagtggaggctgctgtatgttcaaccatcgccttaagcctagggtgggaaattcttcctcgacactggggtaaagaggaggtaaccaaaacaatttattatcctgtgattccataa

SEQ ID NO: 102 - DNA, 756 bp, Homo sapiens
  SIMILAR (67)..(186): 971254mologous to Homo sapiens calbindin D28K,accession number S46006,Smith-Waterman Score=213.
atgggggcaactcacccttttgagctgttgacaaagatgacttcccagggaagtgacatatcgggggacctcccttgggagatcaatcccctgtcctcctgttctttgctccatgagaaagatccacctacaacctcaggtcctcagaccgaccagcccaagaaacatctcaccaacttcaaatccgagacaaaggagacacattttatccgtggacccaaaactccagtgctggtcacggactgggagggcagacttcccttggtgtttaatcatagcagggatgcctctctgattattcacccacgtttcagaggtgtcagaccacgcagggatgcctgccttggtccttcacccttagcagcaagtcctgcttttctggaggaggggcaagtaccccaaccccttctctccatgtctcttaccccttctctgcttttctggaggagaggcaagaagccctcaaccccttcttcacccttagcagcaagtcccgcttttctggaggaagggcaagtaccccaacctcatatctctgtgccccgatcccttatttctacaccccaacctcttataactttgcaccccgacccctttcccgcttttctggaagacagtaaggaagtactcaagcaacaaccaaaagggagaataaaacactgtgctgatggaggtatgtccaaggagcccaagaaccaactgaaaggactcccagtgaccaaagctggaaacattcatggaataaacgacatttga

SEQ ID NO: 103 - DNA, 878 bp, Homo sapiens
  SIMILAR (299)..(418): 851254mologous to Homo sapiens Human secreted protein, SEQ ID NO: 5210,accession number AAG01129,Smith-Waterman Score=179.
atgtggattccaccacagtttatgacttgtaccttccagtgtggcaggtcgagctgcaccttggcccatttgagccatgactggggtagtcaagaaatgctgcactggaatatggggagcagaaaattgaagcagccctgggacgtcttggcactcagagcctgtgatgggaagggtggcactgactcagcccccctgcacccaggtgaaataaaaagctttattgctcacacaaagcctgtttggtggtctcttcacacggatgcgcatgaaatttggtgccgtgactcggatcggggggacctcccttgggagatcaatcccctgtcctcctgctctttgctccatgagaaagatccacctacgacctctggtcctcagaccaaccagcccaaggaacttctcaccaattttaaatcagtcccaactccaagcgttgctgagtctttccaatcttccttttctacggacccatctgacccctcctctcctccccaggctgctcctcgccaggccaagccaggtcccaattcttcctcagcctctgctccccgaccctataatccttttatcacctcccctcctcacacctggtcgggcttacagtttcattctgcgactagccctcctccacctgcccaacaatttcctcttaaaaaggtggctcaagttaaaggcacagtcaagtggctaaagactgatgctgcccgatcgcctcagaagcctacaggaaccatcacagatgctttagataactctcacagtggaggtccgataatggaccggcctttattagtcaaatcacccaagcagtttctcaggctcctggtattcagtaaaacctttatatcccttaccatcctcaatcttcaggaaag

SEQ ID NO: 104 - DNA, 1245 bp, Homo sapiens
  SIMILAR (827)..(789): 691254mologous to Homo sapiens calbindin D28K,accession number S46006,Smith-Waterman Score=42.
ctaagccaagaaggagtcagtcagagagccctgggccagagttccaggggctctgggagtggctgccaggtgagttgaacagtccaatttccagtggggtcccgcacagatgggacaaggcttaggaggaatcctgggctgcaggcattccttggcctggtggtcagatttctggcacttgtagcaagctcctgggggaggagattctggaggaacacctggccgctgcggttcaggcgtttggaagttcttgtgtgctggagatgtggctggggtttgtctcacagtggaggcaaggaattgcaacttttttctattattgtacaccttgaaggtgaggttaattaaatcccctcccccagaaaagcaggacttgccactaagggtgaaggcaaagggtttgggggtttcttgccccccagaaaggcaaagaaggggtagagacacggagagaaggggctggggtacttgccccttccccagaaaagcaggacttgctgctaagggtgcaggaccaacacagacgtcactgcgtggtctgacacctctgaaacctgggtgaataattagagaggtgtccctgcaatgattaaacaccaagggaaggctgccttccctagtctgtgactggcgccggagttttgggtccacagataaaacgtgtctcctttgtctcggatttgaaattggtgagatgtttcttgggctggtcagtctgagaacctgaggttgtaggtggatctttctcatggagcaaagagcaggaggacagggcattgatttcccaagggaggtcccccgatctgagtcattgcaccaaatttcatgcgtgtccgtgtgaagagaccaccaaacaggctttgtgtgagcaataaagctgtttatttcacctgggtgcaggtgggtgccctgtgccgacttggagcactgctccatgcatccctgctgctccagttccagccatggctcagagggccctaggtataactcaagccgctgccttgcagagctcaagccataagccttggcagcttccatgtggtatttatccctgaaggcacttggcattgaaagtggtagagtatctattacagcaatattgattaatatttcttcagcaagaaaagctgctgtgttccactggggagcaggattttggaatctttgatgttgagcactgtgagggctctgcgataaaagttgcaaggcttccgtgacagttgtgagatctgttgtggccctcat

SEQ ID NO: 105 - DNA, 686 bp, Homo sapiens
  SIMILAR (107)..(235): 811254mologous to Homo sapiens calbindin D28K,accession number S46006,Smith-Waterman Score=183.
cccgcctgcacccaggtgaaataaacagccatgttgctcacacaaagcctgttgtggtctttcacacggacgcgcatgaaatttggtgctgtgactcggatcgggggacctcccttgggagatcaatcccctgtcctcctgttctttgctccgtgagaaatatctacctacaacctcagatcctcagaccaaccagcccaaggaacatctcactaattttaaatcagacaaaggagacacgttttatctgtggacccaaaactccggcgccggtcacggactgggatggcagccttcccttggtgtttaatcattgcagggatgcctctctgattgttcacccacgtttcaaaggtgtcagagcacgcagggacgcctgccttggtccttcacccttagcggcaagtcctgcttttctggggaaggggcaagtacccctcaaccccttctccttcacccttagcggcaagtcccactttcctgggacaggggcaagaacttgttacaagtgccagaaatctgaccaccaggccaaggaatgcctgcggcccaggattcctcctaagccatgtcccatctgtgcgggaccccactggaaatcggactgttcaactcacctggcagccactcccagagcccctggaactctggcccaaggctctctgactgactccttctccgcttag

SEQ ID NO: 106 - DNA, 909 bp, Homo sapiens
  SIMILAR (384)..(503): 921254mologous to Homo sapiens calbindin D28K,accession number S46006,Smith-Waterman Score=205.
atggcatcatctgctcagcttctggggagctctcaggaaacttacaatcatagcaaaaggcaaagagggggtgagatgtctcacatggctggagctaggaggaagagagagagaggagagatgctacacacttttaaacaaccagatctcatgaggtggtcttcagtatgtcggaagaacaaagagaaggttggaaattccaggaaaagaagaaatgttagatattgtttctccagaaagttcaatggcactagtaaagttttcgagagctggcaagtggtggtggtgggtgaaataaacagccatgttgctcacacaaagcctgttcggtggtctcttcacacagacgcgcatgaaatttggtgccgtgactcagatcggcggacctcccttgggagatcaatcccctgtcctcctgttctttgctccatgagaaagatccacctacaagctcaggtcctcagaccgaccagcccaaggaacatctcaccaattttaaatcggagaaaaaggagacacgttttatccgtggacccaaaactccggcaccggtcatggactagggaaggcagccttcccttggtgtttaacctttgcagggatgcctctctgattattcacccaggtttcagaggtgtcagaccacgcagggacacctgccttggtccttcacccttagcagcaagtcccacttttctgggggaaggggcaagagcttgctacaagtgccagaaatctggccaccaggccaaggaatgcctgcagcccaggattcctcctaagctgtgtcccatctgtgcgggaccccgctggaaatcggactgtccaactcacctggcagccactcccaaagcccctggaactctggcccaaggttctctgactccttcccagatcttcttggcttag

SEQ ID NO: 107 - DNA, 1157 bp, Homo sapiens
  SIMILAR (472)..(510): 761254mologous to Homo sapiens calbindin D28K,accession number S46006,Smith-Waterman Score=45.
atgtgggaaagtttggaacttcctggaaacattttcaatggctttgaccaaaatgctgataatgatatggacgatgaaattcaggctgaggtcatctcagatggagatgaggaatttgttgggaactggaataagcctagagacttggtgccctgcatcctagccactctagccttgactaaaaggggacaagatacagctcagaccatggcttcagagggtgcaaggccaaagcattggcagcttccaggaggtgttgggcccgtgggtgctcagaaatcaagaattgaggtttgggaacctttgcctatatttcgcaggatgtatggaaaagcctgtatgtccaggcagaagtttgctgcaggggcagggttttcctggtatgttcctgtggcagttgttggagcaaaagttcacgatgtgaacctccatatgctgtcctttccatccaagtggaagctgcacacatgcatgaaatttggtgccgtgacttggatcaggggacctcccttgggagatcaatcccctgtcctcctgctctttgctccatgagaaagatccacctacaacctcaggtcctcagaccgaccagcccaagaaacatctcaccaatttcaaatccgagacaaaggagacacattttatccatggacccaaaactccggcgccggtcatggacttgggtaggcagccttcccttggtgtttaatcattgcagggacgcctctctgattattcacccaggtttcagaggtgtcagaccacgcagggacgtctgccttggtccttcacccttagcgaatttaattaacctcaccttcaaggtgtacaataatagaaaaaagttgcaattccttgccttcactgtgagacaaacctcagccatgtctccagcacacaagaacttccaaacgcctgaacctcagcggccaggcattcctccagaacctcctcccccaggagcttgctacaagtgccagaaatccggccaccaggccaaggaatgcctgcagcccaggattcctcctaagccacgtcccatctgtgcgggaccccactggaaattggactgtccaactcacctggcatccactcccagagcccctggaactctggcccaaggctctctgactgcttcccagatcttcttggcttag

SEQ ID NO: 108 - DNA, 1719 bp, Homo sapiens
  SIMILAR (1120)..(1260): 841254mologous to Homo sapiens calbindin D28K,accession number S46006,Smith-Waterman Score=210.
atgactaatgcagagcattataagcatagtctccatgcttatggagcatgggccattatggcccagtgggaaatggagaattgtaaacatgaagagggaacttttccagtaagctcggggagggagcggcagagagggggagaagttactagaacccaatgctgcaatggcccccagcatatcctaagagtgtccaggttcttcacagaacctgacggtcttaatatcattggtgattattctgggcctgctcaagcagccacacaactacctatgagttggatgctgttgcatttgggctacccggaaaggaaagagatgcccttgggcaaagcagctgtctatggcaagcacactctgaaggagctgacagctggaggcaagtccttccctccagaaagggcatttgggcagtgcatctcctgtcctaccactttcttcatctgcaaaatggggatcatgatagtaccagcttgcagggttaaatgttcttccacactgactctgggcctagccatgtgtcctgttttggtccatgtgacatcagctaacataacccaagcagagacttgctgcccattttctctgaatggtggcccagcacctggagggacagagtacaaaggactctggcatgttgaattcctcaagcaacctgctggtaagcatggactctatgatgcgccagcaacacgttttgctttatccaacacatgtcctgttaagtcacggactagtgtggtctatgggctggcagaggtgaaaagatctcccttttcatgtagcttgcccacctacttacagcgttgcatcacagggtcaagtgtttctcctccacttcacgcagctcgggagccctcttgtctggaaaggctcttccctgctggtgcctccaggctgggctggttgttgctcctctatgctcccgaggtcctcagtgcctgcctttatcagaacagaggccacagcgcaccttggttaaatgtacagtctctgggaccagactgcctggactcacaactctggctccgccatttacagcccacctgcacccaggtgaaacaaccagccatgttgctcacacaaagcctgtttggtggtctcttcacacagacgcgcatgaaatttggtggatcaggggacctcccttgggagatcaatcccctgtcctcctgctctttgctccatgagaaagctccacctaccacctcaggtcctcagactgaccagcccaagaaacatctcaccaatttcaaatccgagacaaaagagacacgttttatctgtggacccaaaactccggcaccggtcacggactgggaaggcagccttctcttggtgtttaatcattgcagggacacctctctgattatacacccacgtttcaagggtgtcagaccacgcagggacgcctgcctcagtccttcacccttagcggcaagtcccgcttttctggggaaggggcaagtaccccaaccccttctctccttgtctctaccccttccctgcttttccggggacagggagcttgctacaagtgccagaaatctatctgaccaccaggccaaggaatgcctgcagcccaggattcctcctaagccgtgtcccatctttgcgggaccccactggaaatcggactgttcaactcacctggcagacactcccagagcccctggaactctggcccaaggctttctgaccgactccttctcggcttag

SEQ ID NO: 109 - DNA, 1250 bp, Homo sapiens
  SIMILAR (846)..(1247): 951254mologous to Homo sapiens p40,accession number U93570,Smith-Waterman Score=659.
atgagtgaactcccattcacaattgcttcaaagagaataaaatacctaggaatccaacttacaagggatgtgaaggacctcttcaaggagaactacaaaccactgctcaatgaaattaaagaggacacaaacaaatggaagaacattccatgctcatgggtaggaagaatcaatatcgtgaaaatggccatactgcccaagagaagcttctctatgccttccacaatatctcccttaaacaatcctccagcttatctctgtctcagaactttcctaataatgaaaacaatgatggcagcaaagaagatgatgatggaggtgatgatgatgatgactgtcaggcctctgaggccaagccaaactcagcctgcctgcacccaggtgaaataaacagccatgttgctcacacaaagcctgtttggtggtctcttcacacggacacgcatgaaaatgacaatggtgatgttggtgatgataatgttgatgatgatgttgatgatgatggtggtgatgatggtaaagatgatggtgatgatgatgatggtgatacggtgatggtggtggtgatgatgatggtagtgatggtggtgatgacgataatgatgatggtgttgacggtggtgatgatagtggtgcccactcagaacaactttgtttgtcagtttggatgcttcaccttcgccaccttccaaagagagtctttgccaggctggcttcagtggctttgtaatgcagaattaagagaatgtatagaggaaagctgtcagtcactcctgctgctgaacagcaacactgtattggctccagctgctaagcctgagggtccagaggtggcttcccctcacctgcagaaaataaccaatacagagaagtgcttaaaggagctgatggagctgaaaaccaaggctcgagaactacgtgaagaatgcagaagcctcaggagccaatgcgatcaactggaagaaagggtatcagcgatggaagatgaaatgaatgaaatgaagcgagaagggaagtttagagaaaaaagaataaaaagaaatgagcaaagcctccaagaaatatgggattatgtgaaaagaccaaatctacgtctgattggtgtacctgaaagtgacagggagaatggaaccaagttggaaaacactctgcaggatattatccaggagaacttccccaatctagcaaggcaggccaacgttcagattcaggaaatacagagaacaccacaaagatactcctcgagatga

SEQ ID NO: 110 - DNA, 795 bp, Homo sapiens
  SIMILAR (695)..(793): 901254mologous to Homo sapiens CDC10 homolog=hCDC10,accession number S72008,Smith-Waterman Score=153.
  misc_feature (1)...(795): n = a,t,c or g
caggagaccgccactcacgcggagccaatcggaactcgcggcggggttgctgggtcttccaggatcgcgcattagcggacgctggctacgggtggccgggcgggatgtaaccggctgctgagctggcagttctgtgtccccaggcttcggcccggccgccgccgcacataaactgcgaggaggagctttacgacttcccggtcttcggggccgggcgcagcaagggccagactctgcgctagcaggcgctgcgcgccaaccggccggcccctgtcgcagaaggtgcaaccgatcgcactgtcgcgcagaagctcctcaatggccagcgccagctgcagccccggctgcccactcgcctcacctgagcctgggtggaacaatccaaagttttaatcaaagaaggtggtattcagttgctgcttacaatagttgataccccaggatttggagatgcagtggataatagtaattgctggcagcctgttatcaaatactttgacagcaaatctcaggacctacctaaatgcagaatcgcaagtgaacagatgtcagatgcctggtaacagggtgcnactgttgtttatacttcattgctccttcaggacatggaccgttacataactgaagactcccaccttcaggcaggattgggtagtacatgtttgtaacaacctggcattgccttttgttgagacttaaaccattggatattgagtttacaaagcatttgcatgaaaaagtgaatatcatcccacttattgccaaagcagacacactcatgccagaggaatgcca

SEQ ID NO: 111 - DNA, 376 bp, Homo sapiens
  misc_feature (1)...(376): n = a,t,c or g
naaaaaagagggaagacaaataactaaaataagaaaatgaggacattattacctacnnnnnnnnnnnnnnnnnnnnnnnnnnnnnnnnnnnnnnnnnnnnnnnnnnnnnnnnnnnnnnnnnnnnnnnnnnnnnnnnnnnnnnnnnnnnnnnnnnnnnnnnnnnnnnnnnnnnnnnnnnnnnnnnnnnnnnnnnnnnnnnnnnnnnnnnnnnnnnnnnnnnnnnnnnnnnnnttcccaacaacgaaaagcctaggatgagatagcttcaccagtgaattctgccaaacatttaaagcagaattaataccaatcctctcagtctcttccaaaaacttgaacagtatgtaacacttccttacccattctatgaggccag

SEQ ID NO: 112 - DNA, 1416 bp, Homo sapiens
  SIMILAR (67)..(690): 951254mologous to Bacillus amyloliquefaciens precursor (AA - 29 to 443),accession number X52988,Smith-Waterman Score=1073.
atggaagatcctggccccataacatctgtcttcttgcctcttcctcattatgctttgaagggacaagaaacaacgattaaaaatattgagtctgcaaaaggacttgatgtgtgggacagctggccgctgcaaaacgctgacggaacagtagctgaatacaacggctatcacgttgtgtttgctcttgcgggaagcccgaaagacgctgatgacacatcaatctacatgttttatcaaaaggtcggcgacaactcaatcgacagctggaataacgcgggccgtgtctttaaagacagcgataagttcgacgccaacgatccgatcgtgaaagatcagacgcaagaatggtccggttctgcaacctttacatgtgacggaaaaatccgtttattttacactgactattccggtaaacattacggcaaacaaagcctgacagcagcgcaggtaaatgtgtcaaaatctgatgacacactcaaaatcaacggagtggaagatcacaaaacgatttttgacggagacggaaaaacatatcagaacgttcagcagtttatcgatgaaggcaattatacatccggcgacaaccatacgctgagagaccctcactacgttgaagacaaaggccataaataccttgtatttgaagccaacacgggaacagaaaacggataccaagactcagcccacctgcacccaggtgaaataaacagccatgttgctcacacaaagcctgtttggtggtctcttcacatggacgcgcatgaaatttggtgccgtgactcggatcgggggacctcccttgggagatcaatcccccgtcctcctgctctttgctccgtgagaaagatccacttacaacctcaggtcctcagaccaaccagcccaagaaacatctcaccaatttcaaatccaggattttgccgatttcggaaccaccatcaaacaggattttcgcctgctggggcaaaccagcgtggaccgcttgctgcaactctctcagggccaggcggtgaagggcaatcagctgttgcccgtctcactggtgaaaagaaaaaccaccctggcgcccaatacgcaaaccgcctctccccgcgcgttggccgattcattaatgcagctggcacgacaggtttcccgactggaaagcgggcagtgagcgcaacgcaattaatggattttgccgatttcggaaccaccaccaaacaggattttcgcctgctggggcaaaccagcgtggaccgcttgctgcaactctctcagggccaggcggtgaagggcaatcagctgttgcccgtctcactggtgaaaagaaaaaccaccctggcgcccaatacgcaaaccgcctctccccgcgcgttggccgattcattaatgcagctggcacgacaggtttcccgactggaaagcgggcagtga

SEQ ID NO: 113 - DNA, 1826 bp, Homo sapiens
  SIMILAR (282)..(419): 891254mologous to HERV-H/env59 envelope protein,accession number AJ289711,Smith-Waterman Score=215.
tccatcacactatcaatctcactgactctctcctagccgtttctaatccttctttaacaaataattgctggctttgcaattctctttcctccaaaatcgccaaggcctcaatttactcattgctgaaaaaggacgactctgtatatttttaaatgaagagtgttgtttttacctaaatcaatctggcctggtatatgacaacataaaaaaactcaaggatagagtccaaaaacttgccaaccaagcaaataattatgctgaacccccttgggcactctcttaattggatgtcctgggtcctcccaattcttagtcctttaatacctgtttttctccttctcttattcggactgtgtgtcttctgtttagtttctcaattcatacaaaaccgtattcaggccatcaccaataattctatatgacaaatgctccttctaacaaccccacagtatcagcccttaccccaaaatctttcttcagtmgaatctctcccactgtaggttcccaggccgcccctaatcccgctcgaagcagccctgagaaacatcgcccattatctctccatatcacccccacaaattttcgccaccccaacactttaccactattttgttttatttttcttattaacataagaagacaggaatgtcaggcctctgagcccaagctaagccatcatatcccctgtgacctgcacatacacatccacatggccggttcctgccttaactgatgacattccaccacaaaagaagtgaaaatggcctgttcctgccttaactgttgacattatcttgtgaaattccttctcctagctcatcctggctcaaaagctcccctactgagcaccttgtgacccctactcctgcccgccagagaacaacccccctttttcctttacctacccaaatcctataaaacagccccacccttatctcccttcactgactttcttttcggactcagcccacctgcacccaggtgaaataaacagctttattgctcacacaaagcctgtttggtggtctcttcacacagacacgcatgaaatttggtgctgtgactcggatcgggggaccacccttgggagatcaatcccctgtcctcctgttctttgttccaagagaaagatccacctacgaccttggtcctcagaccgaccagcccaagaaacatctcaccaatttcaaatccacctcctttgtgttctcctcttgtattcccccaccttaaccctcaagtatatctctactccctccttggcgaccgatcatgcaccccttaccatctcattaaaacctaatcacccttaccctgctcaatgccaatatcccatcccacagcatgctttgaaaggattaaagcctgctatcactcgcctgctacagcatggccttttaaagcctataaactctccttacaattcccccattttacctgtcctagaaccagagaagatttacaggttagttcaggatctgcgccttatcaaccaaattgttttgcctatccaccccgtggtgccaaacccatatactctcctatcctcaatacctccctccacaatccattattctgttctggatctcaaacgtgctttctttactattcctttgtacccttcatcccagcctctcttcgctttcacttggactgaccctgacacccttcaggctcagcaaattacctgggctgtactgccgcaaagcttcacagacagcccccattacttcagtcaagcccaaatttcttccttatctgttacctatctcagcataattctcataaaaacacacacgctctccctgctgatcatgtccgattaa

SEQ ID NO: 114 - DNA, 2391 bp, Homo sapiens
  SIMILAR (831)..(911): 701254mologous to Homo sapiens putative p150,accession number U93563,Smith-Waterman Score=103.
  misc_feature (1)...(2391): n = a,t,c or g
atggggagaaagcagagcagaaaagttgaaaattctgaaaatcagagctcctcttctcctccaaaggaacacagctcctcaccagcaatggaacaaagctggatggagaataactttgatgagctgacagaagtaggcttcagaagattgaactcaggattaagaaactcactcaaaaaccggacaactacatggaaactgaacaatctgctcctgaatgattactggataaatagcgaaaagaaggcagaaataaagatattctttgaaaccaatgagaacaaagacacaacataccagaatctctgggacacatttaaagcagtgtgtagagggaaatttatagcactaaatgcccacaagagaaagcaggaaagatctaaaattgacaccctaacatcacaattaaaagaactggagaagcaagagcaaacacatttaaaagttagcagaaggcaagaaataactaagatcagagcagaactgaaggacttagagacacacaaaaacattcaaaaaatcaatgaatcgaggagctggttttttgaaaagatcaacaaaattgatagaatgctagcaagattaacaaagaagaaaagagagaagaatcaaatagatgcaataaaaaatgataaaagggatatcaccactgatcccacagaaatacgaactaacatcagagaatactataaacacctctatgcaaataaactagaaaatctagaagaaatggataaattcctggatgcatacatcctcccaagactaaaccaggaagaagttgaatctctgaatagaccaataacaggctctgaaattgaggcaataataatagcctaccaaccaaaaaaagtccaggaccagatggactcacaatcaaattttaccagagaaaccatcaaactctcctccaaagtggctgtacaactttttgcgcccccaccaacgatgaatgggagctcctgttactccacatcctcatcagcacttggtgttgtcattgttcagaatttgggccactctaatagtgaggacattgtgcgctccctctgcctgccagacttccctgagccagctgacctcttctggaagtacctggacttggccaccttcatcctgctctacatcctgcccctcctcatcatctctgtggcctacgctcgtgtggccaagaaactgtggctgtgtaatatgattggcgatgtgaccacagagcagtactttgnnctgcggcgcaaaaagaagaagaccatcaagatgttgatgctggtggtagtcctctttgccctctgctggttccccctcaactgctacgtcctcctcctgtccagcaaggtcatccgcaccaacaatgccctctactttgccttccactggtttgccatgagcagcacctgctataaccccttcatatactgctggctgaacgagaacttcaggattgagctaaaggcattactgagcatgtgtcaaagacctcccaagcctcaggaggacaggccaccctccccagttccttccttcagggtggcctggacagagaagaatgatggccagagggctccccttgccaataacctcctgcccacctcccaactccagtctgggaagacagacctgtcatctgtggaacccattgtgacgatgaaaacactgggaggcacagcagcctgtatctctgaggaagaggagcgaggacaacgttggcccagatgggggctgaatcattcaactgcctccatctgtggggcagctgctgccttacagcccttcctactgctgagcatccctaagggagacctaaatcatactttgggtgtggtgacccagatgcacagagctctgcttgaaacagacaataaaatacctaggaatccaacttacaagggatgtgaaggacctcttcaaggagaactacaaaccactgctcaacaaaataaaagaggacaaaaacaaacggaagaacattccatgctcgtggggaggaagaatgaatatcgtgaaaatggccatactgcccaaggagagacaaataccaaggagatatcaggaagaatattgtccccagtaaataccaagtcacatcaggaagaatattgtggagagagaggtaaagaatcaggatggaaacagaaaataggccgaacaatggccaagcgtcaaaatcctacgtcaggagcttgctacaagtgccagaaatctggccaccaggccaaggaatgcccgcagcccaggattcctcctaagctgtgtcccatctgtgtgggaccctactggaaatcagactgttcagctcacctggcagccactcccagagcccctggaactctggcccaaggctctctgactgaccccttcccagatgttctcggcttagcagctgaagactga

SEQ ID NO: 115 - DNA, 1150 bp, Homo sapiens
  SIMILAR (647)..(1066): 531254mologous to Sus scrofa polyprotein,accession number U77599,Smith-Waterman Score=408.
atgcctatcaaaatcactgctgcctgttttagaaaaactgacaagctgattccaaaattcatgtggaaatgcaagggacccagaataaccaaaacaatcttggaaaagaatgaagttggagaatttacacttcttgatttcaaaacttaccacaaatttgcagtaatcaaaactatgtggtactggcataaggacagatacattgatcaacagaatgacattgaaagtccagaaataaattcatatgtttatggtcaactgatttttgacaaagactcagcccgcctgcacccaggtgaaataaacagtcttgttgctcacacaaagcctgtttggtggtctcttcatatggacgcgcatgaaatttggtgccgtgactcggattgggggacctcccttgggagatcaatcccctgtcctcctgctctttgctctagagagacaaaggagacacgttttatccatggacccaaaactccggtgctggtcacggactgggaaggcagccttcccttggtgtttaatcattgcagagatgcctgattattcacccacgtttcaaaggtgtcagaccacgcagggacgcctgccttggtccttcacccttagcagcaagtcccgcttttctggggaaggggcaactcaacgccaatatcccatcccacagcaagctttgaaaggattaatgcctgctatcactcgcctgctacagcatggccttttaaagcctataaactctccttaccattcccccattttacctgtcctaaaaccagacaagccttacaagttagttcaggatctgcgccttatcaaccaaattgttttgcctatccaccccatggtgccaaacccatatactcttctatcctcaatacctgcctctacaacccattattctgttctagatctcaaacaagctttctttactattcctttgcacccttcatcccagcctctcttcgcattcacttggactgaccctgacacccatcaagctcagcaaattacctgggctgtactgccacaagccttcacagatagcccccattacttcagtcaagcccaaatttcatcctcatctgttacctatctcggcataattctcataaaaacacacgtgctctccctgctgttcgtgtttgactaa

SEQ ID NO: 116 - DNA, 3182 bp, Homo sapiens
  SIMILAR (1692)..(2075): 431254mologous to Homo sapiens gag,accession number AF156961,Smith-Waterman Score=268.
atgcgcggagcgaggcccgtgagtggcagcggcggcgcgcggggggcgggcgaggggccgagagtgggggagcgggcgggggccgtcgaggaggcgttgtgtgggcgcgacggctgcgagttggggaggatgtcgtcggaggagaacaagtgcgtggagcagccgcagccaccaccccccgaggagcctggagccccggccccgagccccccagccgcagacaaaagacctcggggccggcctcgcaaggcgcttcccctttccagagagccagaaagaatcgggccttttcagtgggtcttctccgcgactcttcttttggagaaatttctcgtagccgcgtcttggcctagctggatcattgagaaaacaagcccggagcgcgcgcaggtagtccccggacggactccgagcgaaccgccgagccggctggacaccggcttattagaggaccagaaatgtcttcttacagaacggttatttgacggctttgcttgtaaattaagacaccgttttagtgccagcgagctgctcggcttctgtggctctcgcgtgtgccgtggaagaactgtgaatgtctttcgaagttgtagaatggcgaatgttcaacgctccaagccccataggctgattcaagaagataaagtgagactcaaggaatttcgaagtggaacaatacaccaaagccttaaacctgaaatgactctccttttctgggggaatcccaaaatgtgggttccaacccgggccctgaatgtcttctcaaatccccgggacccaggttccgacgcgccctctgcccggccggtgtggaccgtcccggccattgtttacgggggatgcccgtccagacgcattgttttggccgtttccaacttgccccggccctttccggggcatcgcgggggaccctacaccgacgtcccccctccgcccgcgccccaagggctgactgggcaaattggcagatccgccccgcggggcgacccaacttttcggaacagccccccaccgcccacccctgcagatccccggacccccgctcccggcggagattcagggaaccccgcatcccaagcccttctaaatcactcagcccacctgcacccaggtgaaataaacagctttattgctcacacgaagcctgtttggtggtctcttcacacggatgcgcatgaaatttggtgctgaagacccaggacaggaggacctcctttgggagaccaatcccctgtcctcctgctctttgctccgtgacaaagatccacctacgacctcaagtcctcagacccaccagcccaagaaacatctcaccaatttcaaatctgggacgcctctctgattatacactcacgtttcaagggtgtcagaccacgcagggacgcctgccttggtccttcacccttagcggcaagtcccgctttcctggggcaggggcaagtacccctcaaccccttctccttcaccctcagcggcaagtcccgcttttctggggcaggggcaagtacccctcaaccccttccccttcacacttagtggcaagtcccgctttcctggggcaggggcaagtacccctcaacgccttctccttcacccttagtggcaagtcccgcttttctagggggcaagaacccccaaaccccttccatctgtgtctctacgctctcttctgtgggtttgcttccttcactatgggcaaccttccaccctccattcctccttcttctcccttagcctgtgtgctcaaaaagttaaaacctcttcaactcacacctgacctaaaacctaaatgccttattttcttctgcaacaccgcaaccgcttggccccaatacaaacttgacaatgtctctaaatggccggaaaatggcactttcgatttctccatcctacaagacctaaataatttttgtcgaaaaatgggcaaatggtctgaggtgccttacgtccaggcatttttcacacttcgttccctccctagtctctgttcccaatgcgattcctcccagatcctcctcctttccctcccgcctgtcccctcggtcccaaccccaagcgtcgctgagtcttcccagtcttccttttctacagacccatctgacctttcccctcctccccaagctgcttgtcgccagaccgagctaagtcccaatacttcctcagcctccactcctccaccctataatccttctatcacctcccctcctcacacctggtccggcttacagtttagttccgcgactagcgcttccccacctgcccaacaatttcctcttagagaagtggctggagctgaaggcatagtcaagatgaacgggaaagttttttctctagcccaatctcgtgctgataaccgccggcttcatgagccagacctccaggaaggcattagagcagttccccgagaggatccccaatggaactatcaggcagattccccaggtacagctaggcgagattacatggtttcctgcctagttgaagggcttaaaaaagcagcttacaaagctgttaattatgacaagcttaaagaaactacccgaggtaaagacgaaaacccagcccagacccagaggggccagaaggccgccttattcttaatatgcatttttatcacccaatccactcctgacattaggaaaaaacttcaaaaattagaatctggccttcaaacccagcaggaattaatcaaccttgccttcaaggtgtacaataatagagaggaagcagccagacggcaacgcatttcggagttacaattacttgcctctgctgtgagacaaaacccagccacacctcctgcatacaggaacttcaaaatgcctgaactgcagcggccaggccttcctccagaacctcctcctccaggagcttgctacaagtgccagaaatctggccaccaggccagggaattcctgcagcccaggattcctcctaagccacgtcccatctgtgccggaccccactggaaatcggactgttcagctcacctggcagccactcccagagcccctggaactctggcccaaggtgttatcacgagttatggattatatctagatggtatattaatccacaattcctcagaactcagctatcgtgcttacggatttgctccttggagtttacattccttcagagtccaagcatgcacggccaaaggttgtgctctgggcccactg

SEQ ID NO: 117 - DNA, 4922 bp, Homo sapiens
  SIMILAR (4747)..(4914): 251254mologous to Phascolarctos cinereus pol protein,accession number AF151794,Smith-Waterman Score=67.
atgtggaaaggccccaaaggattagacatgtatggaaagagctcagtgagccctaagacatcagatatactggggagagacactctcctgctggccttgaaggtgcaaacagtggtgttgcaaactgcctgtggagagggccatgtggcaggaaactgtgggaggcctctagaaactgaaggcagtctccagctgacagctactaagaagctaagggactcagtcctgcaaccaaaaagtcctgaattctgccaacaatttacaagagcttggaataggacccaagttccagatgagactgaagccccagctggcacctatgcagcccaatcgggggacctcccttgggagatcaatcccctgtcctcctgttctttgctccatgagaaagatccacctacggcctcaggtcctcagaccgaccagcccaaggaacatctcaccaattttaaatcgggtttcagaggtgtcagaccacgcagggacgcctgccttggtccttcacccttagcggcaagtcccgcttttctggggaaggggcaagtaccccaaccccttctctctgtgtctctaccccttctccgcctttctggggggcaagaaacacccaaccccttctccttcaccctgagtggcaagtccgcttttctagaggagcaagtaccccaacctcgtatctctgtgccccagtcccttatttccacgccccgacctcttatctctgtggcccaatcccttatttctgcaccccaacctcttatatctctgtgccccaatcccttatttccatgccccgacctcttatctctgcaccccaaccccttatttccacgacccaacccctttcccgcttttctggaaggagcttgctacaagtgccagaaatctggccaccaggccaaggaatgcctgcagcccgggattcctcctaagctgcgtcccatctgtgcgggaccccactggaaatcggactgtccaactcacctggcagccactcccagagcccctggaactctggcccaaggctctctgactgcttcccagatcttcttggcttagcggctgaagactgacactgcccgatcacctcggaagccccctagaccatcacggatgctgagcttcgggtaactcgcacagtggaggacaggaatgtcaggcctctgagtccaagctaagccatcatatcccagtgacctgcacgtatacatccagatggcctgaagcaactgaagatccacagaagtgaaaacagccttaactgaagacattccaccattgtgatttgtttctgccccaccctaactgatcaatgtactttgtaatctcccccacccttaagaaggttctttataatgtcacccacccttaagaagtttctttgtaattctccccacccttgagaatgtactttgtgagatccatcccctgcccccaaaacattgctcttaactctactgcctatcccaaaacctataagaaccagtgataatcacaccaccctttgttgactcctttttcggactcagcccgcctgcacccaggtgaaataaacagccatgttgctcacacaaagcatgtttggtggtctcttcacacagacgcgcatgaaatttggtgccgtgactccgatcgggggacctcccttgggagatcaatcccctgtcctcctgctctttgctccatgagaaagatccacctacgacctcaggtcctcagactgaccagcccaagaaacatctcaccaatttcaaatccgatagcgtttaggctctttttcatcaaatataaaaacccagcccagttcatgtctcattcggcagcaaccctgcgacgctttacagccctagaccctaaaagactgacgctgcccggtcgcctcggaagccccgtagaccatcagggacgccgagctttgggtaactctcacagtggaaggaaatcccctttccttaaagttcactgttcacaggaatctgctattcgtgcttcatttctccactcccacagactagcccagtgttccagcccacctcttgggtatatagtctcaggccagttttcaaccgacattgttttcacaataaagcagttgatttcatataacatctgtcgctatggtgacaataggagagtgataactggaaaagctaatagggcttttctaacttccctcctggaatatgtagctgatgtggaagcaacagcaaggcgatcagtaaagggagaggagaccagtctcctgtcctcctgttctttgatccgtgagaaagatcgccctatgacctcaggtcctcagaccaaccagcccaagaaacatctcaccaatttcaaatccgggagagacaaaggagacacgttttatccgtggacccaaaactccggcgccggtcacggactgggaaggcagccttcccttggtgtttaatcattgcagggacgcctctctgattatacacccacgtttcaagggtgtcagaccacgcagggatgcctgccttggtccttcacccttagcggcaagtcccgattttctgaggaagggacaagtacccctcaaccccttctctccttgtctctaccccttctctgcttttctggggcaggggcaagaacccctcaaccctttctccttcacccttagcggcaagtcccgctttcctggggcaggggcaaagggggatgtgtcagggtcacaagacaattgtggggagagggtcagccgacaaacacgtgaacaaaggtctttgcatcatagacaagactcagcccacctgcacccaggtgaaataaacagccatgttgctcacacaaagcctgtttggtggtctcttcacacggatgtgcatgaaatttggtgccgagactcggattgggggggggacctcccttgggagatcaatcccctatcctcctgtgttctttgctccgtgagaaagatccacctacgacctcaggtcctcagaccgaccagcccaaggaacatctcaccaattttaaattggtggctgaagactgatgctgcccgattgcctcggaagccccctagaccatcactgatgccagcttcacgtaactttcacagtggaggactacagccccatctcattgtcgcccttctccccaacccaaagcctccttcgtgtcttcctctcgtatccccccaccttaacccacaagtatgggacatctctaatccttccctggcaaccgatcacatgcccattaccatcccattaaaacctaatcacccttacccggctcaatgccaatatcgtatcccacagcacactttaaaaggattaaagcctgttatcactcccctgctacagcattgtcttctaaaacctataaactctccttacaattcccccattttacctgtccaaaaaccagacaaatcttacagattagttcaggatctgcgccttatcaaccaaattgttttgcctatccaccctgtggtgcccaaaccatacactcttttgtcctcaataccttcctccataactcactattctgttcttgatcttaaagatgcttttttcactattcccctgcacccctcatcccagcctctctttgctttcacctggactgaccctgacacccatcagtcccagcagcttacctgggctgtgctgccgcaaggtttcagggacagtcctctttacttcagccaagctctttctcatgatttactttctttccacccctccgcttctcaccttattcaatatattcatgaccttcttctttgtagtccctcctttgaatcttctcaacaagacacacttctgctccttcagcatttattctccaaaggatatcaggtatccccctccaaagctcaaatttcttctccatctgttacctacctcggcataattcttcataaaaacacacgttctctccctgccgatcgtgttcaactaatctctcaaaccccaaccccttctacaaaacaacaactcctttccttcctgggcatggttggatactttcgcctttggatacctggttttgcattcctaacaaaaccattatataaactcacaaaaggaaacctagctgaccctatagatcctaaatcctttccccactcctctttccattccttgaagacagctttagagactgcccccactctagctctccctgactcatcccaacccttttcattacacacagccgaagtgcagggctgtgcagttggaattcttacacaaggaccaggatggcatcctgtagcctttttgtccaaacaacttgaccttactgttttaggctggccatcatgtctccgtgcagcagctgctgctgccctaatacttttagaggccctcaaaatcacaaactatgctcaacgtactctctacattgctcataacttccaaaatctattttctgcctcattcctgaggcatatactttctgctccccagctccttcagctgtactcactctttgttgagtctcccacaattaccaatgttcctggcccagacttcaatccggcctcccacattattcctgataccacacctgaccctcatgactgcatctctctgatccacctgacgttcaccccatttccccacatttccttcttccctgtttctcaccctgatcacacttggtttattgatggcagttccaccaggcctaatcgccacacaccagcaaaggcaggctatgctatagtacaagccaatagcccgcctcttagaacctctcatatcctttccatcgtggaaatgtatcctcaaggaaataacttctcagtgttccatctgctattctactactcctcagggattattcaggccccctcccttccctacacatcaagctcagggatttgccaccgcctaggactggcaaatcagcgttactcaacatgccccgagtcaggaaactaa

SEQ ID NO: 118 - DNA, 761 bp, Homo sapiens
  SIMILAR (94)..(759): 961254mologous to Homo sapiens DNA polymerase mu,accession number AJ131891,Smith-Waterman Score=1099.
cacccgcttccgtcagcctcactggggcttccttccgtctcgctcggagtttccctctgcgttcgctccgcgctgctggaggctgtcgtcccaatgctccccaaacggcggcgagcgcgggtcgggtcccctagcggcgatgccgcttcctccacgccgccctcgacgcgcttcccgggagtcgccatctacctggtcgagcctcgcatgggtcgcagccgccgggccttcctcacaggcctggcgcgctccaaaggcttccgcgtccttgacgcctgcagctccgaagcgacacatgttgtgatggaagagacctcagcagaggaggccgtcagctggcaggagcgcaggatggcagctgctcccccgggttgcacccccccagctctgctggacataagctggttaacagagagcctgggagctgggcagcctgtacctgtggagtgccggcaccgcctggaggtggctgggccaaggaaggggcctctgagcccagcatggatgcctgcctatgcctgccagcgccctacgcccctcacacaccacaacactgtgctcttcgggccctccctgcaggaggctctggagatactggccgaggcagcaggctttgaaggcagtgagggccgcctcctcaccttctgcagagcagcctcggtgctcaaggcccttcccagccctgtcacaaccctgagccagctgcaggggcttccccactttggagaacactcctctagggttgtccaggagctgctgga

SEQ ID NO: 119 - DNA, 972 bp, Homo sapiens
  SIMILAR (4)..(924): 971254mologous to Homo sapiens serine hydroxymethyltransferase,accession number L23928,Smith-Waterman Score=1520.
atggtgaacccagatactggctacatcaactatgaccagctggaggagaacgcacgcctcttccacccgaagctgatcatcgcaggaaccagctgctactcccgaaacctggaatatgcccggctacggaagattgcagatgagaacggggcgtatctcatggcggacatggctcacatcagcgggctggtggcggctggcgtggtgccctccccatttgaacactgccatgtggtgaccaccaccactcacaagaccctgcgaggctgccgagctggcatgatcttctacaggaaaggagtgaaaagtgtggatcccaagactggcaaagagattctgtacaacctggagtctcttatcaattctgctgtgttccctggcctgcagggaggtccccacaaccacgccattgctggggttgctgtggcactgaagcaagctatgactctggaatttaaagtttatcaacaccaggtggtggccaactgcagggctctgtctgaggccctgacggagctgggctacaaaatagtcacaggtggttctgacaaccatttgatccttgtggatctccgttccaaaggcacagatggtggaagggctgagaaggtgctagaagcctgttctattgcctgcaacaagaacacctgtccaggtgacagaagcgctctgcggcccagtggactgcggctggggaccccagcactgacgtcccgtggacttttggaaaaagacttccaaaaagtagcccactttattcacagagggatagagctgaccctgcagatccagagcgacactggtgtcagagccaccctgaaagagttcaaggagagactggcaggggataagtaccaggcggccgtgcaggctctccgggaggagagaggaaatgcccatgtccacagcttgtacacactgccccctcactatcttgttatccagtggcatgccaaaggagaactgaattag

SEQ ID NO: 120 - DNA, 2175 bp, Homo sapiens
  SIMILAR (4)..(399): 811254mologous to Homo sapiens serine hydroxymethyltransferase,accession number L23928,Smith-Waterman Score=540.
atggtgaacccagatactggctacatcaactatgaccagctggaggagaacgcacgcctcttccacccgaagctgatcatcgcaggaaccagctgctactcccgaaacctggaatatgcccggctacggaagattgcagatgagaacggggcgtatctcatggcggacatggctcacatcagcgggctggtggcggctggcgtggtgccctccccatttgaacactgccatgtggtgaccaccaccactcacaagaccctgcgaggctgccgagctggcatgatcttctacaggaaaggtggtatggctcctctcgggaccgcaacactcctccaggctcttttcagccttttattcctctcgaagtctcgggacgttccgggcaccggcgcggacccaggagtcatgtatgtcaagaggcggccccgcggaacagattccggttgtggcgtcttagaaccccggcggtttctgccctcgggcatggccttcaccaaagaggaagagtatgaagaagagccttacaatgagccggccctgcctgaggagtactcggtgccgctcttccccttcgccagtcagggtgctaacccctggtcaaaactgtccggggccaagttttcgagggacttcattcttatttccgagttctctgagcaggtgggaccccaacccttactgaccatccccaatgacaccaaagtttttggcacttttgatctcaattacttctccctgcgtatcatgtctgtggattaccaggcttccttcgtgggccatcctcctggatctgcctaccccaagctgaacttcgtggaggactccaaggtggtgctgggagattctaaggagggcgcctttgcatacgtgcaccaccttaccctatacgacctggaggcccgtggcttcgtgaggccgttttgcatggcttatatctctgcagaccagcataaaatcatgcagcagttccaggagctttcagccgaattttccagagcttctgagtgcttgaagactggcaacaggaaggcatttgctggggaacttgaaaaaaagctgaaagacttggattacaccaggacagtgctacacacagaaacggagatccagaagaaagccaacgacaaaggcttttactcatctcaggcaattgagaaagccaatgaactggccagtgtggagaagtccatcattgaacatcaagacctgctgaagcagatccgctcataccctcatcggaagttgaaggggcatgatttgtgtcctggtgagatggagcacatccaggatcaggccagccaggcatccactacctctaaccctgatgagtctgccgacacagacctttacacctgcagaccagcctacaccccaaaacttatcaaagcaaagtccaccaagtgttttgacaagaagttgaagaccttggaggagctctgtgacactgaatatttcacccagaccctggctcagctcagccacattgaacacatgttcagaggagacctgtgttacctcctgaccagtcagattgatagagcacttctaaaacaacagcatataacaaactttctctttgaagactttgtggaggtcgatgacaggatggtggagaaacaagaaagcataccctctaagcccagtcaagacaggccgccttccagttctctagaagaatgcccaattcctaaagtgttaattagtgttggttcttacaagtccagtgtggagtctgtgttgatcaagatggagcaggaactgggagatgaggagtacaaggaagtggaagtgactgagttgagcagtttcgacccccaggaaaacttggactacctggatatggatatgaaagggagtatcagcagtggtgaaagtattgaaggtttgggcacggagaaatccacctccgtgctttctaaatctgacagccaggcaagccttacagtaccattgagcccccaggtggtccggagcaaagcagcacttctgcagccccatcccaaccccacgcaccgactccggagctctagcatggaatataagcctgatcccccacaccggttctcagaaccgtggcctaacctggagcctgaggccaacctctcttcccctgcagtcaaggactcagtgaccaaggagctgcaaacagcccggccaagcagggagcagacttag

SEQ ID NO: 121 - DNA, 1851 bp, Homo sapiens
  SIMILAR (443)..(961): 971254mologous to Homo sapiens serine hydroxymethyltransferase,accession number L23928,Smith-Waterman Score=855.
  misc_feature (1)...(1851): n = a,t,c or g
ggacatcattcctcttgtcatggtgaacccagatactggctacatcaactatgaccagctggaggagaacgcacgcctcttccacccgaagctgatcatcgcaggaaccagctgctactcccgaaacctgggaatatgcccggctacggaaagattgcagatgagaacggggcgtatctcatggcggacatggctcacatcagcgggctggtggcggctggcgtggtgccctccccatttgaacactgccatgtggtgaccaccaccactcacaagaccctgcgaggctgccgagctggcatgatcttctacaaggaaaggagtgaaaaagtgtgggatncccaagacttggcaaagagattctgtacaacctggagtctcttatcaattctgctgtgttccctggcctgcagggaggtccccacaaccacgccaattgctggggttgctgtggcacttgaagcaagctatgactctggaatttaaagtttatcaacaccaggttgtagccaactgcagggctctgtctgaggccctgacggagctgggctacaaaatagtcacaggtggttctgacaaccatttgatccttgtggatctccgttccaaaggcacagatggtggaagggctgagaaggtgctagaagcctgttctattgcctgcaacaagaacacctgtccaggtgacagaagcgctctgcggcccagtggactgcggctggggaccccagcactgacgtcccgtggacttttggaaaaagacttccaaaaagtagcccactttattcacagagggatagagctgaccctgcagatccagagcgacactggtgtcagagccaccctgaaagagttcaaggagagactggcaggggataagtaccaggcggccgtgcaggctctccgggaggaggttgagagcttcgcctctctcttccctctgcctggcctgcctgacttctaaaggagcgggcccactctggacccacctggcgccacagaggaagctgcctgccggaggacccccacctggagagatggatgagctcgtccaaaggggaactgttgacactcgggccctttgagggggtttcttttggacttttttcatgttttcttcacaaatcaaaatttgtttaagtctcattgttagtaattctgggacaggttattaaaggatttaaatttgaacctggctttctcacagctggacataattctaggaaaataaaatactatgtcgccacttggtcataatcatttagatggtggtgtagggcaaagctgttagaaagattgtagcgttttactctccctgggctttccttccgccttgctgcaacagagaggaaatgcccatgtccacagcttgtacacactgccccctcactatcttgttatccagtggcatgccaaaggagaactgaattagcttctgaggcttctgctgtaaatcagaagtgtatgttagtcaagagtaaacaagatgcaccagtatggtgggagggttgctgtcagtagctcaaagtatggtgtagaaatggcctcctccctccatcctgggaagtcccagtcccatcctggtgtgagaatcaaccaggctttcctgctccacctgagataaccaactccctcccgtaatcaggaagccaaatgtcaccttcccaaagaaattttattttcacgtagctgaagtgcaaaacatagatgaccatttttaataagcacaatcaaatttttaaccacagaatgtctacaagaattatagctttaaaaaatacaaccaatttttatatttcaaaaatatttgaactcaaataaattaatttcttaaaaagtaaaaaaaaaaaa

SEQ ID NO: 122 - DNA, 909 bp, Homo sapiens
  SIMILAR (736)..(906): 561254mologous to Homo sapiens Human secreted protein, SEQ ID NO: 7867,accession number AAG03786,Smith-Waterman Score=138.
attggtggctagagggctgttgttgattaaggtacattaatggatccatttcctccctgtatccaagactctgccatttggctctgcagtgcctcccgctgaagaatcggagtatatttctccagcccctaatgttgggtttagtcatgtgtctagctttggccactggaatattaatctgcatgaccaaaaacttggaaagtatgcattcatttgtgctcactcactcctgctgtcaccatgagaacaagcccaggccagcctgctgcttccagcagaagataagagacaccaagagcaaagtcgagcttcccagacatgctcatgctagattaaccaatcctcagctgacccatagctccatgaaaataaatgactgttgtattaagccactgagatttggagtgacatgttatacagcattttgtgacaataactaactgatacaagggtcaccatcctttatctctgtagatttttgccaatttttaatagctagatggagatcttctagttgcctttatttataatgaatatgactgtagagctagtttggcctgacactaccagtaacctacccagaaattcagaaatactttcttctccaacccgccccaaccaactttttgtttgtttgtttttgggttctccctctttgcctaggctagagtacaaatggtacagtcagagctcactgtagcctcaaaatcctgggctcaagtgatcttccccttcagcctcctatgtagctaagactacagacatgtgccaccatgcctggctaatttttttattcttgcagacagagggtctcactatattgcccaagttggtttcaaactcctggcttcaagcagtcctcctgcctcacccttccaaagtgctaggattataggcatgagccaccat

SEQ ID NO: 123 - DNA, 816 bp, Homo sapiens
  SIMILAR (172)..(285): 921254mologous to Morone saxatilis beta-actin,accession number L36342,Smith-Waterman Score=199.
cacactttgagcttcagtctctgcatctataaaaccatggacacatgcatgagtacttgtagcatttcctttggtcttgggttcaagtagcttctggtccctttttgggaaatgcaggacctcaagacagcacatcattgtgtggcgtgggtcgtgaccccaactcactagatctggcaccactctttctacaatgagcttcgtgttgcccctgaagagcatcccaccctgctcacggaggcacccctgaaccccaaggccaaccgggagaaaatgactcaagtaagtatgctaccccagcacacaacactgtggggtctggggaaacttctgttagaaggaggctatgcagcacagcagagagaaggccggagctaggagtccaccaacagactaacagccttcagtgaactcagggatcccaaaggacaggaacagcttgaaagtacttgcatccttcctgcagggaccagccctttgcctccaaaagcaataggaaatttaaaagatttcactgagaaggggccacgtttaagttataatgtctaaggagaagtcacttcaaaatgcagcatcacatacaataggaatttgtgttccagagtcagacatatctaggtttgaaaactggatctgccacttatcagttatgtgaccttaaagaactccgttaatttctcagagcctcagtttccttgtctataagttgggagtaatattaatactatcatttttccaaggattgatgtgaacattaatgaggtgaaatgacagatgtgtatcatggttcctaataaacatccaaaatatagtaaa

SEQ ID NO: 124 - DNA, 1423 bp, Homo sapiens
  SIMILAR (136)..(315): 901254mologous to Solanum tuberosum actin,accession number X55753,Smith-Waterman Score=292.
acttcccaggggctatataacccttcagctttcagcttccctgaacaccacccagtgtggagcagcccagccaagcactgtacaggaatcctgtgaagcagctccagctattgtgtgaagaagaggacagcactgcccttggtgtgtgacaatggctctgggctctgtaaggccggctttgctggggacgatgctcccagggctgttttcccatccattgtgggacgtcccagacatcagggggtgatggtgggaatgggacaaaaagacagctacgtgggtgacgaagcacagagcaaaagaggaatcctgaccctgtaagtacccgatagcacatggcatcatcaccaactgtgatgacattgaaaagatctggcaccactctttctacaatgagcttcgtgttgcccctgaagagcatcccacccttgctcacggaggcaccccttgaaccccaagggccaaccgggagaaaatgactcaaattatgtttgaggctttcaaatgtcccagccatgtatgtggctatccaggcggggcttgtctctctaagcctcttggagccacaagctgggcatcgtggctgggactctgggagatgggtgttcacccacaatgtccccatcttatggagggctatgcctttgccccatgccatcatgcgtctgggatctgggctgggccgagatcttcactggacttaccttcatgtaagatcctgactgaggcgtggctatttccttcgttactactgctgagcgtgaagaattggtccgggacatcaaggagaaactgtgttatgtaagctctggactttgaaaatgagatggccactgccgcatggtcatcctcccttgagaagagttacgagttgcctgatgggcaagtgatcaccatcggaaatgaacgtttccgctgcccagagaccctgttccagccatccttcatcgggatggagtctgctggcatccatgaaaccacctacaacagcatcatgaagtgtgatattgacatcaggaaggacctctatgctaacaatgtcctatcagggggcaccactatgtaccctggcattgccgaccgaatgcagaaggagatcacggccctagcacccagcaccatgaagatcaagatcattgcccctccggagcgcaaatactctgtctggatcggtggctccatcctggcctctctgtccaccttccagcagatgtggatcagcaaacaggaatacgatgaagccgggccttccattgtccaccgcaaatgcttctaaaacactttcctgctcctctctgtctcatgcacacaactgtgaatgtcctgtggaattatgccttcagttcttttccaaatcattcctagccaaagctctgactcgttacctatgtgttttttaataaatctgaaataggctactggt

SEQ ID NO: 125 - DNA, 343 bp, Homo sapiens
  misc_feature (1)...(343): n = a,t,c or g
actnnnnnnnnnnnnnnnnnnnnnnnnnnnnnnnnnnnnnnnnnnnnnnnnnnnnnnnnnnnnnnnnnnnnnnnnnnnnnnnnnnnnnnnnnnnnnnnnnnnnnnnnnnnnnnnnnnnnnnngatagttgaatgctcacctaatttcctaagaagattaacaatttttattttacttttttgcaggatccaactggaatattctcactagataaaaccattggccttggtacttatggcagaatctatttggtaagttgacttacattatttattcattcttcattttctaatgacaacaaagattgtgagtcaaacactgcaaatcacataatgccacaata

SEQ ID NO: 126 - DNA, 557 bp, Homo sapiens
gcggccgcagtcgcaaatcctccgcgcagtcctccgcgccacctgcgcccggcgctgcggggtctacgtgctgcccatcggcgacgcggacgcgctgcagcagtgaccacgtcgtacaggtatgggctgggtagggaccgcaacgagtccccaccctgtagcgtggaggacgcggaggcccagctctctccggtcactgcctagtgtgcgggcgttggtggtgaggaccgagcgcagggtcccgtgtgggtgagcccttcagagtcccactgtgacaggggctttcagggagaacgggtccgcgggccctcggcacctcccagcccagctctgctcctggacagccgagggctttctcccttttttcctcttaccacaaaagtaattcatactgtagaaaaatgggaaagtacagaaattacaacaaaatacgtatctccttgatccctccacagacgcgttattcttaaaccttcatccaccccaatttagatgcctgatataaaacaccatgttacacccaccggcaaactttttaacaatagcgcaaaagaaag

SEQ ID NO: 127 - DNA, 564 bp, Homo sapiens
  SIMILAR (564)..(382): 481254mologous to Gallus gallus putative microtubule associated protein; cNau,accession number AF038560,Smith-Waterman Score=151.
ctaggcccggcggtgggagttaaagggaggccggttccaactcggctgaaggcaggccattctgacggctgcccccaggagggcggctgcgagggcagcggtgcgctcccggcacgggggtgctcgagcactgagtccgggcatggagcagcgaaggcgccgcctgtacgacgtggtcactgctgcagccgcgtccgcgtcgccgatgggcagcacgtagaccccgcgggcgccgggcgcaggtggcgcggaggactgcgcggaggatttgcccctgcggccgcccgcccccggtccgcgccccggcggcggatccttgggcccggcgggcgtggtccacaagccgaagtcccgctggtactgagtgagcggcacgtcccggccggaatcccgggcgcccgcgggaggctggcccctgcgcgaggcggcgccgcccgtgcccggctcctcgctgtcgaggtccgagtagccgtgcagagtgagcggcaccgccacgtcggagcggtccagctggttccagcgccgcgccaggcagcacaggcggctgatacagggccacgccat

SEQ ID NO: 128 - DNA, 885 bp, Homo sapiens
  SIMILAR (190)..(101): 431254mologous to Gallus gallus putative microtubule associated protein; cNau,accession number AF038560,Smith-Waterman Score=44.
cctgtcacagtgggactctgaagggctcacccacacgggaccctgcgctcggtcctcaccaccaacgcccgcacactaggcagtgaccggggagagctgggggacatggcctgcgcgcacccctcgcacggctaggcccggcggtgggagttaaagggaggccggttccaactcggctgaaggcaggccattcctgacggctgcccccagggacgggcggctggcgaagggccagcggtgcgcctcccggcacgggggtgactcgaagcactagagtccgggccatggagcagcgaaggcgccgcctgcagtgcccacggaccaaacgggggtgacctctgaggccgccggcagctccgaggtcgcgtgggatccgggctccaggcgcctccgctctgccgcccaccccatccctctggctccgggcctccgcgtcctcccaccacagggtggggactcgttgcggtccctacccagcccatacctgtacgacgtggtcactgctgcagccgcgtccgcgtcgccgatgggcagcacgtagaccccgcgggcgccgggcgcaggtggcgcggaggactgcgcggaggatttgcccctgcggccgcccgcccccggtccgcgccccggcggcggatccttgggcccggcgggcgtggtccacaagccgaagtcccgctggtactgagtgagcggcacgtcccggccggaatcccgggcgcccgcgggaggctggcccctgcgcgaggcggcgccgcccgtgcccggctcctcgctgtcgaggtccgagtagccgtgcagagtgagcggcaccgccacgtcggagcggtccagctggttccaacgccgcgccaggcagcacaggcggctgatacagggccacgccat

SEQ ID NO: 129 - DNA, 828 bp, Homo sapiens
  SIMILAR (43)..(255): 681254mologous to Homo sapiens unnamed protein product,accession number AK022810,Smith-Waterman Score=230.
atgatgaggactgcctggagccgagggtttcagcaattggcagggccgtgcatggggcagagcagcagcccctggggagtcggtaaaggggtggctgaccctgtgcaagcttgtgaccgtgttctctgttccagacaggaattccaggcttggactggagtgaagccctcaagatccacaaagacaaaaccagcccgagtcatcacaacccacacttcgggatgggacagcagccctggggccggcttccaggtcagccggaagctggtgcagcagggttttgaaatctctgaggagcctgaggatcaagtcagttgggaaccgaattggtccatggaagctgaggaatgtggacacatccggcccttgaaagaaccagttatgtccacttttggtggatttcccaggatgcgtgagcacttgattaatttcataacctacagtgagacccttggctcttcctacaaatggcccctgcagttgaagctgttggaatcttgggccgtcacctgcatgactcatggtgatgctgagtatccaggaggaaatttccagaagaaacagaccgtcagtcacgggcttccacttcacagacctccttatggccaagatgagcctcgtgttttaacaaaacagttcttgggattgaatgactcacatttaacttgtggtaggttctaaagattgaatccacattttgttactaatgattttcccgctaacataaggatgatgagcagggcactatcatacacactggctgagaactggaactgtttttgggaaggtggcatttgtctcattccctgaaataccttaaaatgtcct

SEQ ID NO: 130 - DNA, 1111 bp, Homo sapiens
  SIMILAR (942)..(793): 641254mologous to Homo sapiens unnamed protein product,accession number AK022810,Smith-Waterman Score=149.
tgttctgccgctacgtcgcttgtatcctctgagctctcgaataccgcactgctgatcgtccttatgctagcgggaaaattattattaacaaaatgagctttcagtctttagaacctaacacaaggtctgtgtgagacattcaatcccaagaactgtcttgttacaacatgatgctcatcttggccataaagaggtctgtgaagtggaagcccgtgactgacggtctgtttcttctggaaatttcctcctggatactcagcatcaccatgagtcatgcaggtgacggcccaagattccaacagcttcaactgcaggggccatttgtaggaagagccaagggtctcactgtaggttatgaaattaatcaagtgctcacgcatcctgggaaatccaccaaaaaatggaacataaactggtcctttcaaagggccggaatttgtcccaaaattcctcaagcttcccatggaccaaattcggttccccaactgacttgatcctcaggctcctcagagatttcaaaactgaagagacggccagatggcagttaacgaaacgcaggagccttccacaggcttctcaagaggatgcttgaggctgagctgggtgtgccaagtccatcggtgcatctgctccacaccagcactttggcccctggtgacagctttgaagaagggctgtgcccttcggcaggggcccatgccatgctctcgcccagccccgcggcagtgggtcctgaggccgctccccagccctgtcctgtcggcagccatggtgtcacggtgcaggcagtcacacgttgagaatccggggagctgaggcctgaaagatggcggaggggttaggagtgaacttcttcctcacctctgggacctggaagctcggccccagggctgctgtcccatccccaagggtgggttgtgatgactccggctgggtttgactttgtagatcttaaccgcttcactccaattaaaaccctgaaattcctgtctgtacgacgtggtcactgctgcagccgcgtccgcgtcgccgatgggcagcacgtagaccccgcgggcgccgggcgcaggtggagcggaggactgcgcggaggatttgcccctgcggccgc

SEQ ID NO: 131 - DNA, 404 bp, Homo sapiens
  SIMILAR (342)..(404): 761254mologous to Homo sapiens spindlin-like,accession number BC000044,Smith-Waterman Score=93.
  misc_feature (1)...(404): n = a,t,c or g
tttcgtgtgtggtcaccggcnccgccgccgccaccttgaaggcggaggacgcaggagccaagagcaagggacgccgccacggtcatcttcgcctgccccgccgccctcttagagacactcattgcctatggatcatcctctcccagcttttgcaagcaccgggctgctcgcccgctgattttcctcctccataggctcactgcggaggcaacggcgaggcatgaagaccccgtttggaaaggcagctgcagggcagcggtccaggacgggcgctggccacggcagtgtgtctgttaccatgataaagaggaaggctgcacacaagaagcataggagccgaccccccttcccagcctcgggggaacatcgtgggctgcataattcagcacggatggaaagatggc

SEQ ID NO: 132 - DNA, 1701 bp, Homo sapiens
  SIMILAR (991)..(1698): 841254mologous to Homo sapiens spindlin,accession number AF106682,Smith-Waterman Score=1099.
atggtaaatggaccaattcaacaagacgaactaactatcctaaatatatatgcacccaatacaggagcacccagattcataaagcaaatccttagtgacctacaaagagacttagactcccacacaataaaaattggagagtttaacaccccactgtcaacattagacagatcaatgagacagaaagttaacaaggatatccaggaagtgaactcagctctgcaccaagcggacctaatagacatctacagaactctccaccccaaatcaacagaatatacattcttttcaggactacaccacacctattccaaaattgaccacatagttggaagtaaagcactcttcagcaaatgtaaaagaacagaaattacaagaaactgtctctcagaccacagtgcaatcaaactagaactcaggattaagaaactcactcaaaaccactcaactacatggaaactgaacaacctgctcctgaatgactactgggtacataaggaaatgaaggcagaaataaagatgttctttgaaaccaacgagaacaaaggcacaacataccagaatctccaggacacattcaaagcaaaaaagaaggaggagactgcggcgcagcagcgactagtgggagtccgatgtgggagaggggctgcggccaccgccaccgccgccgccaccaggaaggcggaggacgcaggagccaagagcaagggacgccgccacggctcactgcggaggcaacggcgaggtgtccgatttgtgcacttgaggcccgcaatccgggacggtggggaatctgcgcctcctggccgggtagtgttggaagcagggcgaggggaatggggaaacgcttcgtatttcaccgaaccgcagatcttagccagactgagctggggaggaaggttactgcaggcactcagccagggcatgaagaccccgtttggaaaggcagctgcagggcagcggtccaggacgggcgctggccacggcagtgtgtctgttaccatgataaagaggaaggctgcacacaagaagcataggagccgacccacctcccagcctcgggggaacatcgtgggctgcagaattcagcacggatggaaagatggagatgaacctctaacacagtggaaaggaaccgttctggatcaggtacctgtaaatccctctctgtatcttatcaaatatgatggatttgactgtgtttatggattggaacttcacagagatgaaagagtgtcatcacttgaagtccttcctaatagagttgcatcatctagaatcagtgatacacacttggcagaaataatggttggcaaagcagtggaacatatttttgagacagaggaaggttccaaaaatgaatggagggggatggtcttagctcaggcacctgtcatgaacacatggttttacattacctatgagaaagatcctgtattatatatgtaccagctcttagatgattataaagatggtgacctccgcatccttcaagattccaatgattctcctctggcagagagggagccaggagaagtcatagacagcctggtaggcaaacaggtggaatacgccaaagacgatggctccaagagaactggcatggtcattcatcaggtagaagcaaaaccctctgtgtacttcatcaaatttgatgatgatttccatatctatgtctacgatttggtaaaaacatcttag

SEQ ID NO: 133 - DNA, 359 bp, Homo sapiens
  misc_feature (1)...(359): n = a,t,c or g
attttccttcctagtagaagtgttactgcctgtaactagctcaaaataccaatgcagtttctgcattctgggttttggttttccttttttgttttttttggtttttgaaaatttggttttggcccccaaggtggaagacaagggggaaaacaaaacaaaaggggaaaaattgccccccgggnnnnnnnnnntccccggcccaaacccccaggaaaaccgggaaaaaaagggcccccccaaaaccctaaaaaaatttgggaatttnnnnnnnnnngggggtaaaacaagggggccaaggggggaaaaaaactccgacccaaagggaacccccgggcaaaaccctggaaatnnnnnnnnnn

SEQ ID NO: 134 - DNA, 944 bp, Homo sapiens
  SIMILAR (567)..(794): 611254mologous to Homo sapiens spindlin-like,accession number BC000044,Smith-Waterman Score=261.
tttcgtgtgaggggaggggcgcgtgctaaaccagaagaggtaaaccaatgcagtgagagagaggtggttgtgggctccacagcttctgatttggaggaagctgcgagaccgagagcctaggagcaccttccacgcccagggctgtggtacaggttggtgggggaggggcgccacgcggtgtttggcaggaaggggaggcctctctactgaccggaagctgcgctagaaaaagaaggaggagactgcggcgcagcagcgactagtgggagtccgatgtgggagaggggctgcggccaccgccaccgccgccgccaccaggaaggcggaggacgcaggagccaagagcaagggacgccgccacggtcatcttcgcctgccccgccgccctcttagagacactcattgcctatggatcatcctctcccagcttttgcaagcaccgggctgctcgcccgctgattttcctcctccataggctcactgcggaggcaacggcgaggtgtccgatttgtgcacttgaggcccgcaatccgggacggtggggaatctgcgcctcctggccgggcatgaagaccccgtttggaaaggcagctgcagggcagcggtccaggacgggcgctggccacggcagtgtgtctgttaccatgataaagaggaaggctgcacacaagaagcataggagccgacccacctcccagcctcgggggaacatcgtgggctgcataattcagcacggatggaaagatggagatgaacctctaacacagtggaaaggaaccgttctggatcagctcctttgaataaacctgcccaccaccaagaacccatacatgactttcttttcattgtatcaaacgaatgtgtccaccggtgtgagcaccagcaactcacttcttcctcagacatctctaaagctggacagaatatgagggacaatatcgttt

SEQ ID NO: 135 - DNA, 351 bp, Homo sapiens
  misc_feature (1)...(351): n = a,t,c or g
catttccaagtacagggaaggatgatatcctgtccattgcgaagcaggttattgactggggtttctcagtattatgtgggtttggcggaaaatattatgtctgaaaagttacttcatcttttcagtaactatgtactccagtagaaaggatgaataaataatggaaggataatagggaggnnnnnnnnnnnnnnnnnnnnnnnnnnnnnnnnnnnnnnnnnnnnnngtgaaggatggaaagaaagggaagatggaataaaaaaaggaaggaggaagagagaagaaagacgaaaggaaggcagttatttaggattgaaggagtaaaaagtgtcttctttggaccagatttcn

SEQ ID NO: 136 - DNA, 3657 bp, Homo sapiens
  SIMILAR (163)..(1932): 951254mologous to Homo sapiens putative p150,accession number U93563,Smith-Waterman Score=2945.
atggataaattcctcgacacatacactctcccaagactaaaccaggaagaagttgaatctctgaatagaccaataacaggagctgaaattgtggcaataatcaatagcttaccaactaaaaagagtccaggaccagatggattcacagccaaattctaccagagtaaaatactggcaaaccaaatccagcagcacatcaaaaagcttacccaccaggatcaagtggacttcatccctgggatgcaaggctggttcaatatacgcaaatcaataaatgtaatccagcatataaacagaagcaaagacaaaaaccacatgattatctcaatagatgcagaaaaggcctttgacaaaattcaacaacacttcatgctaaaaactctcaataaattacgtattgatgggacgtatctcaaaataataagagctatctatgacaaacccacagccaatatcatactgaatgggcaaaaactggaagcattccctttgaaaactggcacaagacagggatgctctctctcaccactcctattcaacatagtgttggaagttctggccagggcaattaggcaggagaaggaaataaagggtattcaattaggaaaagaggaagtcaaattgtccctgtttgcagatgacatgattgtatatctagaaaaccccattgtctcagcccaaaatctccttaagctgataagcaacttcagcaaagtctcaggatacaaaatcaatgtacaaaaatcacaagcattcttatacaccaacaacagacaaacagagagccaaatcatgagtgaactcccattcacaattgcttcaaagagaataaaatacctaggaatccaacttacaagggatgtgaaggacctcttcaaggagaactacaaaccactgctcaaggaaataaaagaggatacaaacaaatggaagaacatcccatgctcatgggtaggaagaatcaatatcgtgaaaatggccatactgcccaagataatttacagattcaatgccatccccatcaaactaccaatgactttcttcacagaattggaaaaaactactttaaagttcatatggaaccaaaaaagagcccgcattgccaaggcaatcctaagccaaaagaacaaagctggaggcatcacgctacctgacttcaaactatactacaaggctacagtaaccaaaacagcatggtactggtaccaaaacagagatatagatcaatggaacagaacagagccctcagaaataacgctgcatatctacaactttctgatctttgacaaacctgagaaaaacgagcaatggggaaaggattccctatttaataaatggtgctgggaaaactggctagccatatgtagaaagctgaaactggatcccttccttacaccttatacaaaaatcaattcaagatggattaaagacttaaacgttagacctaaaaccataaaaaccctagaagaaaacctaggcattaccattcaggacataggcatgggcaaggacttcatgtctaaaacaccaaaagcaatggcaacaaaagccaaaattgacaaatgggatctaattaaactaaagaacttctgcacagcaaaagaaactaccatcagagtgaacaggcaacctacaaaatgggagaaaattttcacaacctactcatctgacaaagggctaatatccagaatctacaatgaactccaacaaatttacaagaaaaaaacaaacaaccccatcaaaaagtgggcaaaggacatgaacagacacttctcaaaagaagacatttatgcagccaaaaaacacatgaaaaaatgctcaccatcactggccatcagagaaatgcaaatcaaaaccacaatgagataccatgtcacaccagttagaatggcaaccattaaaaagtcaggaaacaacagctggaggtcatgcctgcaaccatgggcagcacattcaacaacttaccggcacccaggaaccatggagaaaaaaaccagcagcggggacacccccactgtcttcccatccaccctgggtcgcaagaaaagcacaagtgctcaactaactgaactgacagctcttacacttgagttaagcaagggaaaggtaagaaacgccccttcaaagttagatctaagcccttttgagatgctgtatggatggccttttctcaccaatgatttcttattagaccaagagacctctgaattgggcaagcatgtaaactctctggctcgttttcaacaggaattaactcaagtagcagaagcccaaccccaagaagtaggaccacctttatttaacccaggatatttggtattgcccaagcagggagggccttacaccattctcctttcaatgccctcagcagtaaaagttacaggtattgattcctggatacatcatgctcaagttaaagcctggaaaactgagagagcaatccccggcagcccagcggaatgtcttggataccaatgtgaggaaataagagacctgaagctgaaaatcaaaagagataagaaaatgagcaagggctactcatcctactcagttccagtcatccattcagtcatccagtcatccagtctttgtacaactggtacacagaagtcaagaattgaggtttgggaacctctgcctagatttccgaagatgtatggatatgcctggattcctagacaaaagtttgctgcaggggcagggccctcatggagaacctctgttaaggcagtgcagaagggaaatgtggggtcgaagccccaccacagagaccctactggggcactgcctagtggagctgtgagaagaggaccaccatcctccagacctcagaatggtagatccactggcagcttgcaccgtgtgcctggaaaagccagacctcaacaccagcctgtgaaagcagccaggagggaggccgtgccctacaaagccacaggggtagagctgcccaagaccatgggaacccacctattgcatcagtgtgacctggatctacctgccaccttctctctcagccttcacatcaagtacctcaaacatcgacattcttattccccacatctccacctcctattcaccgtcatgggcccccatgccaggcaaatgattcgcatctctggcatagatgttgacaccaggaacctgtataagctgaatttgaaagtaaagtggctggaggttttggatcaagaggaacctgaatacagtagaacaacctccaggaagaagcagggattccctaacagcgatgaagaagatgtattgtggatggagaagcagctgtcctgcttctgtgacaagtaccaaaaatggataccaaccagacagctgaagggacagctcagttacgttaaggaagcagatctgattccagatgtaatgcccccacaagctttgttccatgatgatgatgagatggaaggcaatggagccatagacgcagggatggagtatgtctacaacattgacacgttgcttagatggtctgatggtgaggaggaaggagaaggaggagaagaaggaagaggaggaggaagaggaggagaaggaggaggaaagagggaggagggagaaggaaaaaaagaagaagaacaaggaggatggggaggaggacaggaagtggaagaagaaggaggaggaggagggggaaattaa

SEQ ID NO: 137 - DNA, 3465 bp, Homo sapiens
  SIMILAR (76)..(1485): 971254mologous to Homo sapiens putative p150,accession number U93569,Smith-Waterman Score=2360.
atggaaggagagggatgccaggaagccagctcaggccagatgggagcccagagagcctccacagtgtggagaaaggacagatcaacgagacagaaagtcaacaaggatacccaggaattgaactcagctctgcaccaagcggacctaatcgacatctacagaactctccaccccaaatcgacagaatatacatttttttcagcaccacaccatacctattccaaaattgaccacatacttggaagtaaagctctcctcagcaaatgtaaaagaacagaaattataacaaactgtctctcagaccacagtgcaatcaaactagaactcaggattaagactctcactcaaagccactcaactacatggaaactgaacaacctgctcctgaatgactactgggtacataacgaaatgaaggcagaaataaagatgttctttgaaaccaacgagaacaaagacacaacataccagaatctctgggacgcattcaaagcagtgtgtagagggaaatttatagcactaaatgcccacaagagaaagcaggaaagatccaaaattgacaccctaacatcacaattaaaagaactagaaaagcaagagcaaacacattcaaaagctagcagaaggcaagaaataactaaaatcagagcagaactgaaggaaatagagacacaaaaaacccttcaaaaaatcaatgaatccaggagctggttttttgaaaggatcaacaaaattgatagaccgctagcaagactaataaagaaaaaaagagagaagaatcaaatagacacaataaaaaatgataaaggggatatcaccactgatcccacagaaatacaaactaccatcagagaatactacaaacacctctacgcaaataaactagaaaatctagaagaaatggatacattcctcgacacatacactctcccaagactaaaccaggaagaagtcgaatctctgaatagaccaataacaggagctgaaattgaggcaataatcaatagtttaccaaccaaaaagagtccaggaccagatggattcacagccgaattctaccagaggtacaatgaggagctggtaccattccttctgaaactattccaatcaatagaaaaagagggaatcctccctaactcattttatgaggccagcatcattctgataccaaagccaggcagagacacaaccaaaaaagagaattttagaccaatatccttgatgaacattgatgcaaaaatcctcaataaaatactggcaaaccgaatccagcagcacatcaaaaagcttatccaccatgatcaagtgggcttcatccctgggatgcaaggctggttcaatatacgcaaatcaataaatgtaatccagcatataaacaaagccaaagacaaaaaccacattattatctcaatagatgcagaaaaagcctttgacaaaattcaacaacccttcatgctaaaaactctcaataaattagtgttggaagttctggccagggcaatcaggcagaagaaggaaataaagggtattcaattaggaaaagaggaagtcaaattgtccctgtttgcagacgacatgattgtttatctagaaaaccccattgtctcagcccaaaatctccttaagctgataagcaacttcagcaaagtctcaggatacaaaatcaatgtacaaaaatcacaagcattcttatacaccaagaacagacaaacagagagccaaatcatgagtgaactcccattcacaattgcttcaaagagaataaaatacctaggaatccaacttacaagggatgtgaaggacctcttcaaggagaactacaaaccactgctcaaggaaataaaagaggacacaaacaaatggaagaacattccatgctcatgggtaggaagaatcaatatcgtgaaaatggccatactgcccaaggtaatttacagattcaatgccatccccatcaagctaccaatgactttcttcacagaattggaaaaaactactttaaagttcatatggaaccaaaaaagagcccgcatcgccaagtcaatcctaagccaaaagaacaaagttggaggcatcacactacctgacttcaaactatactacaaggctacagtaaccaaaacagcatggtactggtaccaaaacagagttatagatcaatggaacagaaaagagccctcagaaataacaccgcatacctacaactatctgatctttgacaaacctgagaaaaacaagcaatggggaaaggattccctatttaataaatggtgctgggaaaactggctagccatatgtagaaagctgaaactggatcccttccttacaccttatacaaaaatcaattcaagatggattaaagatttaaatgttagacctaaaaccataaaaaccctagaagaaaacctaggcattaccattcaggacataggcatgggcaaggacttcatgtccaaaacaccaaaagcaatggcaacaaaagccaaaattgacaaatgggatctaattaaactaaagagcttctgcacagcaaaagaaactaccatcagagtgaacaggcaacctacaacatgggagaaaattttcacaacctactcatctgacaaagggctaatatccagaatctacaatgaactcaaacaaatttacaagaaaaaaacaaacaaccccatcaaaaagtgggtgaaggacatgaacagacacttctcaaaagaagatatttatgcagccaaaaaacacatgaaaaaatgctcatcatcactggccatcagagaaatgcaaatcaaaaccacaatgagatattatctcacaccagttagaatggcaatcattaaaaagtcaggaaacaacaggcaaacagggtctggagtggacctgaagcaaactccaacagacctgaagctgagggacctaactgttagaagaaaaatgaacaaacagaaagaaatagcatcaacatcaacaaaaaggacatctacaccaaaccccacctgtaggtctgtaggaccaaaggactgcagttccttgggggcaatggaacaaagctggacagagaatgactttgacaagctgacagagaagaaggctttagaagaaaatcaagaagaaatggataaatttctggacacatacaccctcccaagattaaaccaggaagaagttgaatctctgaatagaccaataacaggttctgaaattgaggcaataattgatagcataccaaccaaaaaatatccaggaccagatggattcacagccaaattctatgagagaattaaagtcttctgcactgagagcttagcaaaatggataaaatggacccataccaagacattcatcatggaatttcacactattggaaatgcaaagattctgcaggcttcttcgtttacggaagtaaaaacaaaaacaaaaacacttgaacataaaagattggaaagcataatggctttgacttctcaatag

SEQ ID NO: 138 - DNA, 3441 bp, Homo sapiens
  SIMILAR (574)..(1962): 951254mologous to Homo sapiens putative p150,accession number U93563,Smith-Waterman Score=2340.
atggagctgaaaaccaaggcacgagaactacatgacgaatgcacaagcctcagtagccgatttgatcaactagaagaaagggtatcagtgatggaagatgaaatgaatgaaatgaacttaccaaccaaaaaaagtccaggaccagatggattcacagccgaattctaccagaggtacaaggaggagctggtaccattccttctgaaattattccaatcaatagaaaaagagggaatcctccctaactcattttatgagcccagcatcatcctgatagcaaagcctggcagagacacaacaaaaaaagagaactttagacccatatccctgatgaacatcaatgcaaaaatcctcaataaaatgctggcaaaccaaatccagcagcacatcaaaaagcttatccaccatgatcaagtgggcttcatccctgggatgcaaggctggttcaatatacgcaaatcaataaatgtaatccagcatataaacagaaccaaagacaaaaaccacatgattatctcaatagatgcagaaaaggcctttgacaaaattcaacaacacttcatgctaaaaactctcaataaattagtgttggaagttctggccagggcaatcaggcaggagaaggaaataaagggtattcaattaggaaaagaggaagtcaaagtgtccctgtttgcagatgacatgattgtatatctagaaaaccccactgtctcagcccaaaatctccttaagctgataggcaacttcagcaaagtctcaggatacaaaatcaatgtgcaaaaatcacaagcattcttatacaccaataacagacaaacagagagacaaatcatgagtgaactcccattcacaattgcttcaaagagaataaaatacctaggaatccaacttacaagggacgtgaaggaccttttcaaggagaacaacaaaccactgctcaaggaagtaaaagaggatacaaacgaatggaagaacattccatgctcatgggtaggaagaatcaatatcgtgaaaatggccatactgcccaaggtaatttacagattcaatgccatccccatcaagctaccaatgactttcttcacagaattggaaaaaactactttaaagttcatatggaaccaaaaaagagcctgcattgccaagtcaatcttcagccaaaagaacaaagctggaggcatcacgctacctgacttcaaactatactacaaggctacagtaaccaaaacagcatggtactggtaccaaaacagagatatagctcaatggaacagaacagagccctcagaaataatgctgcatatctacaactatctgatctttgacaaacctgagaaaaacaagcaatggggaaaggattccctatttaataaatggtgctgggaaaactggctagccatatgtagaaaggtgaaactggatcccttccttacaccttatacaaaaatgaattcaagatggattaaagatttaaacgttagacctaaaaccataaaaaccctagaagaaaacctaggcattaccattcaggacataggcgtgggcaaggacttcatgtccaaaacaccaaaagcaatggcaacaaaagccaaaattgacaaatgggatctaattaaactaaagagcttctgcacagcaaaagaaactaccatcagagtgaacaggcaacctacaacatgggagaaaattttcgcaacctactcatctgacaaagggctaatatccagaatctacaatgaactcaaacaaatttacaagaaaaaaacaaacaaccccatcaaaaagtgggcgaaggacgtgaacagacacttctcaaaagaagacatttatgcagccaaaaaacacatgaaaaaatgctcatcatcactggccatcagagaaatgcaaatcaaaaccactatgagatatcatctcacaccagttagaatggcaatcattaaaaagtcaggaaacaacaggaaaatccaagtggaatatggtgtgacaggatcctttaaagataaaccacttgcagagtggctaaggaaatacaatccctctgaagaagaatatgaaaaggcttcagagaactttatctattcctgtgctggatgctgtgtagccacctatgttttaggcatctgtgatcgacacaatgacaatataatgcttcgaagcacgggacacatgtttcacattgactttggaaagtttttgggacatgcacagatgtttggcagcttcaaaagggatcgggctccttttgtgctgacctctgatatggcatatgtcattaatgggggtgaaaagcccaccattcgttttcagttgtttgtggacctctgctgtcaggcctacaacttgataagaaagcagacaaacctttttcttaacctcctttcactgatgattccttcagggttaccagaacttacaagtattcaagatttgaaatacgttagagatgcacttcaaccccaaactacagacgcagaagctacaattttctttactaggcttattgaatcaagtttgggaagcattgccacaaagtttaacttcttcattcacaaccttgctcagcttcgtttttctggtcttccttctaatgatgagcccatcctttcattttcacctaaaacatactcctttagacaagatggtcgaatcaaggaagtctctgtttttacatatcataagaaatacaacccagataaacattatatttatgtagtccgaattttgagggaaggacagattgaaccatcatttgtcttccgaacatttgacgaatttcaggaacttcacaataagctcagtattatttttccactttggaagttaccaggctttcctaataggatggttctaggaagaacacacataaaagatgtagcagccaaaaggaaaattgagttaaacagttacttacagagtttgatgaatgcttcaacggatgtagcagagtgtgatcttgtttgtactttcttccaccctttacttcgtgatgagaaagctgaagggatagctaggtctgcagatgcaggttccttcagtcctactccaggccaaataggaggagctgtgaaattatccatctcttaccgaaatggtactcttttcatcatggtgatgcatatcaaagatcttgttactgaagatggagctgacccaaatccatatgtcaaaacatacctacttccagataaccacaaaacatccaaacgtaaaaccaaaatttcacgaaaaacgaggaatccgacattcaatgaaatgcttgtatacagtggatatagcaaagaaaccctaagacagcgagaacttcaactaagtgtactcagtgcagaatctctgcgggagaattttttcttgggtggagtaaccctgcctttgaaagatttcaacttgagcaaagagacggttaaatggtatcagctgactgcggcaacatacttgtaa

SEQ ID NO: 139 - DNA, 2787 bp, Homo sapiens
  SIMILAR (229)..(2277): 831254mologous to Homo sapiens putative p150,accession number U93564,Smith-Waterman Score=2972.
atgcaaactaccatcagagaatactataagcaactctatgcaaataaactagaaaatctagaagaaatggataaattcctcgacacatacaccctcccaagactaaaccaggaagaagttgaatctctgaatagaccaataacaggctctgaaattgtggcaataatcaatagcttaccaaccaaaaaaagtccagcaccagatggattcacaaccaaattctaccagagaaccgaagacaaaaaccacatgattatctcaatagatgcagaaaagacctttgacaaaattcaacaactcatgctaaaaactctcaataaattaggtattgatgggatgtatctcaaaataataagagctatctatgacaaacccacagccaatatcatactgaatgggcaaatactggaagcattctctttgaaaactggcacaagacagggatgccctctctcaccactcctattcaacatagtgttggaagttctggccagggcaatcaggcaggagaaggaaataaagggtgttcaattaggaaaagaggaagtcaaattgtccctgtttgcagatgacatgattacatatctagaaaaccccattgtctcagcccaaaatctccttaagctgataagcaacttcagcaaagtctcaggatacaaaatcaatgtacaaaaatcacaagcattcttatacaccaataacagagaaacagagaaccaaatcatgagtgaactcccattcacaattgcttcaaagagaatacaatacctaggaatccaacttacaagggatgtgaaggacctcttcaaggagaactacaaaccactgctcaatgaaataaaagaggatacaaacaaatggaataacattccatgctcatggataggaagaatcaatatcatgaaaatggccatactgcccaaggtaatttatagattcaatgacatccccatcaagctaccattgactttcttcacagaattggaaaaaactattttaaagttcatatggaaacaaaaaagagcccgcatagccaagtcaatcctaagcaaaaagaacaaagctggaggcatcatggtacctgacttcaaactatactacaagactacagtaaccaaaacagcatggtactggtaccaaaacagagatataaaccaatggaacagaacagagccctcagaaataatgccacatatctgtaactatctgatctttgacaaacctgacaaaaacaagaaatggggaaaggattccctatttaataaatggtgctgggaaaactggctagctacatgtagaaagctgaaactggatcccttctttacaccttatacaaaaattaattcaaggtggattaaagacttaaatgttacatctaaaaccataaaaaccctagaagaaaacctaggcaataccattgaggacataggcatgggcaaggacttcatgtttaaaacaccaaaagcaatggcaacaaaagccaaaattgacaaatgggatctaattaaactaaagagcttctgcacagcaaaagaaactaccatcagagtgaacaggcaacctacagaatgggagaaaatttttgcaacctactcatctgacaaagggctaatatccagaatctacaatgaactcaaacaaatttacaagaaaaaaacaaagaaccccatcaaaaagtgggcgaaggacatgaacagacacttctctaaagaagacatttatgcagccaaaggacacgtgaaaaaatgctcatcatcaatggcaatcagagaaatgcaaatcaaacccacaatgagataccatctcacaccagttagaatggcaatcattaaaaagtcaggaaaccacaggtgctggagaggatgtggagaaatgggaacatttttacactgttggtgtgactgtaaactagttcaaccattgtggaagtcagtgtggcgattcctcaaggatctagaactagaaataccatttgacccagccatcccattgctgagtatatacccaaaggactataaatcatgctgctataaagacacatgcacacgtagcccaggcaggcagtacctgctagagctgcaggcacagtggtattgcttctgtgtgaactcacctgcagagtgcatcttcctgttgtccctggaaacttggaaacacctggacagcaggatctttgcaaccctcagatcaagagatcccctcatgagcccacaccaccagggccttgagcctgagacagagctgtgtggaatctcagcagagcagctgctcaggcatgcagagacccaggagctttacataccctggccccgatatccccagcaaggtgggagccattccagcctgcaggctttggagagtccaagcagtccagatgaggaagggtcccccaagctcagcacagctgctttgccagaatgtgtccagattgcttctttaaacgagaccccatccattcctcctcactgggtaaataatgaaattaaggcacaaatcaagaagttctttgaaactaatgagagcaaagatacaatgtgccagaatctccaggatgcagctaaagcagtgttaagagggaaatttataccactaaatgcccacatcaaaaagctagaaagatctgaagttaacaacctaacgttgcaacaaaaagaactagagaaccaagagcaaacaaactccaaagctagcagaagacaagaaataaccaagattagagctgaactgaaagagatggggacacataaaccccttcaaaaatcaatgaatgtaggagctgttttctga

SEQ ID NO: 140 - DNA, 3003 bp, Homo sapiens
  SIMILAR (712)..(2886): 951254mologous to Homo sapiens putative p150,accession number U93563,Smith-Waterman Score=3577.
atggggaaaaaacagagcagaaaaaccggaaactctaaaaagcagagcgcctctcctcctccaaaggaatgcagctcctcaccagcaacggaacaaagctggacggagaatgactttgacgagttgagagaagaagacttcagacgatcaaactactccgagctacaggaggaaattcaaaccaaaggcaaagaagttgaaaactttgaaaaaaattcagacgaatgtataactggaataaccaatacagagaagtgcttaaaggagctgacggagctgaaagccaaggctcgagaactacatgaagaacgcagaagcctcaagagccgatgcgatcaactggaagaaagggtatcagtgatggaagacaaaatgaatgaaatgaagcgagaagggaagtttagagaaaaaagaataaaaagaaacaaacaaagcctccaagaaatatgggactatgtgaaaagaccaaatctacgtctgattagtgtacctgaaagtgacagggagaatggaaccaagttggaaaacactctgcaggatattatccaggagaacttccccaatctagcaaggcaggccaacattcagattcaggaaatacagagaacgccacaaagatactcctcgagaagagcaactccaaggcacataattgtcagattcagcaaagttgaaatgaaggaaaaaatgttaagggcagccagagagaaagaaatacaaactaacatcagagaatactacaaacaccgctacgcaaataaactagaaaatctagaagaaatggataaattcctcaacatatacacccttcgaagactaaaccaggaagaagttgaatctctgaacagaccaataagaggctctgaaattgtggcaataatcaatagtttaccaaccaaaaagagtccaggaccagatggattcacagccgaatactaccagaggtataaggaggaactggtaccattccttctgaaactattccaatcaatagaaaaagagggaatcctccctaactcattttatgaggccagcatcatcctgataccaaagccgggcagagacacaaccaaaaaagagaattttagaacaatatccttgatgaacattgatgcaaaaatcctcaataaaatactggcaaaccgaatccagcagcacatcaaaaagcttatccaccatgatcaagtgggcttcatccctgggatgcaaggctggttcaatatacgcaaatcaataaatgtaatccagcatataaacagaaccaaagacaaaaaccacgtgattatctcaatagatgcagaaaaggcctttgacaaaattcaacaactcttcttgctaaaaactctcaataaattaggtattgatgggacatatctcaaaataaaaagagctatctatgacaaacccacagccaatatcatactgaatgggcaaaaactggaagcattccctttgaaaactggcacaagacagggatgccctctctcaccactcctattcaacatagtgttggaagttctggccagggcaattaggcaggagaaggaaataaagggtattcaattaggaaaagaggaagtcaaattgtccctgtttgcagatgacatgattgtatatctagaaaaccccattgtctcagcccaaaatctccttaagctgataagcaacttcagcaaagtctcaggatacaaaatcaatgtacaaaaatcacaagcattcttatacaccaataacagacaaacagaaacccaaatcatgagtgaactcccattcacaattgcttcaaagagaataaaatacctaggaatccaacttacaagggacgtgaaggacctcttcaaggagaactacaaaccactgctcaaggaaataaaagaggatacaaagaaatggaagaatattccatgctcatgggtaggaagaatcaatatcatgaaaatggccatactgcacaaggtaatttatagattcaatgccatccccatcaagctaccaatgactttcttcacagaattggaaaaaactactttaaagttcacatggaaccaaaaaagagcccgcattgccaagtcaatcctaagccaaaagaacaaagctggaggcatcatgctacctgacttcaaactatactacaaggctacagtaaccaaaacagcatggtactggtaccaaaacagagatatagatcaatggaacagaacagagccctcagaaataacgccgcatatctacaactatctgatctttgacaaacctgagaaaaacaagcaatggggaaaggattccctattcaataaatggtgctgggaaaactggctagccatatggagaaagctgaaactggatcccttctttacaccttatacaaaaattaattcaagatggattaaagacttaaacgttagacctaaaaccataaaaaccctagaagaaaacctaggcattaccattcaggacataggtatgggcaaggacttcatgtctaaaacaccaaaagcaatagcaacaaaagccaaaattgacaaattggatctaattaaactaaagagcttctgcacagcaaaagaaactaccatcagagtgaacaggcaacctacagaatgggagaaaattttcgcaacctactcatctgacaaagggctaatatccagaatctacaatgaactcaaacaaattgacaagaaaaaaacaaacaaccccatcaaaaagtgggcaaaggacatgaacagacacttctcaaaagaagacatttatgcagccaaaaaacacatgaaaaaatgctcaccatcactggctatcagagaaatgcaaatcaaaaacacaatgagataccatctcacaccacttagaatggcaatcattaaaaagtcaggaaacaacaggtgggaactgaacaatgagaacacacggacacaggaaggggaacatcacactctggggactgttgtggggtggggggaggggggagggatagccgtgggagatatacctaatgctaaatga

SEQ ID NO: 141 - DNA, 3048 bp, Homo sapiens
  SIMILAR (1260)..(1406): 311254mologous to Homo sapiens putative p150,accession number U93574,Smith-Waterman Score=54.
atggagtactatgcagccataaaaaaggatgagttcctgtcctttgcagagacatggatgaagctggaaaccatcattctcagcaaactatcacaaggacagaaaaccaaacaccgcatgttctcactcatagtgttggaagttctggccagggcaattaggcaggagaaggaaataaagggtattcaattaggaaaacaagaagtcaaattgtccctgtttgcagatgacatgattgtatatcgagaaaaccccattgtctctgcccaaaatctccttaagttgataagcaacttcagcaaactctcaggatacaaaatcaatgtgcaaaaatcacaagcattcttatacaccaataacagacaaacagagagccaaatcatgagtgaactcccattcacaattgcttcaaagataataaaatacctaggaatccaacttacaagggaagtgaaggacctcttcagggagaactacaaaccactgctcaatgaaataaaagaggatacaaacaaatggaagaacattccatgctcatgggtaggaagaatcaatatcatgaaaatggccatactgcccaaggtaatttatagattcagtgccatccccatcaagctaccaatgactttcttcacagaattggaaaaaactactttaaagttcatatggaaccaaaaaagagcccgcatcgccaagtcaatcctaagccaaaagaacaaagctggaggcatcatgctacctgacttcaaactatactacaaggctacagtaaccaaaacagcatggtactggtaccaaaacagaaatatagatcaatggaacataacagagccctcagaaataataccgcatatctacaactatctgatctttgacaaacctgagaaaaacaagcaatggggaaaggattccctatttaataaatggtgctgggaaaactggctagccatacgtagaaagctgaaactggatcccttccttataccttatacaaaaatcaattcaagatggattaaagacttaaacggtagacctaaaaccataaaaactgtagaagaaaacctaggcattaccattcaggacataggcacgggcaaggacttcatgtataaaacaccaaaagcaatggcaacaaaagccaaaattgacaaatgggatctaattaaactaaagagcttctacacagcaaaagaaactaccatcagagcgaacaggcaacctacaaaatgggagaaaattttcgcaacctactcatctgacaaagggctaatatccagaatctacaatcaactcaaacaaatttacaagaaaaaaacaaacaaccccatcaaaaagtgggcgaaggacatgaacagacacttctcaaaagaagacatttatgcagccaaaaaacacatgaaaaaatgctcactatcactggccatcagagaaatgcaaatcaaaaccacaatgcgatatcatctcacaccagttagaatggcaatcattaaaaagtcaggaaacaacaggtgctggagaggatgtggagaaatagtaacacttttacactgttggtgggactgtaaactagttcaaccattgtggaagtcagtgtggcgattcctcagggatctagaactagaaataccatttgacccagccatcccattcctgggtatatacccaaaggactataaatcatgctgctataaagacacatgcacactgttggaagttctggccagggcaattaggcaggagaaggaaataaagggtattcaattaggaaaacaagaagtcaaattgtccctgtttgcagatgacatgattgtatatcgagaaaaccccattgtctctgcccaaaatctccttaagttgataagcaacttcagcaaactctcaggatacaaaatcaatgtgcaaaaatcacaagcattcttatacaccaataacagacaaacagagagccaaatcatgagtgaactcccattcacaattgcttcaaagataataaaatacctaggaatccaacttacacgggatgtgaaggacctcttcaaggagaactacaaaccactgctcaatgaaataaaagaggatacaaacaaatggaagaacattccatgctcatgggtaggaagaatcaatatcatgaaaatggccatactgcccaaggtaatttgtagattcagtgccatccgcatcaagctaccaatgactttcttcaaaaaattggaagaaactactttaaagttcatatggaaccaaaaaagagcccacatcgccaagtcaatcctaagccaaaagaacaaagctggaggcatcatgctacctgacttcaaactatactacaaggctacagtaaccaaaacagcatggtactggtaccaaaacagaaatatagatcaatggaacataacagagccctcagaaataatgccgcatatctacaaccatctgatctttgacaaacctgacaaaaataagcaatggggaaaggattccctatttaataaatggtgctgggaaaactggctagccatatgtagaaagctgaaactgcatcccttccttacaccttatacaaaaattaattcaagatggattaaagagttaaatgttagacctaaaaccataaaaagcctagaagaaaacctaggcaataccattcaggacataggcatgggcaaggacttcatgtctaaaacaccaaaagcaatggcaacaaaagccaaaattgacaaatgggatctaattaaactaaagagcttctgcacagcaaaagaaactaccatcagagtgaacaggcaacctacaaaatgggagaaacttttcacaacctactcatctgacaaagggctaatatccagaatctacaatcaactcaaacaaatttacaagaaaaaaaacaaacaaccccatcaaaaagtgggcgaaggtcatgaacagacacttctcaaaagaagacatttatgcagccaaaaaacacatgaaaaaatgctcatcatcactggccatcagagaaatgcaaatcaaaaccacaatgagataccatctcatgccagttag

SEQ ID NO: 142 - DNA, 2739 bp, Homo sapiens
  SIMILAR (1)..(1593): 891254mologous to Homo sapiens putative p150,accession number U93563,Smith-Waterman Score=2473.
atgattatctcaatagatgcagaaaaggcctttggcaaagttcaacaacccttcatgctacaaactctcaataaattaggtattgatgggtcatatctcaaaataataagagctgtctatgacaaacccacagccaatatcacactgaatgggcaaaaactggaagcattccctttgaaaactggcacaagacggggatgccctctctcaccactcctattcaacatagtgttggaagttctggccagggcaattaggcaggagaaggaaataaagggtattcaattaggaaaagaggaagtcaaattgtccctgtttgcagatgacatgattgtatatctagaaaaccccattgtctcagcccaaaatctccttaagctgataagcaacttcagcaaagtctcaggatacaaaatcaatgtacaaaaatcacaagcattcttatacaccaataacagacaaacagagagccaaatcatgagtgaactcccattcacaattgcttcaaagagaataaaatacctaggaatccatcttacaagggacatgaaagacctcttcaaggagaactacaaaccactgctcaatgaaataaaagaggatacaaacaaatggaagaacattccatgctcatgggtaggaagaatcaatatcgtgaaaatggccatactgcccaagattcaatgccatccccatcaagctaccaatgactttcttcacagaattggaaaaaactactttaaatttcatatggaaccaaaaagagcccgcatcgccaagtcaatcctaagccaaaagaacaaagccggaggcatcacactacctgccttcaaactatactacaaggctacagtaacaaaaacagcatggtactggtaccaaaacagagatatagatcaagggaacagaacagagccctcagaaataacgctgcgtatctacaactatctgatctttgacaaacctgagaaaaataagcaatggggaaaggattccctatttaataaatggtgctgggaaaactggctagccatatgtagaaagctgaaactggatcccttcctcacaccttatacaacaattaattcaagatggattaaagacttaaacgttagacctaaaaccataaaaaccctagaagaaaagctaggcattaccattcaggacatagtcatgggcaaggacttcatgtctaaaacaccaaaagcaatggcaacaaaagccaaaattgacaaatgggatctaattaaactaaagagcttctgcacagcaaaagaaactaccatcagagtgaacaggcaacctacaaaatgggagaaaatttttgaaacctactcatctgacaaagggctaatatccagaatctacaatgaactcaaacaaatttacaagaaaaagacaaacaaccctatcaaaaagtgggcgaaggccatgaacagacacttctcaaaagaagacatttatacagccaaaagacacatgaaaaaatgctcaccatcactggctatcggagaaatgcaaatcaaaaccacaatgagataccatctcacaccagttagaatggcaatcattaaaaagtcaggaaacaacagatctgcaatgatccaaatgtttgtgttcccccaagactcctatgttgaaatcctaaccatcaatgtcgtggtagtaggagttctgccttcccagcttcagaggacactgaaagactcctccaaagaggccttagaaacaccaagtccaccttcattccccagctctccattctgcttccctagaaagctgcacacagacttctccttcggccccaaagccaaagcttttatgcataagagactaaaccaggaagaagttgaatctctgaatagaccaataacaggatctgaaattgtggtaataatcaatagcttaccaaccaaaaagagtccaggaccagatggattcacagccgaattctaccagaggtacaaggaggaactgagaataaaatacctaggaatccaacttacaagggatgtgaaggacctcttcaaggagaactacaaaccactgctcaatgaaataaaagaggatacaaacaaatggaagaacattccatgctcatgggtaggaagaatcaatatcgtgaaaatggccatactgcccaagaattggaaaaaaactactttaaagttcatacggaaccaaaaaagagcccgcaccaccaagtcaatcctaagccaaaagaacaaagctggaggcatcacactacctgacttcaaactatactacaaggctacagtgaccaaaacagcatggtacttgtaccaatacagagatatagatcaatgggacagaacagagccctcagaaataacgccgcatatctacaactatctgatctttgacaaacctgagaaaaacaagcaatggggaaaggattccctatttaataaatggtgctgggaaaactggctagccatatgtagaaagctgaaactggatcccttccttacaccttatacaaaaatcaattcaagatggattaaagacttaaacattagacctaaaaccataaaaaccctagaagaaaatctaggcattaccattcaggacataggcacgggcaaggacttcatgtctaaaacaccaaaagcaatggcaacaaaagccaaaattgacaaatgggatctaattaaactaaagagcttctgcacagcaaaagaaactaccatcagagtgaacgggcaacccacaaaatag

SEQ ID NO: 143 - DNA, 2958 bp, Homo sapiens
  SIMILAR (634)..(2847): 981254mologous to Homo sapiens putative p150,accession number U93563,Smith-Waterman Score=3744.
atggggaaaaaacagaacagaaaaactggaaactctaaaacgcagagcgcctctcctcctccaaaggaacgcagttcctcaccagcaacggaacaaagctggatggagaatgattttgacgagctgagagaagaaggcttcagacgatcaaattactctgagctacgggaggacattcaaaccaaaggcaaagaagttgaaaactttgaaaaaaatttagaagaatgtataactagaataatcaatacagagaagtgcttaaaggagctgatggagctgaaaaccaaggctcgagaactacgtgaagaatgcagaagcctcaggagccgatgcgatcaactggaagaaagggtatcagcaatggaagatgaaatgaatgaaatgaaaccaaatctacgtctaattggtgtacctgaaagtgatgcggagaatggaaccaagttggaaaacactctgcaggatattatccaggagaacttccccaatctagcaaggcaggccaacgttcagattcaggaaatacagagaacgccacaaagatactcctcgagaagagcaactccaagacacataattgtcagattcaccaaagttgaaatgaaggaaaaaatgttaagggcagccagagagaaagactttaaaccaacaaagatcaaaagagacaaagaaggccattacataatggtaaagggatcaattcaacaagaggagctaactatcctaaatatttatgcacccaatacaggagcacccagattcataaagcaagtcctgagtgacctacaaagagacttagactcccacacattaataatgggagactttaacaccccactgtcaacattagacagatcaacgagacagaaagtcaacaaggatacccaggaattgaactcagctctgcaccaagcagacctaatagacatctacagaactctccaccccaaatcaacagaatatacatttttttcagcaccacaccacacctattccaaaattgaacacatagttggaagtaaagctctcctcagcaaatgtaaaagaaaagaaattataacaaactatctctcagaccacagtgcaatcaaactagaactcaggattaagaatctcactcaaagccactcaactacatggaaactgaacaacctgctcctgaatgactactgggtacataacgaaatgaaggcagaaataaagatgttctttgaaaccaacgagaacaaagacaccacataccagaatctctgggatgcattcaaagcagtgtgtagagggaaatttatagcactaaacgcctacaagagaaagcaggaaagatccaaaattgacaccctaacatcacaattaaaagaactagaaaagcaagagcaaacacattcaaaagctggcagaaggcaagaaataactaaaatcagagcagaactgaaggaaatagagacacaaaaaacccttcaaaaaatcaatgaatccaggagctggttttttgaaaggatcaacaaaattgatagaccgctagcaagactaataaagaaaaaaagagagaagaatcaaatagacacaataaaaaatgataaaggggatatcaccaccgatcccacagaaatacaaactaccatcagagaatactacaaacacctctacgcaaataaactacaaaatctagaagaaatggatacattcctcgacacatacactctcccaagactaaaccaggaagaagttgaatctgtgaataaaccaataacaggctctgaaattgtggcaataatcaatagtttaccaaccaaaaagagtccaggaccagatggattcacagccgaattctaccagaggtacaaggaggaactggtaccattccttctgaaactattccaatcaatagaaaaagagggaatcctccctaactcattttatgaggccagcatcattctgataccaaagccgggcagagacacaaccaaaaaagagaattttagaccaatatccttgatgaacattgatgcaaaaatcctcaataaaatactggcaaaccgaatccagcagcacatcaaaaagcttatccaccatgatcaagtgggcttcatccctgggatgcaaggctggttcaatatacgcaaatcaataaatgtaatccagcatataaacagagccaaagacaaaaaccacatgattatctcaatagatgcagaaaaagcctttgacaaaattcaacaacccttcatgctaaaaactctcaataaattaggtattgatgggacgtatttcagaataataagagctatctatgacaaacccacagccaatatcatactgaatgggcaaaaactggaagcattccctttgaaaactggcacaagacagggatgccctctctcaccgctcctattcaacatagtgttggaagttctggccagggcagtcaggcaggagaaggaaataaagggtattcaattaggaaaagaggaagtcaaattgtccctgtttgcagacgacatgattgtttatctagaaaaccccattgtctcagcccaaaatctcctcaagctgataagcaacttcagcaaagtctcaggatacaaaatcaatgtacaaaaatcacaagcattcttatacaccaacaacagacaaacagagagccaaatcatgagtgaactcccattcacaattgcttcaaagagaataaaatacctaggaatccaacttacaagggatgtgaaggacctcttcaaggagaactacaaaccactgctcaaggaaataaaagaggacacaaacaaatggaagaacattccatgctcatgggtaggaagaatcaatatcgtgaaaatggccatactgcccaagcatgggtgggggtgtcttgttgctcctcacgtggtccctactgtcctcaccatacaactgaggtcgcctcgttacccctgcactgtggtgaacgtcctggctggagtctag

SEQ ID NO: 144 - DNA, 1525 bp, Homo sapiens
  SIMILAR (6)..(386): 981254mologous to Homo sapiens bA465L10.1 (novel protein similar to Drosophila CG11399),accession number AL162458,Smith- Waterman Score=656.
aagtgcggtgtaattcccctgacagtaggaaggtggtcaaatggaatgtggaagacacctttagctggcttcggaaggaccactcagcctccaaggaggactacatggatcgcctggagcatctgcggaggcagtgtggcccccacgtctcggccgcagccaaggactccgtggaaggcatctgcagtaagatctaccacatctccctggagtacgtcaaacggatccgagagaagcaccttgccatcctcaaggaaaacaacatctcagaggaggtggaggcccctgaggtggagccccgcctagtgtactgctacccagtccggctggctgtgtctgcaccgcccatgcccagcgtggagatgcacatggagaacaacgtggttctgcatccggtataagggagagatggtcaaggtcagccgcaactacttcagcaagctgtggctcctttaccgctacagctgcattgatgactctgcctttgagaggttcctgccccgggtctggtgtcttctccgacggtaccagatgatgttcggcgtgggccttcttacgagggggactggcctgcagggattcgctgcctgttgcatgtctttgaggccctccaccgactctttggcgtcagtttccgagtgcttcgcctcacccctcaactgctacttccgccagtactgttctgccttccccgacacagacggctactttggctcccgcgggccctgcctagactttgctccactgagtggttcatttgaggccaaccctcccttctgcgaggagcttcatggatgccatggtctctcactttgagagactgcttgagagctcaccggagcccctgttccttcatcggtgttcatccctgagtgggcggggaacccccaacaccagcgctcacccgcatggaagcagagccgcttcaaacgccaccagttgatcctgcctgcctttgagcatgagtaccgcagtggctcccagcacatctgcaagaaggaggaaatgcactacaaggccgtccacaacacggctgtgctcttcctacagaacgaccctggctttgccaagtgggcgccgacgcctgactggctgcaggagctgagtgctgcctaccggcagtccaggcccgcagccacagctctggttcttcctcatcgttcctacctcggaggcccaaggaccgggattcggggccgtgagcagggtcctaagccgcgagcctcaccccacttaacatattcttgcggggaagaaggagccccaggggtgcttagtctggacttgctgggactcgggcccctggggcctcagagggaccccggctgccactgacatatgaagattatggttctgccagggctcccctccctgcctgtccccaagtcctcacctcaaactccctccaagtcccatgtatataggtcctgatgccttcccaaccccgcccctcaccctgttgcccaccttgtttcatttgtaaaaggaaatacagaaacccccccaagaaaaaaaaaaaaaaaaa

SEQ ID NO: 145 - DNA, 3105 bp, Homo sapiens
  SIMILAR (445)..(2691): 951254mologous to Homo sapiens putative p150,accession number U93572,Smith-Waterman Score=3686.
atggggaaaaaacagaacagaaaaactggaaactctaaagagcagagcacctctcctcctccaaaggaatgcagttcctcaccagcaagggaacaaagctggacggagaatgactttgatgagctgagagaagaaggcttcagacgatcaaattactctgagctatgggaggacattcaaaccaaaggcaaagaagttgaaaactttgaaaaaaatttagaagaatgtataactagaataaccaatacaaagaagtgcttaaaggagctgatggagctgaaaaccaaggctcgagaactacgtgaagaatgcagaaacctcaggagccgatgcgatcaactggaagaaagacagatcaacgagacagaaagtcaacaaggatacccaggaattgaactcagctctgcaccaagcggacctaacacacatctacagaactctccaccccaaatcaacagaatatacattttttcagcaccacaccacacctattccaaaactgaccacatacttggaagtaaagctctcctcagcaaatgtaaaagaacagaaattataacaaactatctctcagaccacagtgcaatcaaactagaactcaggattaagaatctcactcaaagccgctcaactacatggaaactgaacaacctgctcctgaatgactactgggtacataacgaaatgaaggcagaaataaagatgttctttgaaaccaacgagaacaaagacacaacataccagaatctctgggacgcattcaaagcagtgtgtagagggaaatttatagcactaaatgcccacaagagaaagcaggaaagatccaaaattgataccctaacatcacaattaaaagaactagaaaagcaagagcaaacacattcaaaagctagcagaaggcaagaaataactaaaatcagagcagaactgaaggcaatggagacacaaaaaacccttcaaaaaatcaatgaatccaggagctggttttttgaaaggatcaacaaaatagatagactgctagcaagactaataaagaaaaaaagagagaagaatcaaatagacacaataaaaaatgataaaggggatatcaccaccgatcccacagaaatacaaactaccatcagagaatactacaaacacctctacgcaaataaactagaaaatctagaagaaatggataaattcctcgacacatacactctcccaagactaaaccaggaagaagttgaatctctgaatagaccaataacaggatctgaaattgtggcaataatcaatagcttaccaaccaaaaagagtccaggaccagatggattcacagccgaattctaccagaggtacaaggaggaactggtaccattccttctgaaactattccaatcaataggaaaagagggaatcctccctaactcattttatgaggccagcatcattctgataccaaagcctggcagagacacaaccaaaaaagagagttttagaccaatatccttgatgaacattgatgcaaaaatcctcaataaaatactggcaaaacgaatccagcagcacatcaaaaagcttatccaccatgatcaagtgggcttcatccctgggatgcaaggctggttcattatatgcaaatcaataaatgtaatccagcatataaacagagccaaagacaaaaaccacatgattatctcaatagatgcagaaaaggcctttgacaaaattcaacaacccttcatgctaaaaactctcaataaattaggtattgatgggacatatttaaaaataataagagctatctatgacaaacccacagccaatatcatactgaatggacaaaaactggaagcattccctttgaaaactggcacaagacagggatgccctctctcaccactcctattcaacatagtgttggaagttctggccagggcaatcaggcaggagaatgaaataaagggtattcaattaggaaaacaggaagtcaaattgtccctgtttgcagacgacatgattgtatatctagaaaaccccattgtctcagcccaaaatctccttaagctgataagcaacttcagcaaagtctcaggatacaaaatcaatgtacaaaaatcacaagcattcttatacaccaacaacagacaaacagagagccaaatcatgagtgaactcccattcacaattgcttcaaagagaataaaatacctaggaatccaacttacaagggatgtgaaggacctcttcaaggagaactacaaatcactgctcaaggaaataaaagaggatacaaacaaatggaagaacattccatgctcatgggtaggaagaatcaatatcgtgaaaatggccatactgcccaaggtaatttatagattcaatgccatccccatcaagctaccaatgcctttcttcacagaattggaaaaaactattttaaagttcatatggaaccaaaaaagagcccgcattgccaagtcaatcctaagccaaaagaacaaagctggaggcatcacactacctgacttcaaactatactacaaggctacagtaaccaaaacagcatggtactggtaccaaaacagagatatagatcaatggaacagaacagagccctctgaaataacgccgcatatctacaactatctgatctttgagaaacctgacaaaaacaagaaatggggaaaggattcgtatttaataaatggtcctcagagtaccatgtcagctcagccgtggatgcatggctactcagctcagccaaggcatcggttttctagaaggcaatgtactgctttagctcaggccgatggacaaatgcaacagttactgctgatttccacagactccattactgcaggctatgggagagcaccacctaatgcctgcgaggtgtggataaaagtctggattccccacttgacctctgctgatattcatggggaagatactcctcattatttatgccccggaccagactcactggcatccaaaatcaagaagagttacctgtggggtaatgaggaagaaaggcccccggacatggagaatggagggagccagatacaccgcattccagcaacaggcaaagggatccaggctcccctggaaggagcctga

SEQ ID NO: 146 - DNA, 2826 bp, Homo sapiens
  SIMILAR (1027)..(2754): 961254mologous to Homo sapiens putative p150,accession number U93564,Smith-Waterman Score=2899.
atggaatactatgcagccataaaaaatgatgagttcatgtcctttgcagggacatggatgaagctgggaaccatcattctcagcaaactaccacaaggacaaaaaaccaaacaccacatgttctcactcacagcaccacaccacacctattccaaaattgaccacataattggaagtaaagctctcctcagcaaatgtaaaagaacagaaattataacaaactatctctcagaccacagtgcaatcaaactagaactcaggattaagaaactcactcaaaaccgctcaactacatggaaactgaccaacctgctcctgaatgactactgggtacataacgaaatgaaggcagaaataaagatgttctttgaaacctacgagaacaaagacacaacataccagaatctctgggacgcattcaaagcagtgtgtagagggaaatttatagcactaaatgcccacaagagaaagcagaaaagatccaaaattgacatcctaacatcacaattaaaagaactagaaaagcaagagcaaacacattcaaaagctaacagaaggcaagaaataaccaaaatcagagcagaactgaaggaaatagagacacaaaaaacccttcaaaaaatcaatgaatccaggagctggttttttgaaaggatcaacaaaattgatagaccgctagcaagactaataaagaaaaaaagagagaagaatcaaatagacgcaataaaaaatgataaaggggatatcaccaccgatcccacagatataaaaactaccatcagagaatactacaaacgcctctacacaaataaactagaaaatctagaagaaatgcataaattcctcgacacacacactctcccaagactaaaccaggaagaagttgaatctctgaatagaccaataacaggagctgaaattgtggcaataatcaatagcttaccaaccaaaaagagtccaggactagatggattcacagccaaattctaccagaggtacaaggaggaactgcatcatcctgataccaaagccgggcagagacacaaccaaaaagagaattttagaccaatacccttgatgaacattgatgcaaaaatcctcaataaaatactggcaaaccgaatccagcagcacatcgaaaagcttatccaccatgatcaagtgggcttcatccctgggatgcaaggctggttcaatatacgcaaatcaataaatgtaatccagcatataaacagaaccaaagacaaaaaccacatgattatctcaatagatgcagaaaaggcctttgacaaaattcaacaacccttcatgctaaaaactctcaataaattaggtattgatgggacgtatctcaaaataataagagctatctacgacaaacccacagccaatatcatactgaatgggcaaaaactggaagcattccctttgaaaactggcacaagacagggatgccctctctcaccactcctattcaacatagtgttggaagttctggccagggcaattaggaaggagaaggaaataaagggtattcaattaggaaaggaggaagtcaaattgtccctgtttgcagatgacatgattgtatatctagaaaaccccatcgtctcagcccaaaatctccttaagctgataagcaacttcagcaaagtctcaggatacaaaatcaatgtacaaaaatcacaagcattcttatacaccaacaacagacaaacagagagccaaatcatgagtgaactcccattcacaattgcttcaaagagaataaaatacctaggaatccaacttacaagggatgtgaaggacctcttcaaggagaactacaaaccactgctcaaggaaataaaagaggatacaaacaaatggaagaacattccatgctcatgggtaggaagaatcaatatcgtgaaaatggccatactgcccaaggtaatttacagattcaatgccatccccatcaagctaccaatgactttcttcacagaattggaaaaaactactttaaagttcatatggaaccaaaaaagagcccgcatcgccaagtcaatcctgagccaaaagaacaaagctggaggcatcacactacctgacttcaaactatactacaaggctacagtaaccaaaacagcgtggtactggtaccaaaacagagatatagatcaatggaacagaacagagccctcagaaataatgccgcatatctacaactatctgatctttgacaaacctgacaaaaacaagcaatggggaaaggattccctagttaataaatggtgctgggaaaactggctagccatatgtagaaagctgaaactggatcccttccttacaccttatacaaaaatcaattcaagatggattaaagacttaaacgttagacctaaaaccataaaaaccctagaagaaaacctaggcaataccattcaggacataggcatgggcaaggacttcatgtctaaaacaccaaaagcaatggcaacaaaagacaaaattggcaaatgggatctaattaaactaaagagcttctgcacagcaaaagaaactaccatcagagtgaacaggcaacctacagaatgggagaaaatttttgcaacctactcatctgacaaagggctaatatccaggatctacaatgaactcaaacaaatttacaagaaaaaaacaaacaaccccatcaaaaagtgggcaaaggacatgaacagacacttctcaaaagaaggcatttatgcagccaaaaaacacatgaaaaaaatgctcaccatcactggccatcagagaaatgcaaatcaaaaccacaatgagataccatttcacaccagttag

SEQ ID NO: 147 - DNA, 2973 bp, Homo sapiens
  SIMILAR (352)..(1278): 941254mologous to Homo sapiens putative p150,accession number U93570,Smith-Waterman Score=1505.
atggaagatgaaatgaatgaaatgaagcgagaagggaagtttagagaaaaaagaataaaaagaaacgaacaaagcctccaagaaatatgggaccatgtgaaaagaccaaatctacatctgattggtgtacctgaaagtgacagggagaatggaaccaagttggaaaacactctgcaggatattatccagcagaacttccccaatctagcaaggcaggccaacattcaaattcaggaaatacagagaacgccacaaagatactcctcaagaagagcaactccaagacacagaattgtcagattcaccaaagttgaaatgaaggaaaaaatcttaagggcagccagagagaaagactttaaaccaacaaagatcagaagagacaaagaaggccattacataatggtaaagggatcaattcaacaagaagagctaactatcctaaatatatatgaacccaatacaggagcacccagattcataaagcaagtccttagtgacctacaaagagacttagactcccacacattaataatgggagactttaacaccccactgtcaacactggaaagatcaacgagacagaaagttaacaaggatacccaggaattgaactcagctctgcaccaagcggacctaatagacatctacagaactctccaccccaaatcaacagaatatacattcttttcagcaccacaccacacctactccaaaattgaccacatagttggaagtaaagcactcctcagcaaacgtaaaagaacagaaattataacaaactgtctctcagaccacagtgcaatcaaactagaactcaggattaagaaactcactcaaaaccgctcaactacatggaaactgaacaacctgctccggaatgactactgggtacataacgaaatgaaggcagaaattaagatgttctttgaaaccaaccagaacaaagacacaacataccagaatctctgggacacattcaaagcagtgtgtagagggaaatttacaccactaaatgcccacaagagaaagcaggaaaggtctaaaattgacaccctaacatcacaattaaaagaactagaaaagcaagagcaaacacattcaaaagctagcagaaggcaagaaataattaaaatcagagcagaactgaaggaaacagagacacaaaaaacccttcaaaaaattaatgaatccaggagctggttttttgaaaggattagaaaaattgatagaccgctagcaagactaataaagaagaaaagagagaagaatcaagtagacgaagaagttgactctctgaataggccaataacaggctctgaaattgtggcaataatcaatagcttaccaaccaaaaaaagtccaggaccagatggattcacagccgaattctaccagaggtacaaagaggagctggtaccattccttctgaaactattccaatcaatagaaaaagagggaatcctccctaactcattttatgaggctagcatcatcctgataccaaagcctggcagagacacaaccaaaaaagagaattttagaccaatatccttgatgaacatcgatgcaaaaatcctcaataaaatactggcaaaccgaatccagcagcacatcaaaaagcttatccaccatggtcaagtgggcttcatccctggaatgcaaggctggttcaatatatgcaaatcaataaatgtaatccagcatataaacagaaccaaagacaaaaaccacatgattatctcaatagatgcagaaaaggcctttgataaaattcagcaacgcttcatgctaaaaactttcaataaattagtgttggatgttctggccagggcaatcaggcaggagaaggaaataaagggcattgaattaggaaaagaggaagtcaaattgtccctgtttgcagatgacatgattgtatatctagaaaaccccattgtctcagcccaaaatctccttaagctgataagcaacttcaacaaagtctcaggatacaaaatcaatgtacaaaaatcacaagcattcttacacaccaataacagacaaacagagagccaaatcacgagtgaactcccattcacaattgcttcaaagagaagaaaatacctaggaatccaacttacaagggacatgaaggacctcttcaaggacaactacaaaccactgctcaatgaaataaaagaggatacaaacaaatggaagaacattccatgctcatgggtaggaagaatcaatatcatgaaaatggccatactgcccaaggctacagtaaccgaaacagcatggtactggtaccaaaacagagatatcgatcaatggaacagaacagagccctcagaaataatgccgcgtatctaccactatctgatctttgagaaacctgacaaaaacaagcaatggggaaaggattccctatttaataaatggtgctgggaaaactggcttgccatatgtagaaagctgaaactggatcccttcctcacaccttatacaaaaattaattcaagatggattaaagacttaaatgttagacctaaaaccataaaaaccctagaagaaaacctaggcaataccattcaggacataggcatgggcaaggacttcatgtctaaaacaccaaaagcaatggcaacaaaagccaaaattgacaaatgggatctaattcaactaaagagcttctgcacagcaaaagaaactaccatcagagtgaacaggcaacctatagaatgggagaaaatttttgcaaactactcatctgacaaagggctaatatccagaatctacaatgaactcaaacaagtttacaagaaaaaaacaaacaaccccatcaaaaagtgggcaaaggacatgaacagacatttctcaaaagaagacatttatgcagacaaacaggcatatgaaaaaatgctcaagatcactggccatcagagaaatgcaaatccaaaccacaatgagataccatctcacaccagttag

SEQ ID NO: 148 - DNA, 2859 bp, Homo sapiens
  SIMILAR (841)..(2658): 931254mologous to Homo sapiens putative p150,accession number U93563,Smith-Waterman Score=2981.
atggtaaagggatcaattcaacaagaagagctaactatcctaaatatatatgcacctgcaggagcacccagattcataaagcaagtcctgagtgacctacaaagagacttagacttccacacattaataatgggagactttaacaccccactgtcaacattagacagatcaacgagacagaaagtcaacaaggatacccaggaattgaactcagctctgcaccaagcagacctaatagacatctacagaactctccactccaaatcaacagaatatacatttttttcagcaccacaccacacctattccaaaattgaccatttacttggaagtaaagctttcctcagcaaatgtaaaagaacagaaattataacaaactatctctcagaccacagtgcaatcaaattagaactcaggattaagaatctcactcaaaaccgctcaactacatggaaaccgaacaacctgctcctgaatgactactgggtacataatgaaatgaaggcagaaataaagatgttctttgaaaccaacgagaacaaagacacaacataccagaatctctgggacgcattcaaagcagtgtgtagagggaaatttatagcactaaatgcccacaagagaaagcaggaaagatccaaaattgacaccctaacatcacaagtaaaagaactagaaaagcaagagcaaacacattcaaaagctagcagaagactaaaccaggaagaagttgaatctctgaatagaccaataacaggatctgaaattgtggcaataatcaatagcttaccaacaaaaagagtccaggaccagatggattcacagccaaattctaccagagaaaaagagggaatcctccctaactcattttatgaggccagcatcattctaataccaaagccgggcagagacacaaccaaaaaagagaattttagaccaatatccttgatgaacattgatgcaaaaatcctcaataaaatactggcaaaccaaatccagcagcacatcaaaaagcttatccaccatgatcaagtgggcttcatccctgggatgcaaggctggttcaatatacacaaatcagtaaatgtaatccagcatataaacagagccaaagacaaaaaccacatgattatctcaatagatgcagaaaaggcctttgacaaaattcaacaaccctacatgctaaaaactctcaataaattaggtattgatgggacatatttcaaaataataagagctatctatgacaaacccacagccaatatcatactgaatgggcaaaaactggaagcattccctttgaaaactggcacaagacagggatgctctctctcaccactcctatttaacatagtgttggaagttctggccagggcaattaggcaggagaaggaaataaagggtattcaattaggaaaagaggaagtcaaattgtccctgtttgcagactacatgattgtatatctagaaaaccccattgtctcagcccaaaatctccttaagctgataagcaacttcagcaaagtctcaggatacaaaatcaatgtacaaaaatcacaagcattcttatacaccaacaacagacaaacagagagccaaatcatgagtgaactcccattcacaattgcttcaaagagaataaaacacctaggaatccaacttacaagcgacatgaaggacttcttcaaggagaactgcaaaccactgctcaatgaaataaaagaggatacaaacaaatggaagaacattccatgctcatgggtaggaagaatcaatatcgtgaaaatggccatattgcccaagctacccatgactttcttcacagaattggaaaaaactactttaaagttcatatggaaccaaaaaagagcctgcatcaccaagtcaaacctaagccaaaagaacaaagctggaggcatcacgctacctgacttcaaactatactacaaggctacagtaaccaaaacagcatggtactggtaccaaaacagagatatagatcaatggaacagaacagagccctcagaaataacgccgcatatctacaactatctgatctttgacaaacctgagaaaaacaagcaatggggaaaggattccctatttaataaacggttctgggaaaactggctagccatatttagaaagctgaaactggatcccttccttacaccttatacaaaaattaattcaagatggattaaagacttacatgttagacctaaaaccataaaaaccctagaagaaaacctaggcattaccattcaggacacaggcatgggcaaggacttcacgtctaaaacaccaaaagcaatggcaacaaaagccaaaattgataaatgggatctaattaaactaaagagcttctgcacagcaaaagaaactaccatcagagtgaacaggcaacctagaaaatgggagaaaattttcgcaacctactcatctgacaaatggctaatatccagaatctacaatgaactcaaacaaatttacaagaaaaaaacaaataaccccatcaaaaagtgggcgaaggacatgaacagacacttctcaaaagaagacatttatgcagccaaaaaacacatgaaaaaatgctcaccatcactggccatcagagaaacgcaaatcaaaaccacaatgagataccatctcacaccaggccacccaatcctgaatttgaaacacagtgaattgcatcatgctccgcagtcttcatcatggaagagggagggactggaccttgaagaaagggtagaatttgggcagatcaagaagaatgcagggacacttcagaagaggagaggatgcgagccaaggcatggagacacaaacattggggacatatttgtgagacagtaa

SEQ ID NO: 149 - DNA, 3786 bp, Homo sapiens
  SIMILAR (1018)..(2883): 951254mologous to Homo sapiens putative p150,accession number U93572,Smith-Waterman Score=3127.
atggtaaagggatcaattcaacaagaagagctaactatcctaaatatctatgcacccaatacaggagcacccagattcataaagcaagtcctgagtgacctacaaagagacttagactcccacacattaataatgggagactttaacaacccactgtcaacattagacagatcaatgagacagaaagtcaacaaggatacccaggaattgaactcagctctgcaccaagtggacctaatagacatctacagaactctccaccacaaatcaacagaatatagatttttttcagcaccacaccacacctattccaaaattgaccacatacttggaagtaaagctctcctcagcaaatgtaaaaggacagagattataacaaactatctctcaggccacagtgcaatcaaactagaactcaagattaagaatctcactcaaaaccgctcaactacatggaaactgaacaacctgctcctgaatgactactggatacataacgaaatgaaggcagaaataaagatgttctttgaaaccaatgagaacaaagacacaacataccagaatctctgggatgcattcaaagcagtgtgtagagggaaatttatagcactaaatgcccacaagagaaagcaggaaagatccaaaattgacaccctaacatcacaattaaaagaactagaaaagcaagagcaaacacattcaaaagctggcagaaagaaagaaataactaaaatcagagcacaactgaaggaaatagagacacaaaaaacccttaaaaaattaatgaatccaggagctgaaatacaaactaccatcagagaatactacaaacacctctatgcaaagaaactagaaaatctagaagaaatggataaattcctcgacacatacactctcccaagactaaaccaggaagaagttgaatctctgaatagaccaataacaggagctgaaattgtggcaataatcaatagtttaccaaccaaaaagtccaggaccagatggattcacagccgaattctaccagaggaggccagcatcattctgataccaaagccgggcagagacacaaccaaaaaagagaattttagaccaatatccttgatgaacattgatgcaaaaatcctcaataaaatactggcaaaacgaatccagcagcacatcaaaaagcttatccaccatgatcaagtgggcttcatccctgggatgcaaggctggttcaatatacacaaatcaataaatgtaatccagcatataaacagagccaaagacaaaaaccacataattatctcaatagatgcagaaaaagcctttgacaaaattcaacaacccttcatgctaaaaactctcaataaattaggtattgatgggacatatttcaaaataataagagctatctatgacaaacccacagccaatatcatactgaatgggcaaaaactggaagcattccctttgaaaactggcacaagacagggatgccctctctcaccactcctattcaacatagtgttggaagttctggccagggcaattaggcaggagaaggaaataaagggtattcaattaggaaaagaggaagtccaattgtccctgtttgcagatgagatgattgtatatctagaaaaccccattgtctcagcccaaaatctccttaagctgataagcaacttcagcaaagtctcaggatacaaaatcaatgtacaaaaatcacaagcattcttatacaccaacaacagacaaacagagagccaaatcatgagtgaactcccattcacaattgcttcaaagagaataaaatacctaggaatccaacttacaagggatgtgaaggacctcttcaaggagaactgcaaaccactgctcaatgagataaaagaggatacaaacaaatggaagaacattccatgctcatgggtaggaagaatcaatatcatgaaaatggccatactgcccaaggtaatttatagatttaatgccatccccaccaagccaccaatgactttcttcacagaattggaaaaaactactttaaagttcatatggaaccaaaaaagagcccgcatcgccaagtcaattctaagccaaaagaacaaagctggaggcatcacactacctgacttcaaactatactacaaggctacagtaaccaaaacagcatggtactggtaccaaaacagagatctagatcaatggaacagaacagagccctcagaaataacgccgcatatctacagctatctgatctttgacaaacctgagaaaaacaagcaatggggaaaggattccctatttaataaatggtgctgggaaaactggctacccatatgtagaaagctgaaactggatcccttccttacaccttatacaaaaatcaattcaagatggattaaagacttaaatgttagacctaaaaccataaaaaccctaaaagaaaacctaggcattaccattcaggacataggcatgggcaaggacttcatgtctaaaacaccaaaagcaatggcaacaaaagacaaaattgacaaatgggatctaattaaactaaagagcttctgcacagcaaaagaaactaccatcagagtgaacaggcaacctacaaaatgggagaaaattttcgcaacctactcatctgacaaagggctaatatcaagaatctacaatgaactcaaacaaatttacaagaaaaaaacaaacaaccccatcaacaagtgggtgaaggacatgaacagacacttctcaaaagaagacatttatgcagccaaaaaacacatgaaaaaatgctcatcatcactggccatcagagaaatgcaaatcaaaaccacaatgagataccatctcacaccacttagaatggcgatcattaaaaagtcaggaaacaacagtgccagccccactgccaggaacaagacagccaggaatcagaggaccaagatgatagcagtgacggccccccgaaacagggctccactggagctggagctgattctgtaccggcaaaacagacagagtaaaactcatattttggaaacaaacaatacatcagctgagcttctggttccatttgaagaagactacttaattgaaataagaacagtcagtgatggtggagatggaagcagcagtgaggaaattaggattccaaaaatgtcaatgattgatcacattctgcccaagtcaattccagaagaactgcagaatggggagggatttggatatatcatcatgttccggccagtgggctcgacaacctggtccaaggagaaagtgtcatctgtggaatcatcaaggtttgtctacagaaatgaaagcatcatcccactgtctccctttgaagtcaaagtgggtgtgtataataatgaaggagaaggatccctgagtactgtgaccattgtctactctggggaagatgatggttatgtctttctctggatggtagaacctcaactggccccaaggggaacttctctccagagtttttctgcttctgaaatggaggtttcatggaatgctattgcctggaatagaaacactggaagagtgctgggctatgaggtcttatactggacagatgactccaaagaatccatgataggtaaaattagagtcagtggaaatgtcacaaccaaaaacatcacggggctgaaagctaataccatctactttgcttccgtaagagcttacaacactgctgggacagggccctcaagccccccagtcaatgttaccaccaaaaagtctcgataccttattactacagcttacttggaagtccctgaaatctaa

SEQ ID NO: 150 - DNA, 3279 bp, Homo sapiens
  SIMILAR (3002)..(3157): 961254mologous to Homo sapiens putative p150,accession number U93563,Smith-Waterman Score=264.
atgggagactttaacaccccactgtcaacattagacagatcaacgagacagaaagttaacaagcatacccaggaattgaactcagctctgcaccaagcagacttaatagacatctacagaactctccaccccaaatcaacagaatatacattttgttcagcaccacaccacacctattccaaaattgatcacatagttggaagtaaagctctcctcagcaaatgtaaaagatcagaaattataacaaactgtctctcagaccacagtgccatcaaactagaactcaggattaagaaactcactcaaaaccgctcaactacatggaaactgaacaacctgctcctgaatgactactgggtacataacgaaatgaaggcagaaataaagatgttctttgaaaccaaccagaacaaagacacaacataccagaatctctgggacacattcaaagcagtgtgtagatggaaatttatagcactaaatgcccacaagagaaagcaggaaagatctaaaattgacaccctaacatcacaattaaaagaactagaaaagcaagagcaaacacattcaaaagctagcagaaggcaagaaataactaaaattagagcagaactgaaggaaatagagacacaaaaaacccttcaaaaaattaatgaatccaggagctggttttttgaaaggatcaacaaaactgatagaccgctagccagactaataaagaagaaaagacagaataatcaaatatacgcaataaaaaatgacaaacgggatatcaccaccgatcccacagaaatacaaactaccatcagggaatactacagatacctctacacaaataaactagaaaatctagaagagatggataaattcctcgacacatacaccctcccaagactaaaccaggaagaaggtgactctctgaatagaccaataacaggctctgaaattgtggcaataaccaatagcttaccaaccaaaaagagtccaggaccagatggattcacagccgaattctaccagaggtacaaggaggaactggtaccattccttctgaaactattccaatcaatagaaaaagagggaatcctccctaactcattttatgaggccagcatcatcctgataccaaagccgggcagacacacaacagaaaaagagaattttagaccaatatccttgatgaatattgatgcaaaaatcctcaataaaatactggcaaaccgaatccagcagcacatcaaaaagcttatccaccatgatcaagtgggcttcatccctgggatgcaaggctggttcaatatacgcaaatcaagaaatgtaatccagcatataaacagaaccaaagacaaaaaccacatgattatctcaatagatgcagaaaaggcctttgacaaaattcaacaacgcttcatgctaaaatctctcaataaactaggtgttgatgggacctatctcaaaataataagagctatctatgacaaacccacagccaatatcatactgaatgggcaaaaactggaagcattccctttgaaaactggcacaagagagggatgccctctctcaccactcctattcaacatagtgttggaagttctggccagggcaattaggcaggagaaggaaataaagggtattcaattaggaaaagaggaagtcaaattgtccctgtttgcagatgacatgattgtatatctagaaaaccccattgtctcagcccaaaatctccttaagctgataagcaacttcagcaaagtctcaggatacaaaatccatgtacaaaaatcacaagcattcttatacaccaataacagacaaacagagagccaaatcatgagtgaactcccattcacaattgcttcaaagagaataaaataccttggaatccaacctacaaaggacgtgaaggacctcttcaaggagaactacaaaccactgctcaaggaaataaaagaggatacaaacaaatggaagaacattccatgctcatgggtaggaagaatcaatatcgtgaaaatggccatactgcccaaggtaatttatagattcaatgccatccccatcaagctaccaatgactttcttcacacaattggaaaaaactactttaaagttcatatggaaccaaaaaagagcccgcattgccaagtcaatcctaagccaaatgaacaaagctggaggcatcatgctacctgacttcaaactatactacaaggctacagtaaccaaaacagcatggtactggtaccaaaacagagatattgaccaatggaacagaatagagccctcagaaataatgccacatatctacaactatctgatctttgacaaacctgagaaaaacaagcaatggggaaaggattccctatttaataaatggtgctgggaaaactggctagccatatggagaaagctgaaactggatcccttccttacaccttatacaaaaactaattcaagatggattaaagacttaaacgttagacctaaaaccataaaaaccctagaagaaaacctaggcattaccattcaggacataggcatgggcaaggacttcatgtctaaaacaccaaaagcaatagcaacaaaagccaaaattgacaaatgggatctaattaaactaaggagcttctgcacagcaaaagaaactaccatcagagtgaacaggcaacctacaaaatgggagaaaattttcacaacctactcatctgacaaagggctaatatccagaatctacaaagaactcaaacaaatttacaagaaaaaaacaaacagccccatcaaaaagtgggcgaaggacatgaacagacacttctcaaaagaagacatttatgcagccaaaagacacatgaaaaaatgctcaccatcactggctatcagagaaatgcaaatcaaaaccacaatgagataccatctcacaccagttagaatggcaatcactaaaaagtcaggaaacaaccggtgttggagaggatgtggagaaataggaacacttttacactgttggaatccaacttacaagggatgtgaaggacctcttcaaggagaacgacaaaccactgctcaaggaaataaaagaggatacaaacaaatggaagaacattccatgctcatgggtaggaagaatcaatatcgtgaaaatggccatactgcccaagaaagggtgcagcagctcatggtgctgaaccaggcaaacagttgctttgaatgcctggagatttgccttggtgtggagcggaaggggccctgcggcacctcaatttatgtccgtgaagggtga

SEQ ID NO: 151 - DNA, 3045 bp, Homo sapiens
  SIMILAR (832)..(2844): 941254mologous to Homo sapiens putative p150,accession number U93569,Smith-Waterman Score=3249.
atggggaaaaaacagagcagaaaaactggaaactctaaaaatcagagcgcctctcctcctccaaaggaacgcagctcctcaccagcaatggaacaaagctggatggagaatgactttgatgacttgagagaagaaggcttcagacaatcaaactactctgagctaaaggaggaagttcgaacccatggcaaagaagttaaaaaccttgaaaaaaaattagacgaatggctaactagaataaccaatgcagagaagtccttaaaggacctgatggagctgaaaaccacagcccgagaactacatgatgaatgcacaagcctcaaaagggtatcagtgacggaagatcaaatgaatgaaatgaagcgagaagagaagtttagagaaaaaagaataaaaagaaatgaacaaagcctccaagaaatatgggactatgtgaaaagaccaaatctacacctgattggtgtacctgaaagtgacagggagaatggaaccaagttggaaaacactctgcaggatattatccaagagaacttccccaatctagtaaggcaggccaacattcaaattcaggaaatacagagaacgccacaaagatactcctcgagaagagcaactccaagacacataattgtcagattcaccaaagttgaaatgaaggaaaaaatgttaagggcagccagagagaaaggtcgggttacccacaaagggaagcccatcagactaacagctgatctcttggcagaaactctacaagccagaagagagtgggggccaatattcaacattcttaaagaaaagaattttcaacccagaatttcatatccagccaaactaagcttcatagacagatcaacgagacagaaagttaacaaggatacccaggaattgaactcagctctgcaccaagcggacctaatagacatctacagaactctccaccccaaatcaacagaatatacattcttttcagcaccacaccacacctattccaaaattgaccacatagttggaagtaaagcactcctcagcaaatgtaaaagaacagaaattataacaaactgtctctcagaccacagcgcaatcaaactagaactcaggattaagaaactcactcgaaaccactcaactacatggaaactgaacaacctgcttctgaatgactactgggtacataatgaaatgaaggcagaaataaagatgttctttgaaaccaacgagaacaaagacaaaacataccagaatctctgggacacattcaaaacagtgtgtagagggaaatttatagcactaaatgcccacaagagaaagcaggaaagatctaaaattgacaccctaacatcacaattaaaaggacttgagaagcaagagcaaacacattcaaaagctagcagaaggcaagaaataactaagatcagagcagaactgaaggaaatagagacacaaaaaacccttcaaaaaatcaacgaatccaggagctggttttttgaaaagatcaacaaaattgatagaccgctagcaagactaataaagaataaaagagaggagaatcaaatagacgcaataaaaaatgataaaggggatatcaccactgatcccacagaaatacaaactgccatcagcgaatactataaacacctctacgcaaataaactggaaaatctagaagaaatggataaattcctcgacacctacaccctcccaagactaaaccaggaagaagttgaatctctgaatagaccaataacaggctctgaaattgaggcaataattaatagcttaccaaccaaaaaaagtccaggaccagatggattcatggccgaattctaccagagggacaaggaggagctggtaccattccttctgaaactgttccaatcaatagaaaaagagggaatcctccctaactcattttatgaggccagcatcatgctgataccaaagcctggcagagacacaacaaaaaaagagaattttagaccaatatccctgatgaacatcgatgcaaaaatcctcaataaaatactggcaaaccgaatccagcagcacatcaaaaagcttatccaccatgatcaagtgggcttcatccctgggatgcaaggctggttcaacttacgcaaatcactaaacgtaatccagcatataaacagaaccaatgacaaaaaccacatgattatctcaatagatgcagaaaaggcctttgacaaaattcaacagcccttcatgctaaaaactctcaataaattaggtattgatgggatgtatctcaaaataataagagctatctatgacagacccacagccaatatcatactgaatgggcaaaaactggaagcattccctttgaaaactggcacaagacagggatgccctctctcaccactcctattcaatatagtgttggaagttctggccagggcaatcaggcaggagaaggaaataaagggtattcaattaggaaaagaggaagtcaaattgtccctgtttgcagatgacatgactgtatatttagaaaacgccatcgtctcagccccaaatctccttaagctgataggcaacttcagcaaagtctcaggatacaaaatcaatgtgcaaaaatcacaagcattcttatacactaataacagacaaacagagagccaaatcatgagtgaactcccattcagaattgcttcaaagagaataaaatacctaggaatccaacttacaagggatgtgaaggacctcttcaagcagaactacaaaccactgctcaatgaaataaaagaggatacaaacaaatggaagaacattccatgctcatgggtaggaagaatcaatatcgtgaaaatggccatactgcccaaggggacccagaggccctatgccaaggttagagttcaactgaacagtggagaggaattgcacttcttaggccttttagataccagtacacaggtgactgtgatccccacaaacccttgcatcaagatgaggagaaaacagatcgtgttctctgactttgggctcctactaacctccgttgtcatggcccccactactgaatga

SEQ ID NO: 152 - DNA, 3666 bp, Homo sapiens
  SIMILAR (736)..(3006): 961254mologous to Homo sapiens putative p150,accession number U93563,Smith-Waterman Score=3773.
gaacacagttcctcaccagcaacggaacaaaggtggacggagaatgactttgacgagctgagagaagaagacttcagacgatcaaattactccgagctatgggaggacattcaaaccaaaggcaaagaagttgaaaactttgaaaaaaatttagaagaatgtataactagaataaccaatacagagaagtgcttaaaggagctgatggagctgaaaaccaaggctcgagaactacgtaaagaatgcagaagcctcaggagccgatgcaatcaactggaagaaagggtatcagcgatggaagatggaatgaatgaaatgaagcaagaagggaagtttagagaaaaaagaataaaaagaaacaagcaaagcctccaagaaatatgggactatgtgaaaaggccaaatctacgtctgattggtgtacctgaaagtgacggggagaatggaaccaagttggaaaacactctacaggatattatccaggagaacttccccaatctagcaaggcaggccaatattcagattcaggaaatacagagaacgcgacaaagatactcctcgagaagagcaactccaagacacataattgtcagattcaccaaagttgaaatgaaggaaaaaatgttaagggcagccagagagaaaggtcgggttacccacaaagggaagcccatcagactaacagcagatctctcggcagaaactctacaagccagaagagagcagaaaccttcattctttgaaaccaacgagaacaaagacacaacataccagaatctctgggatgcattcaaagcagtgtgtagagggaaatttatagcactaaatgcccacaagagaaagcaggaaagatccaaaattgacaccctaacatcacaattaaaagaactagaaaagcaagagcaaacacattcaaaagctagcagaaggcaagaaataactaaaatcagagcagaactgaaggaaatagagacacaaaaaaccattcaaaaaattaatgaatccaggagctggttttttgaaaggatcaacaaaattgatagaccgctagcaagactaacaaagaaaaaaagagagaagattcaaatagacgcaataaaaaatgataaaggggatatcaccactgatcccacagaaatacaaactaccatcagagaatactacaaacacctctatgcaaataaactagaaaatctagaagaaatggataaattccttgacacatacactctcccaagactaaaccaggaagaagttgaatctctgaatagaccaataacaggatctgaaattgtggcaataatcaatagcttaccaaccaaaaagagtccaggaccagatggattcacagccgaattctaccagaggtacaaggaggagctggtaccattccttctgaaactattccaatcaacagaaaaagagggaatcctccctaactcattttatgaagccagcatcatcctgataccaaagccaggcagagacacaaccgaaaaagagaattttagaccaatatccttgatgaacattgatgcaaaaatcctcaataaaatactgccaaacagaatccagcagcacatcaaaaaccttttgcaccatgatcaagtgggcttcatccctgggatgcaaggctggttcaatatatgcaaattaataaatgtaatccagcatataaacagaaccaaagacaaaaaccacatgattatctcaatagatgcagaaaaggcctttgacaaaattcaacaacccttcatgctaaaaactctcaataaattaggtattgatggcacatatctcaaaataataagagctatctatgacaaacccacggccaatatcatatggaatgggcaaaaactggaagcattccctttgaaaactggcacaagacagggatgccctctctcaccactcctattcaacatagtgttggaagttctggccagggcaattaggcaggagaaggaaataaagggtattcaattaggaaaagaggaagtcaaattgtccctgtttgcagacgacatgattgtatatctagaaaaccccattgtctcagcccaaaatctccttaagctgataagcaacttcagcaaagtctcagcatacaaaatcaatgtacaaaaatcacaagcattcttatacaccaacaacagacaaacagagagccaaatcaggagtgaactcccattcacaattgcttcaaagagaataaaatacctaggaatccaacttacaagggatgtgaaggacctcttcaaggagaactacaaaccactgctcaatgaaataaaagaggatacaaacaaatggaagaacattccatgctcatgggtaggaagaatcaatatcgtgaaaatggccatactgcccaagataatttacagattcaatgccatccccatcaagctaccaatgactttcttcacagaattggaaaaaactactttcaagttcatatggaaccaaaaaagagcccgcatcgccaagtcaatcctcagccaaaagaataaagctggaggcatcacactacctgacttcaaactatactacaaggctacagtaaccaaaacagcatggtactggtaccaaaacagagatatagatcaatggaacagaacagagccctcagaaataacgccgcctatctacaactatctgatctttgacaaccctgagaaaaacaagcaatggggaaaggattccctatttaataaatggtgctgggaaaactggctagccatatgtagaaagctgaaactggatcccttccttacaccttatacaaaaatcaattcaagatggattaaagacttaaaggttagacctaaaaccataaaaacgctagaagaaagcctaggcattaccattcaggacataggcatgtgcaaggacttcatgtctaaaacaccaaaagcaatggcaacaaaagccaaaattgacaaatgggatctaattaaactaaagagcttctgcacagcaaaagaaactaccatcagactgggagtggagttacacaagcacccctgtggccaccaccactatgacaccactggatcagatctgaagccagcacagcactgggtctcacccaaagcttattataaccactcacaggctattgccaatgttcactcaaggccctgtgactttacaatcagcatgtggcagagccagtcaggcctgtgtccttcccttcaggatggcaaggtttcccatgccctagggcggctggctcccctctggcctagggaaggtcccgaaatgccatccaagtatcaagtcctggaatcaggaactccaagtattcttttgatgctctacccttctgtggccatgcttgtacctaaggtgcaagacaaagtcacctttacttttccctctacttttctcaagcagatggagtttcttcatgcagccagcacagctggtgaggggagaggaggggtggcatcagagattcaggactgttttttctatctcttcagtgcctctttaagtgatatgaagttaaaaccaggtacagtggatgctcactggacttttggttcttatgaagctatcatagccaaaaattcggggaagtcaatggtgtcgttaccattggcatccacttcgttgatcatatcccgtaattcggcttctgacccagtgacctcatga

SEQ ID NO: 153 - DNA, 3147 bp, Homo sapiens
  SIMILAR (1198)..(2865): 891254mologous to Homo sapiens putative p150,accession number U93563,Smith-Waterman Score=2651.
atgggagactttaacaccccactgtcaacattagacagatcatcgagacagaaagttaacaaggatacccaggaattgaactcaactctgcaccatgcggacctaatagacatctacagaactctccacccgaaatcaactgaatatacatttttttcagcaccacaccacacctattccaaaattgaccacgtagttggaagtaaagctctcctcagcaaatgtaaaagaacagaaattataacaaactgtctctcagaccacagtgctatcaaaccagaactcaggattaagaaactcactcaaaaccgctcaactacatggaaactgaataacctgctcctgaatgactactgggtgcataacaaaatgaaggcagaaataaagatgttctttgaaaccaacgagaacaaagacacaacataccagaatctctgggacacattcaaagcagtgagtagagggaaatttatagcactaaatgcccacaagagaaagcagaaaagatgcaaaattgacaccctagcatcacaattaaaagaagtagaaaagcaagagcaaacacattcaaaagctagcagaaggcaagaaataactaaaataagagcagaactgaaggaaatagagacacaaaaaacccttcaaaaaattaatgaatccaggagctggtttcttgaaaggatcaacaaaattgatagaccactagcaagactaataaagaagaaaagagagaagaatcaaatagatgtaataaaaaatgataaaggggatatcaccactgatcccacagaaatacaaactaccatcagagaatactacaaacacctctacgcaaataaactagaaaatctagaagaactggataaattcctcgacacacacaccctccaaagactaaaccaggaagaagttgaatccctgaatagaccaataacaggctctgaaattgtggcaataatcaatagcttaccaaccaaaaagagtccaggaccagatggatccacagccgaattctaccagaggtacaaggaggagctgttaccattccttcttaaattattccaatcaatagaaaaagagggaatcctccctaactcattttatgaggccagcatcatcctgataccaaagccgggcagagacacagccaaaaaagagaattttagaccaatatccttgatgaacattgatgcaaaaatcctcaataaaatactggcaaaccaaatccagcagcacatcaaaaagcttatatacaccatgatcaagtgggcttcatccctgggatgcaaggctgtgttggaagttctggccagggcaattaggcaggagaaggaaataaagggtattcaattaggaaaagaggaagtcaaattgtccctgtttgcagatgacatgattgtatatctagaaaaccccatcgtctcagcccaaaatctccttaagctgataagcaacttcagtaaagtctcaggatacaaaatcaatgtacaaaaatcacaagcattcttatacaccaataacagacaaacagagagccaaatcatgagtgaaatcccattcacaattgtttcaaagagaataaaatacctaggaatccaacttacaagggacatgaaggacctcttcaaggagaactacaaaccactgctcaatgaaataaaagaggatacaaacaaatggaagaacattccatgctcatggctaggaagaatcaatatggtgaaaatggccatactgcccaaggtaatttatagattcaatgccatcctcatcaagctagcaatgactttcttcacagaatcggaaaaaactactttaaagttcatatggaaccaaaaaagagcctgcatcgccaagtcaatcctaagccaaaagaacaaagtcataggcatcacgctacctgacttcaaactatactacaaggctatagtcaacaaaacagcatggtactggtaccaaaacagagatatagatcaatggaacagaacagagccctcagaaataacaccgcatatctacaactatctgatctttgacaaacctgagaaaaacaagcaatggggaaaggattccctatttaataaatggtgctgggaaaactggctagccatatgtagaaagctgaaactggatcccttccttacaccttatacaaaaattaattcaagatggattaaagacttccatgttagacctaaaaccataaaaaccctagaagaaaacctaggcattaccattcaggacataggcatggacaaggacttcatgtctaaaacaccaaaagcaatggcaacaaaagccaaaattgacaaatgggatctaatcaaactaaagagcttctgcagagcaaaagaaactaccatcagagtgaacaggccacctacagaatgggagaaaattttcgtaacctactcatctgacaaagggctaatatccagaatctacaatgaactcaaacaaatttacaagaaaaaaacaaacaaccccatcaaaaagtgggcaaaggacatgaacagacacttctcaaaagaatacatttatgcagccaaaagagacatgaaaaaatgctcatcatcactggccatcagagaaatgcaaatcaaaaccacaatgagataccatctcacaccagttagaatggtgatcattaaaaagtcaggaaacaacaggtgctggagaggatgtggagaaataggaacacttttacactgttggtgggactgtaaactagttcatccattgtggaagtcagtgtggcgattcctcagggatctagaactagaaataccatttgacccagccatcctattactgggtatatacccaaaggattataaatcatgctgctataaagacacatgcacacatgagaaagcagagatccagaaaagtaaaggaatcagagattatggagaaataggtactagaactgaggatatggactcccagttcagacctctttccgttgttcgggcacaaattatcccctttgaatttccctgggaaggaatacctctgggtggacccttcccccggcattcctgcagctaccctgtgggcctagcccttttgtaccacagtagctcagcagctggaccagtgagaggacacctctccctgcagtggaattccaggatgactagttga

SEQ ID NO: 154 - DNA, 3442 bp, Homo sapiens
  SIMILAR (1073)..(2959): 941254mologous to Homo sapiens Human secreted protein encoded by gene 3 clone HNHCT15,accession number AAB38012,Smith-Waterman Score=3128.
atggtaaagggatcaattcaacaagaagagctaactatcctaaatatctatgcacccaatacaggagcacccagattcataaagcaagtcctgagtgacctacaaagagacttagactcccacacattaataatgggagactttaacaacccactgtcaacattagacagatcaatgagacagaaagtcaacaaggatacccaggaattgaactcagctctgcaccaagtggacctaatagacatctacagaactctccaccacaaatcaacagaatatagatttttttcagcaccacaccacacctattccaaaattgaccacatacttggaagtaaagctctcctcagcaaatgtaaaaggacagagattataacaaactatctctcaggccacagtgcaatcaaactagaactcaagattaagaatctcactcaaaaccgctcaactacatggaaactgaacaacctgctcctgaatgactactggatacataacgaaatgaaggcagaaataaagatgttctttgaaaccaatgagaacaaagacacaacataccagaatctctgggatgcattcaaagcagtgtgtagagggaaatttatagcactaaatgcccacaagagaaagcaggaaagatccaaaattgacaccctaacatcacaattaaaagaactagaaaagcaagagcaaacacattcaaaagctagcagaaggatcaacaaaattgatagaccgctagcaagactaataaagaaaaaaagagagaagaatcaaatagatgcaataaaaaatgataaaggggatatcaccaacgatcccacagaaatacaaactaccatcagagaatactacaaacacctctatgcaaataaactagaaaatctagaagaaatggataaattccttgacacatacaccctcccaagactaaaccaggaagaagttgaatctctgaatagaccaataacaggatctgaaattgtggcaataatcaatagcttaccaacaaaaagagtccaggaccagatggattcacagccaaattctaccagaggtacaaggaggaactgaaaaagagggaatcctccctaactcattttatgaggccagcatcattctgataccaaagccgggcagagacacaaccaaaaaagagaattttagaccaatatccttgatgaacattgatgcaaaaatcctcaataaaatactggcaaaacgaatccagcagcacatcaaaaagcttatccaccatgatcaagtgggcttcatccctgggatgcaaggctggttcaatatacacaaatcaataaatgtaatccagcatataaacagagccaaagacaaaaaccacataattatctcaatagatgcagaaaaagcctttgacaaaattcaacaacccttcatgctaaaaactctcaataaattaggtattgatgggacatatttcaaaataataagagctatctatgacaaacccacagccaatatcatactgaatgggcaaaaactggaagcattccctttgaaaactggcacaagacagggatgccctctctcaccactcctattcaacatagtgttggaagttctggccagggcaattaggcaggagaaggaaataaagggtattcaattaggaaaacaggaagtccaattgtccctgtttgcagatgagatgattgtatatctagaaaaccccattgtctcagcccaaaatctccttaagctgataagcaacttcagcaaagtctcaggatacaaaatcaatgtacaaaaatcacaagcattcttatacaccaacaacagacaaacagagagccaaatcatgagtgaactcccattcacaattgcttcaaagagaataaaatacctaggaatccaacttacaagggatgtgaaggacctcttcaaggagaactgcaaaccactgctcaatgagataaaagaggatacaaacaaatggaagaacattccatgctcatgggtaggaagaatcaatatcatgaaaatggccatactgcccaaggtaatttatagatttaatgccatccccaccaagccaccaatgactttcttcacagaattggaaaaaactactttaaagttcatatggaaccaaaaaagagcccgcatcgccaagtcaattctaagccaaaagaacaaagctggaggcatcacactacctgacttcaaactatactacaaggctacagtaaccaaaacagcatggtactggtaccaaaacagagatctagatcaatggaacagaacagagccctcagaaataacgccgcatatctacagctatctgatctttgacaaacctgagaaaaacaagcaatggggaaaggattccctatttaataaatggtgctgggaaaactggctacccatatgtagaaagctgaaactggatcccttccttacaccttatacaaaaatcaattcaagatggattaaagacttaaatgttagacctaaaaccataaaaaccctaaaagaaaacctaggcattaccattcaggacataggcatgggcaaggacttcatgtctaaaacaccaaaagcaatggcaacaaaagacaaaattgacaaatgggatctaattaaactaaagagcttctgcacagcaaaagaaactaccatcagagtgaacaggcaacctacaaaatgggagaaaattttcgcaacctactcatctgacaaagggctaatatcaagaatctacaatgaactcaaacaaatttacaagaaaaaaacaaacaaccccatcaacaagtgggtgaaggacatgaacagacacttctcaaaagaagacatttatgcagccaaaaaacacatgaaaaaatgctcatcatcactggccatcagagaaatgcaaatcaaaaccacaatgagataccatctcacaccacttagaatggcgatcattaaaaagtcaggaaacaacagtgccagccccactgccaggaacaagacagccaggaatcagaggaccaagatgatagcagtgacggccccccgaaacagggctccactggagctggagctgattctgtaccggcaaaacagacagagtaaaactcatattttggaaacaaacaatacatcagctgagcttctggttccatttgaagaagactacttaattgaaataagaacagtcagtgatggtggagatggaagcagcagtgaggaaattaggattccaaaaatgtcaacagggggtgaggagggcatggctgctgtctttaaaaacaaatgcagatgttcatggtctcgggtggtcatagcctatcacagcagctcagggaaccagatgggaaccaaccctgaacaggaccctggacagcatgccatcccattggagggtacactcacacacacccgcactcactcagactgggaccatttggacacagcaatgaactga

SEQ ID NO: 155 - DNA, 328 bp, Homo sapiens
tttttttttttttttttgaccgttaatacttaagcacttactttaaaaaaacacaacaaaactccccccccaaaaacagaaaaggacaccatatcctaaatacttatggtaaggctataaaaggtttgaacagttcaagcaaagcaacaccagtgggtgaagctgggatcgagtgcttgggagaagtgatgagttaactaccctcagttgtacaccatgaggctccatctctcactcagcaagctccgctttcccttcccaaggagagtgctctctgttttcagtctgaaataaaatattccaccagctcagaaggcccggggagtac

SEQ ID NO: 156 - DNA, 3348 bp, Homo sapiens
  SIMILAR (1)..(2973): 951254mologous to Homo sapiens putative p150,accession number U93563,Smith-Waterman Score=4940.
atgggagactttaacatcccactgtcaacattagacagatcaacgagacagaaagtcaacaaggatacccaggaattgaactcagctctgcaccaagcggacctcatagatagctacagaactctccaccccaaatcaacagaatatacatttttttcagcaccacaccacacctattccaaaattgaccacatacttggaagtaaagctctcctcagcaaatgtaaaagaacagaaattataacaaactatctctcagaccacagtgcaatcaaactagaactcaggattaagaatctcactcaaaactgctcaactacatggaaactgaacaacctgctcctgaatgactactgggtacataacgaaatgaaggcagaaataaagatgttctttgaaaccaatgagaacaaagacacaacataccacaatctctgggatgcattcaaagcagtgtgtagagggaaatttatagcactaaatgcccacaagagaaagcaggaaagatccaaaattgacaccctaacatcacaattaaaagaactagaaaagcaagagcaaacacattcaaaagctagcagaaggcaagaaataactaaaatcagagcagaactgaaggaaatagagacacaaaaaacccttcaaaaaattaacgaatccaggagctgggtttttgaaaggatcaacaaaattgatagaccgctagcaagactaacaaagaaaaaaagcgagaagaatcaaatagatgcaataaaaaatgataaaggggatatcaccaccgatcctacagaaatacaaactaccatcagagaatactacaaacacctctacgcaaataaactagaaaatctagaagaaacggataaattcctcgacacatacactctcccaagacgaaaccaggaagaagttgaatctctgaatagaccaataacaggagctgaaattgtggcaataatcaataacttaccaaccaaaaagagtccaggatcagatggattcacagccgaattctaccagaggtacaaggaggaactggtaccattccttctgaaactattccaatcaatagaaaaagagggaatcctccctaactcattttatgaggccagcatcatcctgataccaaagccgggcagagacacaaccaaaaaagagaattttagaccaatatccttgatgaacattgatgcaaaaatcctcaataaaatactggcaaaccaaatccagcagcacatcaaaaagcttatccaccatgatcaagtgggcttcatccctgggatgcaaggctggttcaatatatgcaaatcaataaatgtaatccagcatataaacagaaccaaagacaaaaaccacatgattatctcaatagatgcagaaaaggcctttgacaaaattcaacaacccttcatgctaaaaactctcaataaattaggtattgatgggacttatctcaaaataataagagctatctatgacgaacccacagccaatatcatactgaatgggcaaaaactggaagcattccctttgaaaactggcacaagacagggatgccctctctcaccactcctattcaacatagtgttggaagttctggccagggcaattaggcaggagagggaaataaagggtattcaattaggaaaagaggaagtcaaattgtccctgtttgcagatgacatgattgtatatctagaaaaccccattgtctcagcccaaaatctccttaagctgataagcaacttcggcaaagtctcaggatacaaaatcaatgtacaaaaatcacaagcattcttaaacaccaacaacagacaaacagagagccaaatcatgagtgaactcccattcacaattgcttcaaagagaataaaatacctaggaatccaacttacaagggatgtgaaggacctcttcaaggagaactacaaaccactgctcaaggaaataaaagaggatacaaacaaatggaagaacattccatgctcatgggtaggaagaatcaatatcatgaaaatggccatactgcccaaggtaatttacagattcaatgccatccccatcaagctaccaatgactttcttcacagaattggaaaaaactactttaaagttcatatggaaccaaaatagagcctgcatcgccaagtcaatcctaagccaaaagaacaaagctggaggcatcacactacctgacctcaaactatactacaaggctacagtaaccaaaacagcatggtactggtaccaaaacagagatatagatcaatggaacagaacagagccctcagaaataacgctgcatatctacaactatctgatctttgacaaacctgagaaaaacaagcaatggggaaaggattccctatttaataaatggtgctgggaaaactggctagccatatgtagaaagctgaaactggatcccttccttacaccttatacaaaaatcaattcaagatggattaaagacttaaacattagacctaaaaccataaaaaccctagaagaaaacctaggcattaccattcaggacataggcatgggcaaggacttcatgtctaaaacaccaaaagcaatggcaaccaaagccaaaattgacaaatgggatctaattaaactaaagagcttctgcacagcaaaagaaactaccatcagagtgaacaggcaacctacaaaatgggggaaaattttcgcaacctactcatctgacaaagggctaatatccagaatctacaatgaactcaaacaaatttacaagaaaaaaacaaacaaccccatcaaaaagtttgcaaaggatatgaacagacacttctcaaaaaaagacatctatgcagccaaaaaacacatgaaaaaatgctcaccatcactggccatcagagaaatgcaaatcaaaaccacaatgagataccatctcacaccagttagaatggcaatcattaaaaagtcaggaaacaacagaactggccgtggtttacatccaggaagggattggtcagtcacctgtgccaggtccccgggggatcctgagcccagcggtataaagggtggctgtgggagtggcacaccctctcccagccccagcaagcaaaccgtcaggcggccgtggactcagatcccggagatgaagcccctgctcctggccgtcagcctcggcctcattgctgccctgcaggcccaccacctcctggcctcagacgaggagattcaggatgtgtcagggacgtggtatctgaaggccatgacggtggacagggagttccctgagatgaatctggaatcggtgacacccatgaccctcacgaccctggaagggggcaacctggaagccaaggtcaccatgctgtga

SEQ ID NO: 157 - DNA, 3432 bp, Homo sapiens
  SIMILAR (1)..(2961): 961254mologous to Homo sapiens putative p150,accession number U93567,Smith-Waterman Score=4958.
atgggagactttaacaccccactgtcaacattagacagatcaacgagacagaaagtcaacaaggatacccaggaattgaactcagctctgcaccaagcagacctaatagacatctacagaactctccaccccaaatcaacagaatatacatttttttcagcaccacaccacacctattccaaaattgaccacatactgggaagtaaagctctcctcagcaaatgtaaaagaacagaaattatagcaaactatctctcagaccacagtgcaatcaaactagaactcaggattaagaatctcactcaaaaccgctcaactacatggaaactgaacaacctgctcctgaatgactactgggtacataacgaaatgaaggcagaaataaagatgttctttgaaaccaacgagaacaaagacacaacataccagaatctctgggacgcattcaaagcagtgtgtagagggaaatttatagcactaagtgcccacaagagaaagcaggaaagatccaaaattgacaccctaacatcacaattgaaagaactagaaaagcaagagcaaacacattcaaaagctagcagaaggcaagaaataactaaaatcagagcagaactgaaggaaatagagacacaaaaaacccttcaaaaaattaatgaatccaggagctggttttttgaaaggatcaacaaaattgatagaccactagcaagactaataaagaaaaaaagagagaagaatcaaatagatgcaataaaaaatgataaaggggatatcaccatcgatcccacagaaatacaaactaccatcagggaatactacaaacacctctacgcaaataaactagaaaatctagaagaaatggataaattcctggacacatacactctcccaagactaaaccaggaagaagttaaatctctgaatagaccaataacaggagctgaaattgtggcaataatcaatagcttagcaatcaaaaagagtccaggaccagatggattcacagccgaattctaccagcggtacaaggaggaactggtaccattccttctgaaactattccaatcaatagaaaaagagggaatcctccctaactcattttatgaggccagcatcattctgataccaaagccaggcagagacacaacaaaaaaagagaattttagaccaatatccttgatgaacattgatgcaaaaatcctcaataaaatactggcaaaccgaatccagcagcacatcaaaaagcttatccaccatgatcaagtgggcttcatccctgggatgcaaggctggttcaatatacacaaatcaataaatgtaatccaacatataaacagagccagagacaaaaaccacatgattatctcaatagatgcagaaaaagcatttgacaaaattcaacaacccttcatgctaaaaactctcaataaattaggtattgatgggacgtatctcaaaataataagagctatctatgacaaacccacagccaatatcatactgaatgggcaaaaactggaagcattccctttgaaaactggcacaagacagggatgccctctctcaccactcctattcaacatagtgttggaagttctggccagggcaattaggcaggagaaggaaataaagggtattcaattaggaaaagaggaagtcaaattgtccctgtttgcagacgacatgattgtatatctagaaaaccccattgtctcagcccaaaatctccttaagctgataagcaacttcagcaaagtctcaggatacaaaatcaatgtacaaaaatcacaagcattcttatacaccaacaacagacaaacagagagccaaatcatgagtgaactcccattcacaattgcttcaaagagaataaaatacctaggaatccaacttacaagggatgtgaaggacctcttcaaggagaactacaaaccactgctcaaggaaataaaagaggatacaaacaaatggaagaacatgccatgctcatgggtaggaagaatcaatatcgtgaaaatggccatactgcccaaggtaatttacagattcaatgccatccccatcaagctaccaatggctttcttcacagaattggaaaaaactactttaaagttcatatggaaccaaaaaagagcccgcatcgccaagtcaatcctaagtcaaaagaacaaagctggaggcatcacactacctaacttcgaactatactacaaggctacagtaaccaaaacagcatggtactggtaccaaaacagatatatagaccaatggaacagaacagagccctcagaaataacaccgcatatctacaactatctgatctttgacaaacctgggaaaaacaagcaatggggaaaggattccctatttaataaatggtgctgggaaaactggctagccatatgtagaaagctgcaactggatcccttccttacaccttatacaaaaatcaattcaagatggattaaagacttaaacgttagacctaaaaccataaaaaccctagaagaagacctaggcattaccattcaggacataggcatgggcaaggacttcatgtctaaaacaccaaaagcaatggcaacaaaagacaaaattgacaaatgggatctaattaaactcaagagcttctgcacagcaaaagaaaccaccatcagagtgaacaggcaacctacaaaatgggagaaaattttcgcaacctactcatttgacaaagggctaatatccagaatctacaatgaactccaacaaatttacaagaaaaaaacaaacaaccccatcaaaaagtgggcgaaggacatgaacagacacttctcaaaagaagacatttatgcagccaaaaaacacatgaaaaaatactcatcatcactggccattagagaaatgcaaatcaaaaccacaatgagataccatctcacacccgttagaatggcaaccattaaaaactcaggaaacaacaggtcattgtgtttttataaggaaaacctaagcctttgtctggcgatccttctctctgttcctgtgcaagaaggaggggccagaagttttctggccccagcaggaggcgtggcaggccgagcaacaagtcactatggcggacacatggcgactgcagagaggctgtcagtggagctatctgggcaagccctgaaggaattccaaaagggccctttatctccaaaacagtttaagggtcatcacagccagcagctccgatggactcatagattaaacccctcctatggccaatcaaagacccccaagaacacactgttgaagatgagagggcccaccacttgggcccttggagggaccgatgtggcagcttccactgataataatggaaacgcacattttgagacgttgcaagtcatggacatgcccaggccatggtgctgcctgttggacggtgctttgcttgtttctgtctga

SEQ ID NO: 158 - DNA, 3033 bp, Homo sapiens
  SIMILAR (712)..(2907): 941254mologous to Homo sapiens putative p150,accession number U93563,Smith-Waterman Score=3584.
atggggaaaaaacagagcagaaaaaccggaaactctaaaaagcagagcgcctctcctcctccaaaggaatgcagctcctcaccagcaacggaacaaagctggacggagaatgactttgacgagttgagagaagaagacttcagacgatcaaactactccgagctacaggaggaaattcaaaccaaaggcaaagaagttgaaaactttgaaaaaaattcagacgaatgtataactggaataaccaatacagagaagtgcttaaaggagctgacggagctgaaagccaaggctcgagaactacatgaagaacgcagaagcctcaagagccgatgcgatcaactggaagaaagggtatcagtgatggaagacaaaatgaatgaaatgaagcgagaagggaagtttagagaaaaaagaataaaaagaaacaaacaaagcctccaagaaatatgggactatgtgaaaagaccaaatctacgtctgattagtgtacctgaaagtgacagggagaatggaaccaagttggaaaacactctgcaggatattatccaggagaacttccccaatctagcaaggcaggccaacattcagattcaggaaatacagagaacgccacaaagatactcctcgagaagagcaactccaaggcacataattgtcagattcagcaaagttgaaatgaaggaaaaaatgttaagggcagccagagagaaagaaatacaaactaacatcagagaatactacaaacaccgctacgcaaataaactagaaaatctagaagaaatggataaattcctcaacatatacacccttcgaagactaaaccaggaagaagttgaatctctgaacagaccaataagaggctctgaaattgtggcaataatcaatagtttaccaaccaaaaagagtccaggaccagatggattcacagccgaatactaccagaggtataaggaggaactggtaccattccttctgaaactattccaatcaatagaaaaagagggaatcctccctaactcattttatgaggccagcatcatcctgataccaaagccgggcagagacacaaccaaaaaagagaattttagaacaatatccttgatgaacattgatgcaaaaatcctcaataaaatactggcaaaccgaatccagcagcacatcaaaaagcttatccaccatgatcaagtgggcttcatccctgggatgcaaggctggttcaatatacgcaaatcaataaatgtaatccagcatataaacagaaccaaagacaaaaaccacgtgattatctcaatagatgcagaaaaggcctttgacaaaattcaacaactcttcttgctaaaaactctcaataaattaggtattgatgggacatatctcaaaataaaaagagctatctatgacaaacccacagccaatatcatactgaatgggcaaaaactggaagcattccctttgaaaactggcacaagacagggatgccctctctcaccactcctattcaacatagtgttggaagttctggccagggcaattaggcaggagaaggaaataaagggtattcaattaggaaaagaggaagtcaaattgtccctgtttgcagatgacatgattgtatatctagaaaaccccattgtctcagcccaaaatctccttaagctgataagcaacttcagcaaagtctcaggatacaaaatcaatgtacaaaaatcacaagcattcttatacaccaataacagacaaacagaaacccaaatcatgagtgaactcccattcacaattgcttcaaagagaataaaatacctaggaatccaacttacaagggacgtgaaggacctcttcaaggagaactacaaaccactgctcaatgaaataaaagaggatacaaagaaatggaagaatattccatgctcatgggtaggaagaatcaatatcatgaaaatggccatactgcacaaggtaatttatagattcaatgccatccccatcaagctaccaatgactttcttcacagaattggaaaaaactactttaaagttcacatggaaccaaaaaagagcccgcattgccaagtcaatcctaagccaaaagaacaaagctggaggcatcatgctacctgacttcaaactatactacaaggctacagtaaccaaaacagcatggtactggtaccaaaacagagatatagatcaatggaacagaacagagccctcagaaataacgccgcatatctacaactatctgatctttgacaaacctgagaaaaacaagcaatggggaaaggattccctattcaataaatggtgctgggaaaactggctagccatatggagaaagctgaaactggatcccttctttacaccttatacaaaaattaattcaagatggattaaagacttaaacgttagacctaaaaccataaaaaccctagaagaaaacctaggcattaccattcaggacataggtatgggcaaggacttcatgtctaaaacaccaaaagcaatagcaacaaaagccaaaattgacaaattggatctaattaaactaaagagcttctgcacagcaaaagaaactaccatcagagtgaacaggcaacctacagaatgggagaaaattttcgcaacctactcatctgacaaagggctaatatccagaatctacaatgaactcaaacaaatttacaagaaaaaaacaaacaaccccatcaaaaagtgggcaaaggacatgaacagacacttctcaaaagaagacatttatgcagccaaaaaacacatgaaaaaatgctcaccatcactggctatcagagaaatgcaaatcaaaaacacaatgagataccatctcacaccacttagaatggcaatcattaaaaagtcaggaaacaacagagcctcaaggtcagccagaggtgagagcttagggccttctcaatcctttcctgagcacgtgcattgccctgggccgttgcacacagccctacacagacccatgacctttcagattcccagggatatgttggaagtttctagtgcccactag

SEQ ID NO: 159 - DNA, 4170 bp, Homo sapiens
  SIMILAR (1216)..(4083): 931254mologous to Homo sapiens putative p150,accession number U93569,Smith-Waterman Score=4696.
atgaactctcttgagcagaatccaaggagcaaatgggaactgctgcacagaggaacaatggagctgtggccaacaatgtgggctgacgaggaggagcaaggcctgaaagctgtgcttgctttgtcagcgaagaagtttgtgcctggggcaaggagcaagactggcctcactgactgcatgggagttggaggaggcctgttgctaccagctttcccccatatccctggcaaaagagacagccataatcccctctggaacataacccctgagaaccagtccccaacccccacagtggccatggaacgcagttcctcaccagcaacggaacaaagctggatggaaaatgactttgacgagttgagagaagaaggcttcagacgatcaaactactccgagctacaggaggaaattaaaaccaaaggcaaagaagttaaaaactttgaaaaaaatttagacgaatgtataactagaataaccaatacagagaagtgcttaaaggaggtgatgcagctgaaagccaaggctcgagaactacgtgaagaatgcagaagcctcaggagccgatggaatcaactggaagaaagggtatcagtgatggaagatgaaatgaatgaaatgaagcgagaagggaagtttagagaaaaaagaataaaaagaaacgaacaaagcctccaagaaatatgggactatgtgaaaagaccaaatctacgtctgattggtgtacctgaaagtgacggtgagaatgcaaccaggttggaaaacactctgcaggatatcatccaggagaacttccccaatctagcaaggcaggccaacattcagattcaggaaatacagagaatgccacaaagatactcctcaagaagagcatctccaagacacataattgtcagattcaccaaagttgaaatgaaggaaaaaatgttaagggcagccagagagaaaggtcgggttacccacaaagggaagcccatcagactaatagcggatctctcagcagaaactctacaagccagaagagagtggggaccaatattcaacattcttaaagaaaagaattttcaactcagaatttcatatccagccaaactaagcttcataagtgaaggagaaataaaatcctctacagacaagcaaatgctgagagattttgtcaccaccaggcctgccctaaaagagctcctgaaggaagcactaaacatggaaaggaacaaccgagacacacataggctcaaaacaaaaggatggaggaagatctaccaagcaaatggaaaacaaaaaaaggcaggggttgcaatcctagtctcggataaaacagactttaaaccaacaaagatcagaagagacaaagaaggccattacataatggtaaagggatcaattcaacaagaagagctaactatcctaaatatatatgcacccaatacaggagcacccagattcataaagcaagtccttagtgacctacaaagagacttagactcccacacaataataatgggagactttaacaccccactgtcaacattagacagatcaacgagacagaaagttaacaaggatacccaggaattgaactcagctctgcaccaagcagacctaatagacatctacagaactctccaccccaaatcaacagaatatacattcttttcagcaccacaccacacctattccaaaactgaccacatagttggaagtaaagctctcctcagcaaatgtaaaagaacagatattaaaacaaactgtctctcagaccacagtgcaatcaaactagaactcaggattaagaaactcactcaaaaccactcaactacatggaaagtgaacaacctgctcctgaatgactactgggtacataacgaaatgacggcagaaataaagatgttctttgaaaccaacgagaacaaagacacaacataccagaatctctgggacacattcaaagcagtgtgtacagggaaattcatagcattaaatgcccacaagagaaagcaggaaagatccaaaattgacaccctaacatcacaattaaaagaactagaaaagcaagaacaaacacattcaaaagctagcagaaggcaagaaataagtaaaatcagagcagaactgaaggaaatagagacacaaaaaacccttcaaaaaattaatgaatccaggagctggttttttgaaaggatcaacaatatcaatagactgctagaaagactaataaagaagaaaagagagaagaatcaaatagacacaacaaaaaatgataaaggagatatcaccaccgatcccacagaaatacaaactaccatcagagaatactacaaacacctctatgcaaataaactagaaaatctagaagaaatggataaattcctcgacacatacactctcccacgactaaaccaggaagaagttgaatctctgaatagaccaataacaggttctgaaattgtggcaataatcaatagcttaccaaccaaaaaaagtccaggaccagatggattcacaggcgaattctaccagaggtacaaggaggaactggtaccattccttctgaaactattccaatcaatggaaaaagagggaatcccccctaactcattttatgaggccagcatcatcctgatatcaaagccaggcagagacacaaccaaaaaagagaattttagaccaatatccttgatgaacattgatgcaaaaatcctcaataaaatactgacaaaacgaatccagcagcacatcaaaaagcttatccaccatgatcaagtgggcttcatccctgggatgcaaggctggttcaatatacgcaaatcaataaatgtaatccagcatataaacagaaccaaagacaaaaaccacatgattatctcaatagatgcagaaaaggcctttgacaaaattcaacaacacttcatgctaaaaactctcaagaaattaggtattgatgggatgtatctcaaaataataagagctacctatgacaaacccacagccaatatcatactgaatgggcaaaaactggaagcattccctttgaaaactggcacaagacagggatgccctctctcaccactcctattcaacatagtgttggaagttctggccagggcaatcaggcaggagaaggaaataaagggtattcaattaggaaaagaggaagtcaaattgtccctgtttgcagatgacatgattgtatatctagaaaaccccatcatctcagcccaaaatctccttaagctgataagcaacttcagcaaactctcaggatacaaaatcaatgtgcaaaaatcacaagcattcttatacaccaataacagacaaacagagagtcaaatcatgagtgaactcccattcacaattgcttcaaagagaataaaatacctaggaatccaacttacaagggacgtgaaggacctcttcaaggagaactacaaaccactgctcaatgaaataaaagaggatacaaacaaatggaagaacagtccatgctcatgggtaggaagaatcaatatcatgaaaatggccatactgcccaagctaccaatgactttcttcacagaattggaaaaaactactttaaagttcatatggaaccaaaaaagagcctgcatcgccaagtcaatcctaagccaaaagaacaaagctggaggcatcacactacctgacttcaaactacactacaaggctacagtaaccaaaacagcatggtactggtaccaaaacagagatatagatcaatggaacagaacagagccctcagaaataacaccgcatatctacaactatctgatctttgacaaacctgagaaaaacaagcaatggggaaaggattccctatttaataaatggtgctgggaaaactggctagccatatgtagaaagctgaaactggatcccttccttacaccttatacaaaaattaattcaagatggattaaagacttaaacgttagacctaaaaccataaaaaccctagaagaaaacctaggcattaccattcaggacataggcatgggcaaggacttcatgtctaaaacaccaaaagcaatggcaacaaaagccaaaattgacaaatgggatctaattaaagagcttctgcacagcaaaagaaactaccatcagagtgaacaggcaacctacaaaatgggagaaaattttcgcaacctactcatctga

SEQ ID NO: 160 - DNA, 3924 bp, Homo sapiens
  SIMILAR (712)..(3510): 981254mologous to Homo sapiens putative p150,accession number U93563,Smith-Waterman Score=4809.
atggggaaaaaacagaacagaaaaactggaaactctaaaacgcagagcgcctctcctcctccaaaggaacgcagttcctcaccagcaacagaacaaagctggatggagaatgattttgacgagctgagagaagaaggcttcagacgatcaaattactctgagctatgggaggacattcaaaccaaaggcaaagaagttgaaaactttgaaaaaaatttagaagaatgtataactagaataaccaatacagagaagtgcttaaaggagctgatggagctgaaaaccaaggctcgagaactacatgaagaatgcagaagcctcaggagccgatgcgatcaactggaagaaagggtatcagcaatggaagatgaaatgaatgaaatgaagcgagaagggaagtttagagaaaaaagaataaaaagaaatgagcaaagcctccaagaaatatgggactatgtgaaaagaccaaatctacgtctgattggtgtacctgaaagtgatgtggagaatggaaccaagttggaaaacactctgcaggatattatccaggagaacttccccaatctagcaaggcaggccaacgttcagattcaggaaatacagagaatgccacaaagatactcctcgagaagagcaactccaagacacataattgtcagattcaccaaagttgaaatgaaggaaaaaatgttaagggcagccagacagaaagcaccacaccacacctattccaaaattgaccacatagttggaagtaaagctctcctcagcaaatgtaaaagaacagaaattataacaaactatctctcagaccacagtgcaatcaaactagaactcaggattaagaatctcactcaaagccgctcaactacatggaaactgaacaacctgctcctgaatgactactgggtacataacgaaatgaaggcagaaataaagatgttctttgaaaccaacgagaacaaagacaccacataccagaatctctgggacacattcaaagcagtgtgtagagggaaatttatagcactaaatgcctacaagagaaagcaggaaacatccaaaattgacaccataacatcacaattaaaagaactagaaaagcaagagcaaacacattcaaaagctagcagaaggcaagaaataactaaaatcagagcagaactgaaggaaatagagacacaaaaaacccttcaaaaaatcaatgaatccaggagctggttttttgaaaggatcaacaaaattgatagaccgctagcaagactaataaagaaaaaaagagagaagaatcaaatagacacaataaaaaatgataaaggggatatcaccaccgatcccacagaaatacaaactaccatcagagaatactacaaacacctctacgcaaataaactagaaaatctagaagaaatggatacattcctcgacacatacactctcccaagactaaaccaggaagaagttgaatctctgaatagaccaataacaggctctgaaattgtggcaataatcaatagtttaccaaccaaaaagagtccaggaccagatggattcacagccgaattctaccagaggtacaaggaggaactggtaccattccttctgcaactattccaatcaatagaaaaagagggaatcctccctaactcattttatgaggccagcatcattctgataccaaagccgggcagagacacaaccaaaaaagagaattttagaccaatatccttgatgaacattgatgcaaaaatcctcaataaaatactggcaaaccgaatccagcagcacatcaaaaagcttatccaccatgatcaagtgggcttcatccctgggacgcaaggctggttcaatatacgcaaatcaataaatgtaatccagcatataaacagagccaaagacaaaaaccacatgattatctcaatagatgcagaaaaagcctttgacaaaattcaacaacccttcatgctaaaaactctcaataaattaggtattgatgggacatatttcaaaataataagagctatctatgacaaacccacagccaatatcatactgaatgggcaaaaactggaagcattccctttgaaaactggcacaagacagggatgccctctctcaccgctcctattcaacatagtgttggaagttctggccagggcaatcaggcaggagaaggaaataaagggtattcaattaggaaaagaggaagtcaaattgtccctgtttgcagacgacatgattgtttatctagaaaaccccatcgtctcagcccaaaatctccttaagctgataagcaacttcagcaaagtctcaggatacaaaatcaatgtacaaaaatcacaagcattcttatacaccaataacagacaaacagagagccaaatcatgagtgaactcccattcacaattgcttcaaagagaataaaatacctaggaatccaacttacaagggatgtgaaggacctcttcaaggagaactacaaaccactgctcaaggaaataaaagaggacacaaacaaatggaagaacattccatgctcatgggtaggaagaatcaatatcgtgaaaatggccatactgcccaaggtaatttacagattcaatgccatccccatcaagctaccaatgactttcttcacagaattggaaaaaactactttaaagttcatatggaaccaaaaaagagcctgcatctccaagtcaatcctaagccaaaagaacaaagctggaggcatcacactacctgacttcaaactatactacaaggctacagtaaccaaaacagcatggtactggtaccaaaacagagatatagatcaatggaacagaacagagccctcagaaataatgccacatatctacaactatctgatctttgacaaacctgagaaaaacaagcaatggggaaaggattccctatttaataaatggtgctgggaaaactggctagccatatgtagaaagctgaaactggatcccttccttacaccttatacaaaaatcaattcaagatggattaaagatttaaacgttagacctaaaaccataaaaaccctagaagaaaacctaggcattaccattcaggacataggcgtgggcaaggacttcatgtccaaaacaccaaaagcaatggcaacaaaagccaaaattgacaaatgggatctaattaaactaaagagcttctgcacagcaaaagaaactaccatcagagtgaacaggcaacctacaacatgggagaaaattttcacaacctactcatctgacaaagggctaatatccagaatctacaatgaactcaaacaaatttacaagaaaaaaacaaacaaccccatcaaaaagtgggcgaaggacatgaacagacacttctcaaaagaagacatttatgcagccaaaaaacacatgaagaaatgctcatcatcactggccatcagagaaatgcaaatcaaaaccactatgagatatcatctcgcaccagttagaatggcaatcattaaaaagtcaggaaacaacagcaaaatggtggaagcagatgggcctggcaatcttttcactggtgtcctccatttagaaaccaatgaaaagtcgcttaaagcagtatttgggaaatatggtcccatattggaagacaactttttggatggaaaagcaatgaaagtagaacaagttaacaaaccgtcttttcaaagtggtggtaatgtggagatcaccatcttcttggagaaacaggagcccttcaggaagtctgagacaggaaaaaaattttttaagttgttcctgctgacattagcaaacttttttaaatttagtgaccatgatgactatagtgggggccttggtagagatcattctgaacatccaaatgggagttcttacagagatgcatatcagagttatgggaccttctatggtgcaccacctgcatga

SEQ ID NO: 161 - DNA, 4539 bp, Homo sapiens
  SIMILAR (1171)..(2805): 981254mologous to Homo sapiens putative p150,accession number U93564,Smith-Waterman Score=2807.
atggtaaagggatcaattcaacaagaggagctaactatcctaaatatacatgcacccaatacaggagcacccagattcataaagcaagtcctgagtgacctacaaagagacttagactcccacacattaataatgggagactttaacaccccactgtcaacattagacagatcaatgagacagaaagtcaacaaggatacccaggaattgaactcagctctgcaccaagcagacctaatagacatctacagaactctccaccccaaatcaacagaatatacatttttttcattaccacaccacacctattccaaaattgaccacatagttggaagtaaagctctcctcagcaaatgtaaaagaacacaaattataacaaactatctctcagaccacagtgcaatcaaactagaactcaggattaagactctcactcaaagccgctcaactacatggaaactgaacaacctgctcctgaatgactactgggtacataacgaaatgaaggcagaaataaagatgttctttgaaaccaacgagaacaaagacacaacataccagaatctctgggatgcattcaaagcagtgtgtagagggaaatttatagcactaaatgcccacaagagaaagcaggaaagatccaaaattgacaccctaacatcacaattaaaagaactagaaaagcaagagcaaacacattcaaaagctagcagaaggcaagaaataactaaaatcagagcagaactgaaggaaacagagacacaaaaaacccttcaaaaaatcaatgaatccaggagctggttttttgaaaggatcaacaaaattgatagaccgctagcaagactaataaagaaaaaaagagagaagaatcaaatagacacaataaaaaatgataaaggggatatcaccaccgatcccacagaaatacaaactaccatcagagaatactacaaacacctctacgcaaataaactagaaaatctagaagaaatggatacattccttgacacatacactctcccaagactaaaccaggaagaagttgaatctctgaatagaccaataacaggagctgaaattgtggcaataatcaatagtttaccaaccaaaaagagtccaggaccagatggattcacagccgaattctaccagaggtacaaggaggaactgcatataaacagagccaaagacaaaaaccacatgattatctcaatacatgcagaaaaagcctttgacaaaattcaacaacccttcatgctaaaaactctcaataaattaggtattgatgggacgtatttcaaaataataagagctatttatgacaaacccacagccaatatcatactgaatgggcaaaaactggaagcattccctttgaaaactggcacaagacagggatgccctctctcaccgctcctattcaacatagtgttggaagttctggccagggcaatcaggcaggagaaggaaataaagggtattcaattaggaaaagaggaagtcaaattgtccctgtttgcagacgacatgattgtttatctagaaaaccccatcgtctcagcccaaaatctccttaagctgataagcaacttcagcaaagtctcaggatacaaaatcaatgtacaaaaatcacaagcattcctatacaccaacaacagacaaacagagagccaaatcatgagtgaactcccattcactattgcttcaaagagaataaaatacctaggaatccaacttacaagggatgtgaaggacctcttcaaggagaactacaaaccactgctcaaggaaataaaagaggatacaaacaaatggaagaacattccatgctcatgggtaggaagaatcaatatcgtgaaaatggccatactgcccaaggcaatttacagattcaatgccatccccatcaagctaccaatgactttcttcacagaattggaaaaaactactttaaagttcatatggaaccaaaaaagagcccgcatcaccaagtcaatcctaagccaaaagaacaaagctggaggcatcacactacctgacttcaaactatactacaaggctacagtaaccaaaacagcatggtactggtaccaaaacagagatatagatcaatggaacagaacagagccctcagaaataacgccgcatacctacaactatctgatctttgacaaacctgagaaaaacaagcaatggggaaaggattccctatttaataaatggtgctgggaaaactggctagccatatgtagaaagctgaaactggatcccttccttacaccttatacaaaaatcaattcaagatggattaaagatttaaacgttagacctaaaaccataaaaaccctagaagaaaacctagaaattaccattcaggacataggcgtgggcaaggacttcatgtccaaaacaccaaaagcaatggcaaccaaagccaaaattgacaaatgggatctaattaaactcaagagcttctgcacagcaaaagaaactaccatcagagtgaacaggcaacctacaacatgggagaaaattttcgcaacctactcatctgacaaagggctaatatccagaatctacaatgaactcaaacaaatttacaagaaaaaaacaaacaaccctatcaaaaagtgggcgagggacatgaacagacacttctcaaaagaagacatttatgcagccaaaaaacacatgaaaaaatgctcatcatcactggccatcagagaaatgcaaatcaaaaccactatgagatatcatctcacaccagttagaatggcaatcattaaaaagtcaggaaacaacaggaatatccagactgtgctcctactcaggatcccattccagggcctggttccttcccccagcgggcagacacatccagtaggcgaccagccagcagcgcatgtagacagcatcgacgccgataccaggctcagaggacagaaccatattccagaggagctggggagaggcgttgtctccaatccagttgaggcccaggtccccgtgggcttccacgcgcggcctctgctggtgtccagaactcgccgtccctttggctttgccacgccatcatggcttcccttctcctccttcttctttggcttttccaagaccttcaagtgtctgcattccctggagcaggaccatgagcctccacccgtgtctctctgcatccctgcaggttctgggatctcacacacggccaaagccatcgggcttcacgcaggtctcactgacttgaacttgaggaagcgctgttcactcagcggtgccctgtctggaggaaattcccgggtctttctgcacttcttacgattgcaaatgaccaggaaaagaacttggaggtcagaagagtggggctgcccagccctcaaagccctggcactgtgcagtttcaagctgcagttacctcggaaagaggaggctgcatttgcactgcaggtgcaggaacgttcacccacacggctcagaaacgttctcacacatgcggagctgtgtccagttggcaccggccgcaaagctgcacctaccacctgtggaagtgcgaggcaacacaaacatcctgactcatgtccccatcgtgacttggtgcatttcattggaagtacatctaagtgccattcggataaggatgaggataaggacaaagaccagtcttcactgcttcctgctgacaggagggtgctgttttgggaaacagtagtcagagcttcctccgaggcctatctaagggtccccggaagaagggaccattgtccgaggttccggttttataagcatttggagtttgatggcttgaaggacttcaaccagaagcatggaattgagtttggggcaaaaatgtgtcttgggagggctcgtggactcactaagacccagacggccctcacaggctgcagccagcagccgacaaccaacgtcacagggaccgaaaatgacctcactctgcagacaaccaaagcaacagggaccaaaaatgacctcactctgcaggtaaccaaagtcacagggaccaaaaatgacctcactctgaagacaaccaaagccacagggaacgaaaatgacctcactctgcaggtaaccaaagtcacagggaccgaaaatgacctcactctgcagacaaccaaagcgacagggaccaaaaatgacctcactctgaagacaaccaaagccacagggaatgaaaatgacctcaccctgcaggtaaccaaagtcacagggaccgaaaatgacctcactctgcaggtaaccaaagtcacagggaccaaaaatgacctcaccctgcagacaaccaaagccacagggaccaaaaatgacctcactctgcagataaccaaagtcacagggaccaaaaatgacctcacactgcagacaaccaaagtcacagggaccgaaaatgacctcactctgcaggtaaccaaagtcacagggaccgaaaatgacctcaccctgcagacaaccaaagtcacagggagtgaagactccacaggagactggaggaggggagccacagctcttgccacccagcgagtctaa

SEQ ID NO: 162 - DNA, 3919 bp, Homo sapiens
  SIMILAR (1517)..(3835): 961254mologous to Homo sapiens putative p150,accession number U93574,Smith-Waterman Score=3948.
atggagctgaaagccaaggctcgagaactatgggaagaatgcagaagcctcaggagccgatgtgatcaactgaaagaaagggtatcagtgatggaagatgagatgaatgaaatgaagcgagaagggaagtttagagaaaaaagaataaaaagaaacgaacaaagcctccaagaaatatgggactatgtgaaaagaccaaatctacgtctgattggtgtacctgaaagtgacggggagaatggaaccaagttggaaaacactctgcagggtattatccaggagaacttccccaatctagcaaggcaggccaacattcagattcaggaaatacagagaacaccacaaagatactcctcgagaagagcaactccaagacacataattgtcagattcaccaaagttgaaatgaaggaaaaaatgttaagggcagccagagagaaaggtcgggttacccacaaagggaagcccatcagactaacagtggatctctcggcagaaactctagaagccggaagagagtgggggccaatattcaacattcttaaagaaaagaattttcaacccagaacttcatatccagccaaactaagcttcataagtgaaggagaaataaaatactttacagacaagcaaatgctgagagattttgtcaccaccaggcctgccctaaaagagctcctgaaggaagcactaaacatggaaaggaacacccgcaaatgtaaaagatcagaaattataacaaactgtctctcagaccacagtgcaatcaaactagaactcaggaataagaaactcactcaaaaccgctcaactacatggaaaccgaacaacctgctcttgaatgactactgggtacgtaacgaaatgaaggcagagataaagatgttctttgaaaccaacgagaacaaagacagaacataccagaatctctgggacacattcaaagcagtgtgtagagggaaatttatagcactaaatgcccacaagagaaagcaggaaagatccaaaattgacaccctaacatcacaattaaaagaactagaaaagcaagagcaaagacattcaaaagctagcagaaggcaagaaataactaaaatcagagcagagctgaaggaaatagagacacaaaaaacccttcaaaaaattaatgaatccaggagctggttttttgaaaggatcaacaaaattgatagaccgctagcaagactagtaaagaagaaaagagagaagaatcaaatagacgcaataaaaaatgataaaggggatatcaccaccaatcccacagaaatgcaaactaccatcagagaatactacaaacacctctatgcaaataaactagaaaatctagaagaagtggataaattcctcaacacatacaccttcccaagactaaaccaggaagaagttgactctctgaatagaccaataacaggctctgaaattgtggcaataatcaatagcttaccaacgaaaaagagtccaggaccagatggattcacagccgaattctaccagagaaaaagagggaatcctctctaactcattttatgaggccagcatcattctgataccaaagccaggcagagacacaacaaaaaaagagaattttagaccaatatccttgatgaacattgatgcaaaaatcctcagtaaaatactggcaaaacgaatccagcagcacatcaaaaagcttatccaccatgatcaagtgggcttcatccctgggatgcaaggctgggtcaatatacacaaatcaataaatgtaatccagcatataaacagagccaaagacaaaaaccacatgattatctcaacagatgcagaaaaagcctttgacataattcaacaacccttcatgctaaaaactctcaataagttaggtattgatgggatgtatttcaaaataataagagctatctatgacaaacccacagctaatatcatactgaatgggcaaaaactggaagcattccctttgaaaactggcacaagacagggatgccctctctcaccactcctattcaacatagtgttggaagttctggccagggcaattaggcaggagaaggaaataaagggtattcaattaggaaaagaggaagtcaaattgtccctgtttgcagatgacatgactgtatatctagaaaaccccattgtctcagcccaaaatctccttaagctgataagcaacttcagcaaagtctcaggatacaaaatcaatgtgcaaaaatcacaaggattcttatacaccaacaacagacaaacagagagccaaatcatgagtgaactcccattcacaattgcttcaaagagaataaaatacctaggaatccaacttacaagggatgtgaaggacctcttcaaggagaactacaaaccactgctcaaggaaataaaagaggatacaaagaaatggaagaacattccatgctcatgggtaggaagaatcaatatcgtgaaaatggccatactgcccaaggtaatttacagtttcaatgccatccccatcaagctaccaatgcctttcttcacagaattggaaaaaactactttaaagttcatatggaaccaaaaaagagcccgcatcaccaagtcaatcctaagccaaaagaacaaagctggaggcatcacactacctgacttcaaactatactacaaggctacagtaaccaaaacagcatggtactggtaccaaaacagagatatagatcaatggaacagaacagagccctcagaaataacgccgcatatctacaactatctgatctttgacaaacctgagaaaaacaagcaatggggaaaggattccctatttaataaatggtgctgggaaaactggctagctatatgtagaaagctgaaactggatcccttccttacaccttatacaaaaatcaattcaagatggattaaagacttaaacgttagacctaaaaccataaaaaccctagaagaaaacctaggcaataccattcaggacataggcatgggcaaggacttcatgtctaaaacaccaaaagcaatggcaacaaaagccaaaattgacaaatgggatctaattaaactaaagagcttctgcacagcaaaagaaactaccatcagagtgaacaggcaacctacaaaatgggagaaaatttttgcaacctactcatctgacaaagggctaatatccagaatctacaatgaactcaaacaaatttacaagaaaaaaacaaacaaccccatcaaaaagtgggtgaaggacatgaacagacacttctcaaaagaagacatttatgcagccaaaaaacacatgaaaaaatgctcatcatcactggccatcagagaaatgcaaatcaaaaccacaatgagataccatctcacaccagttagagtggcaatcattaaaaagtcaggaaacaacaggtgctggagaggatgtggagaaattggaacacttttacactgttggtgggactgtaaactagttcaacccttgtggaagtcagtgtggcgattcctcagggatctagaactagaaataccatttgacccagccatcccattactgggtatatacccaaaggactataaatcatgctgctataaagacacgtgcacacgtatgtttattgcagcactattcacaatagcaaagacttggagccaacccaaatgtccaacaacgatagactggattaagaaaatgtggcacatatacaccatggaatactatgcagccataaaaaatgatgagttcatgtcctttgtagggacatggatgaaattggaaatcatcattctcagtaaaccattgcaagaacaaaaaaccaagcaccgcatgttctcactcatagtatcttcaaaagtaattaggcggctgtcccagaagttgcctttgaagattgttgcaatgtgtatacctgtcaaaaggaattga

SEQ ID NO: 163 - DNA, 19313 bp, Homo sapiens
  SIMILAR (18779)..(15846): 971254mologous to Homo sapiens putative p150,accession number U93570,Smith-Waterman Score=4964.
tcaaaacccagtggtgcagtcgttaaatcttaatgctctgaaataatctcctttgactccatccctcacatacaggtcacactgatgcaagtggtgggctcccacagccttgggtagctctgcccctgtggctctgcagggtagagcctcattcccggctgctttcatgggctggcattgagtgcctgtggcttttccaggtgcatggtgcaatctatcagtggatctacaattctgggttctggaagatagtgatcctcttctcacagatccactaagcagttcctcagtggtgactttgtgtagtggctctgactccacatttctcctccatattgccctagtagaagctctccatgagggctttgccctgcagcaggcttctgctggacatttagatgtttccgtacacctgtcagagtgaacatctgatgaaagcccaaatgcacttgcagaataaatatgttgctgtagcaaccagtcctcatttgttccaggtgtatctgtgagggtgtttctagaagagactggcttgtaagtcagtggactgagtgagatagattggccttcagtgtgggtgggcaccatccaatcacctggaggtagggaaaagagattgggcttctctccatatggtgactgtgttgtgctgaaagtgagactaaagccctcaggctctttgtttcttctccagtgcagaggcagcagggacaaaactgctgctgtgacagtgtctggggggctgttgattgtctcttggagacccttcttcagggaaacacagagccaccagaagtgggaatgctcagctgggtgtaggacagctgttctgaggtctagagctggtgatcttgcttggtaaacactgttgtttcctgacttttgaatgattgccattctaactggtgtgagatggtatctcattgtggttttgatttgcatttctctgatggccagggatgatgagcattttttcatgtgtcttttggctgcataaatgtcttcttttgagaagtgtctgttcatatcctttgcccattttttgatggggttgtttgtttttttcttgtaaatttgtttgagttcattgtagattctggatattagccctttgtcagatgagtaggttgcgaaaattttctcccattttgtaggttgcctgttcactctgatggtagtttcttttgctgtgcagaagctctttagtttaattagatcccattggtcaattttggcttctgttgccattgcttttggtgttttggacatgaagtccttgcccctgcctatgtcctgaatggtaatgtctaggttttcttctagggtttttatggttttaggtctggcatttaagtctttaatccaccttgaattaatttttatataatgtgtaaggaagggatccagtttcagctttccacatatggctagccagttttcccagcaccgtttatcaaataaggaatcctgttcccattgcttgtttctctcaggtttgtcacagatcagatagttgtagatatgcggcgttagttctgagggctctgttctgttccattgatctatatctctgttttggtaccagtaccatgctgctctggtgacagtagccttgtagtatagtttgaagtcaggtagcatgatgcctccagctttgttcttttggcttaggattgacttcgcgatgtggtctcttttttggttccatatgaactttaaaatagttttttccatttctgtgaagaaagtcattggtagcttgatggggatggcattgaatctataaattaccttgggcagtatggccattttcatgatattgattcttcctactacccatgagcatagaatgttcttccatttgtttgtatcctcttttatttcgttgagcagtggtttgtagttctccttgaagaggtccttcacatcccttgtaagttggattcctaggtattttattctctttgaagcaattgtgaatgggagttcactcatgatttggctctctgtttgtctgttattggtgtataagaatgcttgtgacttttgtacattgattttgtatcctgagactttgctgaagttgcttatcagcttaaggagattttgggctgagacaatggggttttctagatatacaatcatgtcatctgcaaacagggacaatttgacttcctcttttcctacttgaataccctttatttccttctcctgcctaattgccctggccagaacttccaacactaatttattaagagtttttagcatgaagggttgttgaattttgtcaaaggccctttctgcatctatgcagataatcatgtggtttttgtctttggctctgtttatatgctggattacatttattgatatgtgtatattgaaccagccttgcatcccagggatgaagcccacttgatcatggtggataagctttttgatgtgctgctggattcggtctgccagtattttattgagggtttttgcatcaatgttcatcaaggatattggtctaaaattctcttttttggttgtgtctctgcctggctttggtatcagaatgatgctggcctcataaaatgagttagggaggattccctctttttctattgattggaatagtttcagaaggaatggtaccagttccttcttgtacctctggtagaattcggctgtgaatccatctggtcctggactctttttggttggtaagctattgattattgccacaatttcagatcctgttattggtctattcagagattcaacttcttcctggtttagtcttgggagagtgtatgtgtcgaggaatttatccatttcttctagattttctagtttatttgcgtagaggtgtttgtagtattctctgatggtagtttgtatttctgtgggattggtggtgatgtcccctttatcattttttattgcatctatttgattcttctctctttttctctttattagtcttgctagcagtctatctattttgttgatcctttcaaaaaaccagctcctggattcattaattttttgaagggttttttgtgtctctatttccttcagttctgctctgattttagttatttcttgccttctgctagcttttgaatgtgtttgctcttgcttttctagttcttttaattgtgatgttagggtgtcaattttggatctttcctgctttctcttgtgggcatttagtgctataaatttccctctatacactgctttgaatgcgtcccagagattctggtatgttgtgtctttgttctcgttggtttcaaagaacatctttatttctagcttcatttcgttatgtacccagtagtcattcaggagcaggttgttcagtttccatgtagttgagcggttttgagtgagattcttaatcctgagttctagtttgattgcactgtggtctgagagatagtttgttataatttctgttcttttacatttgctgaggagagctttacttccaagtatgtggtcaattttggaatacgtgtggtgtggtgctgaaaaaaatgtgtattctgttgatttggggtggagagttctgtagatgtctattaggtccacttggtgcagagctgagttcaattcctgggtatccttgttgactttctgtctcgttgatctgtctaatgttgacagtggggtgttaaagtctcccattattaatgtgtgggagtctaagtctctttgtaggtcactcaggacttgctttatgaatctgggtgctcctttctctctggctgcccttaacattttttccttcatttcaactttggtgaatctgacaattatgtgtcttggagttgctcttctcgaggagtatctttgtggcgttctctgtatttcctgaatctgaatgttggcctgccttgctagattggggaaattctcctggataatatcctgcagagtgttttccaacttggttccattctccccgtcactttcaggtacaccaatcagacgtagatttggttttttcatatagccccatatttcttggaggctttgctcatttctttttattcttttgtctctaaacttcccttctcgcttcatttcattcacttcatcttccatcactgctaccctttcttccagttgatcgcatggcctcctgaggcttctgcattcttcacgtagttctcgagccttggttttcagctccatcagctcctttaagcacttctctgtattggttattctagttatacattcttctaaatttttttcaaagttttcaacttctttgcctttggtttgaatttcctcccatagctcggagtaatttgatcgtctgaagccttcttctctgagttcatcaaagtcattctccttccagctttgttctgttgctggtgaggaactgcgttccttgggcagtatggccattttcacgatattgattcttcctacccatgagcatggaatgttcttccatttgtttgtatcctcttttatttcattgagcagtggtttgtagttctccttgaagaggtccttcacgtcccttgtaagttggattcctaggtattttattctctttgaagcaattgtgaatgggagttcactcatgatttggctctctgtttgtctgttattgttgtgtaagaatgcttgtgatttttgcacattgattttgtatcctgagactttgctgaagttgcttatcagcttaaggagattttgggccgagacaatggggttttctagatatacaatcatggcatctgcaaacagggacaatttgacttcctcttttcctaactgaataccctttatttccttctcctgcctaattgccctggccagaacttccaacactagcctccgacccccgacaggccccggtgtgtgatgttcctctccctgtgtccatgtgttctcatttttcaactcccaattatgagtgagaacatgtggtgtttggttttctgatcttgtgatagtttgctgagaatgatggtttccagcttcatccaggtccctgttgtttcctgactttttaatgattgccattctaactggtgtgagatgatatctcatagtggttttgatttgcatttctctgatggccagtgatgatgagcatttcttcatgtgttttttggctgcataaatgtcttcttttgagaagtgtctgttcatgtccttcgcccactttttgatggggttgtttgtttttttcttgtaaatttgtttgagttcattgtagattctggatattagccctttgtcagatgagtaggttgcgaaaattttctcccatgttgtaggttgcctgttcactctgatggtagtttcttttgctgtgcagaagctctttagtttaattagatcccatttgtcaattttggcttttgttgccattgcttttggtgttttggacatgaagtccttgcccacgcctatgtcctgaatggtaatgcctaggttttcttctagggtttttatggttttaggtctaacgtttaaatctttaatccatcttgaattgatttttgtataaggtgtaaggaagggatccagtttcagctttctacatatggctagccagttttcccagcaccatttattaaatagggaatcctttccccattgcttgtttttctcaggtttgtcaaagatcagatagttgtagatatgcggcattatttctgagggctctgttctgttccattgatctatatctctgttttggtaccagtaccatgctgttttggttactgtagccttgtagtatagtttgaagtcaggtagtgtgatgcctccagctttgttcttttggcttaggattgacttggcgatgcgggctcttttttggttccatatgaactttaaagtagttttttccaattctgtgaagaaagtcattggtagcttgatggggatggcattgaatctgtaaattaccttgggcagtatggccattttcacgatattgattcttcctacccatgagcatggaatgttcttccatttgtttgtgtcctcttttatttccttgagcagtggtttgtagttctccttgaagaggtccttcacatcccttgtaagttggattcctaggtattttattctctttgaagcaattgtgaatgggagttcactcatgatttggctctctgtttgtctgttgttggtgtataagaatgcttgtgatttttgtacattgattttgtatcctgagactttgctgaagttgcttatcagcttaaggagattttgggctgagacaatggggttttctagataaacaatcatgtcgtctgcaaacagggacaatttgacttcctcttttcctaattgaataccctttatttccttctcctgcctgattgccctggccagaacttccaacactatgttgaataggagcggtgagagagggcatccctgtcttgtgccagttttcaaagggaatgcttccagtttttgcccattcagtatgatattggctgtgggtttgtcatagatagctcttattattttgaaatacgtcccatcaatacctaatttattgagagtttttagcatgaagggttgttgaattttgtcaaaggctttttctgcatctattgagataatcatgtggtttttgtctttggctctgtttatatgctggattacatttattgatttgcgtatattgaaccagccttgcatcccagggatgaagcccacttgatcatggtggataagctttttgatgtgctgctggattcggtttgccagtattttattgaggatttttgcatcaatgttcatcaaggatatcggtctaaaattctcttttttggttgtgtctctgcccgactttggtatcagaatgatgctggcctcataaaatgagttagggaggattccctctttttctattgattggaatagtttcagaaggaatggtaccagttcctccttgtacctctggtagaattcggctgtgaatccatctggtcctggactctttttggttggtaaactattgattactgccacaatttcagagcctgttattggtctattcagagattcaacttcttcctggtttagccttgggagagtgtatgtgtcgaggaatgtatccatttcttctagattttctagtttatttgcgtagaggtgtttgtagtattctctgatggtagtttgtatttctgtgggatcggtggtgatatcccctttatcattttttattgtgtctatttgattcttctcttttttctttattagtcttgctagcggtctatcaattttgttgatcctttcaaaaaaccagctcctggattcattgattttttgaagggttttttgtgtctctatttccttcagttctgctctgattttagttatttcttgccttctgctagcttttgaatgtgtttgctcttgcttttctagttcttttaattgtgatgttagggtgtcagttttggatctttcctgctttctccagtagtcattcaggagcaggttgttcggtttccatgtagttgagctgttttgagtgagtctcttaatcctgagttctagtttgattgcactgtggtctgagagacagtttgttataatttctattcttttacatttgctgaggagtgctttacttccaactatgtggtcaattttggaataagtgtggtgtggtgctgagaagaatgtatattctgctgatttggggtggagagttctgtagatgtctattaggtccgcttggtgcagagctgaattcaattcctggatatccttgttaactttctgtcttgttgatctgtctaatgttgacagtggggtgttaaagtctcccattattattgtgtgggagtctaagtctctttgtaggtctctacggacttgctttatgaatctgggtgctcctgtattggatgcatatatatttaagatatttagctcttcttgttgaattgatccctttaccattatgtaacggccttctttgtctcttttgatctttgttggtttaaagtctgttttatcagagactaggattgcaacccctgcctttttttgttttccattttcttggtagatcttcctccatccctttattttgagcctatgtgtttctctgttgtttcctgactttttaatgattgccattctaactggtgtgagatggtatctcattgtggttttgatttgcatttctctgatggccagtgatggtgagcattttttcatgcgtttttttggctgcataaatgtcttcttttgagaagtgtctgttcatgtccttcacccactttttgatggggttgtttgttttttttcttgtaaatttgtttgagttctttgtagaatctggatattagtcctttgtcagatgggtagattgcaaaatttttctcccattctgtaggttgcctgttcactctgatggtagtttcttctgctgtgcagaagctctttaggttaattatatcccatttgtcaattttggcttttgttgccattgcttttggtgttttagtcatgaagtccttgcccatgcctatgtcctgaatggtattgcctaggttttcttctaggacttttatggctttaggtctaacatttaagtctttaatccatcttgaattgatttttgtataaggtgtaaggaagggatccagtttcagctttctacatatggctagccagttttcccagcaccatttattaaatagggaatcctttccccattgcttgtttttctcaggtttgtcaaagatcagatagttgtagatatgcggcattatttctgagggctctgttctgttccattgatctatatctctgttttggtaccagtaccatgctgtttcggttactgtagccttgtagtatagtttgaatagtgatgcctccagctttattcttgctttgttcctttggcttaggattgacttggcaatgggggctcttttttggttccatatgaactttaaagtagttttttccaattctgtgaagaaaggcattggtagcttgatggggatggcactgaatctgtaaattaccttgggcagtatggccattttcacgatattgattcttcctacccatgagcatggaatgttcttccatttgtttgtatcctcttttatttccttgagcagtggtttgtagttctccttgaagaggtccttcacatcccttgtaagatggattcctaggtattttattctctttgaagcaattgtgaatgggagttcactcatgatttggctctctgtttgtctgttattggtgtataagaatgcttgtgatttttgcacattgattttgtgtcctgagactttgctgaagtcgcttatcagcttaaggagattttgggctgagacaatggggttttctagatatacaatcatgtcatctgcaaacagggacaatttgacttccttttttcctaattgaataccctttatttccttctcctgcctaattgccctggccagaacttccaacactatgttgaataggagtggtgagagagggcatccctgtcttgtgcccccctgtcttgtgctggttttcaaagggaatgcttccagtttttgcccattcagtatgatattggctgtgggtttgtcatagatagctcttattattttgaaatacgtcccatcaatacctaatttattgagagtttttagcatgaagggttgttgaattttgtcaaaggctttttctgcatctattgagataatcatgtggtttttgtctttggctctgtttatatgctggattacatttattgatttgcgtatattgaaccagccttgcatcccagggatgaagcccacttgatcatggtggataagctttttgatgtgctgctggattcggtttgccagtattttattgaggatttttgcatcaatgttcatcaaggatattggtctaaaattctcttttttggttgtgtctctgcccggctttggtatcagaatgatgctggcctcataaaatgagttagggaggattccctctttttctattgattggaatagtttcagaaggaatggtaccagttcctccttgtacctctggtagaattcggctgtgaatccatctggtcctggactctttttggttggtaaactattgattattgccacaatttcagagcctgttattggtctattcagagattcaacttcttcctggtttagtcttgggagagtgtatgtgtcgaggaatgtatccatttcttctagattttctagtttatttgcgtagaggtgtttgtagtattctctgatggtagtttgtatttctgtgggatcggtggtgatatcccctttatcattttttattgtgtctatttgattcttctctctttttttctttattagtcttgctagcggtctatcaattttgttgatcctttcgaaaaaccagctcctggattcattgattttttgaagggttttttgtgtctctatttccttcagttctgctctgattttagttatttcttgccttctgctagcttttgaatgtgtttgctcttgcttttctagttcttttaattgtgatgttagggtgtcaattttggatctttcctgctttctcttgtaggcatttagtgctataaatttccctctacacactgctttgaatgcgtcccagagattctggtatgtggtgtctttgttctcgttggtttcaaagaacatctttatttctgccttcatttcgttatgtacccagtagtcattcaggagcaggttgttcagtttccatgtagttgagcggctttgagtgagattcttaatcctgagttctagtttgattgcactgtggtctgagagatagtttgttataatttctgttcttttacatttgctgaggagagctttacttccaactatgtggtcaattttggaataggtgtggtgtggtgctgaaaaaaatgtatattctgttgatttggggtggagagttctgtagatgtctattaggtctgcttggtgcagagctgagttcaattcctgggtatccttgttgactttctgtctcattgatctgtctaatgttgacagtggggtgttaaagtctcccattattaatgtgtgggagtctaagtctctttgtaggtcactgaggacttgctttatgaatctgggtgctcctgtattgggtgcataaatatttaggatagttagctcctcttgttgaattgatccctttaccattatgtaatggccttctttgtctcttttgatctttgttggtttaaagtctgttttatcagagactaggattgcaacccctgcctttttttgttttccattggcttggtagatcttcctccatccttttattttgagcctatgtgtgtctctgcacgtgagatgggtttcctgaatacagcacactgatgggtcttgactctttatccaacttgccagtctgtgtcttttaattgcagaatttagtccatttatatttaaagttaatattgttatgtgtgaatttgatcctgtcattatgatgttagctggcgattttgctcattagttgatgcagtttcttcctagtctcgatggtctttacattttggcatgattttgcagcggctggtaccggttgttcctttccatgtttaccgcttccttcaggagctcttttagggcaggcctggtggtgacaaaatctctcagcatttgcttgtctataaagtattttatttctccttcacttatgaagcttagtttggctggatatgaaattctgggttgaaaattcttttctttaagaatgttgaatattggcccccactctcttctggcttgtagggtttctgccgagagatccgctgttagtctgatgggctttcctttgagggtaacccgaactttctctctggctgcccttaacattttttccttcatttcaactttggtgaatctgacaattatgtgtcttggagttgctcttctcgaggagtatctttgtggcgttctctgtatttcctgaatctgaacgttggcctgccttgctagattggggaagttctcctggataatatcctgcagagtgttttccaacttggttccattctccacatcactttcaggtacaccaatcagacgtagatttggtcttttcacatagtcccatatttcttggaggctttgctcatttctttttattcttttttctctaaacttcccttctcgcttcatttcattcatttcatcttccattgctgataccctttcttccagttgatcgcatcggctcctgaggcttctgcattcttcacgtagttctcgagccttggttttcagctccatcagctcctttaagcacttctctgtattggttattctagttatacattcttctaaatttttttcaaagttttcaacttctttgcctttggtttgaatgtcctcccgtagctcagagtaatttgatcgtctgaagccttcttctctcagctcgtcaaaatcattctccatccagctttgttctgttgctggtgaggaactgcgttcctttggaggaggagaggcgctctgcgttttagagtttccagtttttctgttctgttttttccccatctttgtggttttatctacttttggtctttgatgatggtgatgtacagatgggttttcagtgtagatgtcctttctggttgttagttttccttctaacagacaggaccctcagctgcaggtctgttggaataccctgccgtgtgaggtgtcagtgtgcctctgctggggggtgcctcccagttaggctgctcgggggtcaggggtcagggacccacttgaggaggcagtctgcccgttctcagatctccagctgcgtgctgggagaaccactgctctcttcaaagctgtcagacagggacacttaagtctgcagaggttactgctgtctttttgtttgtctgtgccctgcccccagaggtggagcctacagaggcaggcaggcctccttgagctgtggtgggctccacccagttcgagcttcccggctgctttgtttacctaagcaagcctgggctatggcgggcgcccctcccccagcctcgttgccgccttgcagtttgatctcagactgctgtgctagcaatcagcgagattccgtgggcgtaggaccctctgagccaggtgtgggatatagtctcgtggtgcgccgtttcttaagccggtctgaaaagcgcaatattcgggtgggagtgacccgattttccaggtgcgtccgtcacccctttctttgactcggaaagggaactccctgatcccttgcgcttcccaggtgaggcaatgcctcgccctgcttcggctcgcgcacggtgcgcgcacacactggcctgcgcccactgtctggcgctccctagtgagatgaacccggtacctcagatggaaatgcagaaatcacccgtcttctgcgtcgctcacgctgggagctgtagaccggagctgttcctattcggccatcttggctcctccctccaattcttttgggtatatatccagcagtgggattgctggatcacatggtaatttttaattttttgaagaatcatcatactgttttccacggcagcagcaccattttatgttcccaccaacagttcattctagtttctccacatccttgccaacacttgctattttctctttttgacagtacccatcctaatgagtgtgaggtcctgtctcattgtggttttgattcttgaggctttttaaagctttttgtttcattataatttttattggattacaaaaggaacacaggtaattttatttggaaactatgaaaaataataaaaattatcttctcagaaaatgattcttgttaacatttaagctcagttaagctctctcactttctctcccttctctctctttgtacaacttttaaaaaatatagtaggggtgagactatatgtatctatactatagtaggggtgagactatatgtatccttcctttttcacttaatctcatgccttgagtagctttccactttattaaaaatgtgatgccattcaattgtatagtaaatacatatatgtaagcaaaacactgaaaactcttattctgggttccagcaagccatacctggaatggtgtaagcaggtagtttgcttggtgtgaacgtgttgttgaggcagctgccattgtgttgtgagtgggccacacgaacttgttctgttgtgtgtagacagtgtgtgctgatcctattaggaacagccaacgctttgtgtgagccacacacggttctaagtgctttgcttctgttaactcagtgaatcctcacaactccatgacggaatgctctaattatccccattttatagatggggcaactgaggtccaagagactacataatttcccgaagttcacacaggtagcagatggcagagccgggtcaggagtccaccatcttaccacgcagactgttttagccagagactctccggatctgctgtaggggacagaatacagctttatcgccgcacctgtccaccaagatggccgtagccacagagcttggttgggtaacgtcctctttatgtgacaggaacgttgctgatggggtttctgaaggtacttcctgctctttgtctcctggaagactgtgtcttcaggaatgtctctgaccctgcccagagttgaacggatgctgggaacccagcacctgcacacggccttccctccaggactctgcgcacctctgtgctccacaggagacatgcaggtgctttctctcatgagctcaggctcctgggctgacagctctccgaagctcgtggtgaggctcggtctctaactgtgccacttgccgatggcctctgttcacaaggcttcccctgctcttcgatcttgcatcaccccttgaatttgaaatccagagcagcccactcagagaccagtgtgaggaattagtgtccaggccacagatccagggactgggcacaaacatctgcctgttgagtaggaactgagctgtggccattggcaaaaaaggaggggtgagcatggctgtttcttggggagctaacattcactatcttgtctcctccctcaggatgtggggcaatcaagttggggatgaaggagcaaaagccttcgcagaggctctgcggaaccaccccagcttgaccaccctgaggtaactgtggccctgctgtctccaggggccaacctggtccctcccagctgctctaggtttgctggggaagggtgattcgtgctcctaatagaagaggaatttgcatgtgtgattttccttactcttgtcaaacctttctttgatgcataagaggccatctagtaaagcacattcttctctttttttaactttaagttctgggatacatgtagaagatgtgcaggtttgttacataggcaaatgcatgccatggtgatttgctgcacctatcaacctgtcatctaggttttaagccctgcatgcattaggtatttgtcctaatgcttgccctccccttgccccccacccccaacaggccctggtgtgtgttgttcccctccatgtgtccatgtgttctcattgttcaactcccacttatgagtgagaacatgcggtgtttggttttctgttcttgtgttagtttgccgagaatgatggtttccagcttctttgcagcgtctgtgttcttccaatagttcccagccgcactattttggacttgagtcatataggcagggatggtataggggtcctgtaagagaaggtgggcaataagggagaagagaagggtgcaggattgagcagctgtggctcctaaattgtcatcatcattttcatagctatggtaatcaccaaccctgttgtttcctgactttttaatgattgccattctaactggtgtgagatgatatctcatagtggttttgatttgcatttctctgatggccagtgatgatgagcatttcttcatgtgttttttggctgcataaatgtcttcttttgagaagtgtctgttcatgtccttcgcccactttttgatggggttgtttgtttttttcttgtaaatttgtttgagttcattgtagattctggatattagccctttgtcagatgagtaggttgcgaaaattttctcccatgttgtaggttgcctgttcactctgatggtagtttcttttgctgtgcagaagctctttagtttaattagatcccatttgtcaattttgtcttttgttgccattgcttttggtgttttggacatgaagtccttgcccacgcctatgtcctgaatggtaatgcctaggttttcttctagggtttttatggttttaggtttaacgtttaaatctttaatccatcttgaattgatttttgtataaggtgtaaggaagggatccagtttcagctttctacatatggctagccagttttcccagcaccatttattaaatagggaatcctttccccattgcttgtttttctcaggtttgtcaaagatcagatagttgtagatatgtggcattatttctgagggctctgttctgttccattgatctatatctctgttttggtaccagtaccatgctgttttggttactgtagccttgtagtatagtttgaagtcaggtagtgtgatgcctccagctttgttcttttggcttaggattgacttggcaatgcgggctcttttttggttccatatgaactttaaagtagttttttccaattctgtgaagaaagtcattggtagcttgatggggatggcattgaatctgtaaattaccttgggcagtatggccattttcatgatattgattcttcctacccatgagcatggaatgttcttccatttgtttgtgtcctcttttatttccttgagcagtggtttgtagttctccttgaagaggtccttcacatcccttgtaagttggattcctaggtattttattctctttgaagcaattgtgaatgggagttcacccatgatttggctctctgtttgtctgttgttggtgtataagaatgcttgtgatttttgtacattgattttgtatcctgagactttgctgaagttgcttatcagcttaaggagattttgggctgagacgatggggttttctagataaacaatcatgtcatctgcaaacagggacaatttgacttcctcttttcctaattgaataccctttatttccttctcctgcctgattgccctggccagaacttccaacactatgttgaataggagcggtgagagagggcatccctgtcttgtgccagttttcaaagggaatgcttccagtttttgcccattcagtatgatattggctgtgggtttgtcatagatagctcttattattttgaaatacgtcccatcaatacctaatttattgagagtttttagcatgaagggttgttgaattttgtcaaaggctttttctgcatctattgagataatcatgtggtttttgtctttggctctgtttatatgctggattacatttattgatttgcgtatattgaaccagccttgcatcccagggatgaagcccacttgatcatggtggataagctttttgatgtgctgctggattcggtttgccagtattttattgaggatttttgcatcaatgttcatcaaggatattggtctaaaattctcttttttggttgtgtctctgcccggctttggtatcagaatgatgctggcctcataaaatgagttagggagtattccctctttttctattgattggaatagtttcagaaggaatggtaccagttcctccttgtacctctggtagaattcggctgtgaatccatctggtcctggactctttttggttggtaaactattgattattgccacaatttcagagcctgttattggtctattcagagattcaacttcttcctggtttagtcttgggagagtgtatgtgtcgaggaatgtatccatttcttctagattttctagtttatttgcgtagaggtgtttgtagtattctctgatggtagtttgtatttctgtgggatcggtggtgatatcccctttatcattttttattgtgtctatttgattcttctctctttttttctttattagtcttgctagcagtctatcaattttgttgatcctttcaaaaaaccagctcctggattcattgattttttgaagggttttttgtgtctctatttccttcagttctgctctgattttagttatttcttgccttctgctagcttttgaatgtgtttgctcttgcttttctagttcttttaattgtgatgttagggtgtcaattttggatctttcctgctttctcttgtaggcatttagtgctataaatttccctctacacactgctttgaatgcgtcccagagattctggtatgtggtgtctttgttctccttggtttcaaagaacatctttatttctgccttcatttcgttatgtacccagtagtcattcaggagcaggttgttcagtttccatgtagttgagcggctttgagtgagattcttaatcctgagttctagtttgattgcactgtggtctgagagatagtttgttataatttctgttcttttacatttgctgaggagagctttacttccaactatgtggtcaattttggaataggtgtggtgtggtgctgaaaaaaatgtatattctgttgatttggggtggagagttctgtagatgtctattaggtccgcttggtgcagagctgaattcaattcctgggtatccttgttgactttctgtctcgttgatctgtcggttgttcctttccatgcttagcgcttccttcaggagctcttttagggcaggcctggtggtgacaaaatctctcagcatttgcttgtctgtaaagtattttatttctccttcacttatgaagcttagtttggctggatatgaaattctgggttgaaaattcttttctttaagaatgttgaatattggcccccactctcttctagcttgtagggtttctgccgagagatccgctgttagtctgatgggcttccctttgagggtaacccgacctttctctctggctgcccttaacattttttccttcatttcaactttggtgaatctgacaattatgtgtcttggagttgctcttctcgaggagtatctttgtggcgttctctgtatttcctgaatctgaacgttggcctgccttgctagattggggaagttctcctggataatatcctgtagagtgttttccaacttggttccattctccgcatcactttcaggtacaccaatcagacgtagatttggtcttttcacatagtcccatattt

SEQ ID NO: 164 - DNA, 450 bp, Homo sapiens
  SIMILAR (325)..(450): 831254mologous to Mus musculus putative,accession number AK017817,Smith-Waterman Score=177.
  misc_feature (1)...(450): n = a,t,c or g
ccggccggaattccgnnnaacccacgcgtccgcccacgcgtccggagctgaagtatcaggctctggctctagctttagctctggcactggaactgcgtcggagtctgggtctgagtctggcagcccgaagcctggacaccttttcttgattctctaagcgggggctgcctgcgtccaagcagctggtttgcagcgttccaacgctgggagggagttcccttacctggggtccagtctgtaaagttgtcgccgctttctagggaccccgccccaccggctgggactcttccatgcgtggcactggaagcagactggttcctggacatgcccggtggaaggaggggccctagtcggcaacagctaagccgttcagctttaccttctttgcagactttggttgggggaggctgggggaaaggaacaggcttgagaaacaggaaagggagggct

SEQ ID NO: 165 - DNA, 885 bp, Homo sapiens
  SIMILAR (347)..(883): 871254mologous to Mus musculus putative,accession number AK017817,Smith-Waterman Score=834.
tttcgtggaggctagggatgggtgctgaagtatcaggctctggctctagctttagctctggcactggaactgcgtcggagtctgggtctgagtccggcagcccgaagcctggacaccttttcttgattctctaggcgggggctgcctgcgtccaagcagctggtttgcagcgttccaacgctgggagggagttcccttacctggggtccagtctgtaaagttgtcgccgctttctagggaccccgccccaccggctggggctcttccatgcagttgaaactggttgacaaccattaacctggggttgcaactacaggtggcactggaagcagactggttcctggacatgcccggtggaaggaggggccctagtcggcaacagctaagccgttcagctttaccttctttgcaaactttggttggtggaggctgtggcaatggaacaggcttgagaaacaggaatggtagtgctattggccttccagtcccacctatcacagccttaatcaccccaggtcctgttcgtcattgccaaattcctgacttgcctgtggatgggagcctactctttgaattcctttttttcatctacctgttggctgctcttttcattcagtacatcaacatttataaaacagcgtgggggtatccttacaatcatcctgcttcttgcacatcactgaattttcatctcactgattatgatctggcagcattcatcacaaagatgcttgcgaagaggcttgtatgggctctcatctcacaggctactaaggcaggtgcagcatcaatgattcactacatggatctgacatcagcccgcttgggactactcactctatgtggatgggtactttgttggaccctcgtcaatctctttcgaac

SEQ ID NO: 166 - DNA, 577 bp, Homo sapiens
  SIMILAR (255)..(335): 921254mologous to Rattus norvegicus cellular retinoic acid- binding protein II,accession number U23407,Smith-Waterman Score= 118.
ccgggtcgacccacgcgtccggtccctggacttgtcttggttccagaacctgacgacccggctgacggcgacgtctcttttgactaaaatgacagtgtccagtgctccagcctaggagcctacggggaccgcctcccgcgccgccaccatgcccaacttctctggcaactggaaaatcatccgatcggaaaactttcaggaattgctcaaagtgctgggggtgaatgtgatgctgaggaagattgctgtggcatgcagcgtccaagccagcagtggagatcaaacaggagggagacactttctacatcaaaacctccaccaccgtgcgcaccacgagaaattaacttcaaggttggggaggagtttgaggagcagactgtggatgggaggccctgtaagagcctggtgaaatgggagagtgagaataaaatggtctgtgagcagaagctcctgaagggagagggccccaagacctcgtggaccagagaactgaccaacgatggggaactgatcctgaccatgacggcggatgacgttgtgtgcaccagggtctacgtccgagagtgagtgccacagg

SEQ ID NO: 167 - DNA, 378 bp, Homo sapiens
  SIMILAR (125)..(376): 751254mologous to Homo sapiens isolog of yeast sui1 and rice gos2; putative,accession number L26247,Smith-Waterman Score=324.
ctgcggcctcccccttgaggcccctcgctgccctacgttccgaacccccctgcccgccttgtcccgccaccgtcgccgtcgtcttacggaggccgtttccaccgaggaaaaggaatcggatcgtatgtccgctatccagaacctccactctttcgacccctttgctgatgcaagagagggcgatgacctgcttcctgctgggcctgaggattatttgcatataaaaatccaacacagaatcggcgggaagacccttactactggccaagggatcgctgatgatcacgataaaaagaaacttgtggtggcgtcaaagaaaaggtccggctgcgatggtactgtaactggccctccggattatggagaagttattgaggt

SEQ ID NO: 168 - DNA, 518 bp, Homo sapiens
  SIMILAR (247)..(375): 901254mologous to Homo sapiens alternative Hermansky-Pudlak syndrome associated protein,accession number U96721,Smith-Waterman Score=195.
cggaagcgcgcccgggctcctgcaggcggggcgctgtgcgcgccgcgatccggtacgtgggcctccgggctgtcccctctgggggcggcgatcctccctccggagccccccttcaaccctcccggaagtgagcatttgcaggaccagggatgctgtgctgctctcccatgagccagtcaccgagtcgggctgctgcagccctttctgaacctctggccgtctggatgctccactgtgcttgccaagatgaagagcgtcttggtggccactgagggcgcagaggtcctcttctactggacagatcaggagtttgaagagagtctccggctgaagttcgggcagtcagagaatgaggaagaagaggttggcctcttgatgctctgagctcggtgaccccacccccacaccccaccagtcctctctggactaaatgagggcaagaagaagtcgaattttatcacgtaacagaagaacttggagccatcagtttctgtaacctaaaaagtttaacaaggctg

SEQ ID NO: 169 - DNA, 528 bp, Homo sapiens
  SIMILAR (239)..(526): 981254mologous to Homo sapiens Hermansky-Pudlak syndrome protein,accession number U79136,Smith-Waterman Score=488.
tttcgtggctcttgcaggcggggcgctgtgcgcgccgcgatccggtacgtgggcctccgggctgtcccctctgggggcggcgatcctccctccggagccccccttcaaccctcccggaagtgagcatttgcaggaccagggatgctgtgctgctctcccatgagccagtcaccgagtcggtctgctgcagccctttctgaacctctggccgtctggatgctccactgtgcttgccaagatgaagtgcgtcttggtggccactgagggcgcagaggtcctcttctactggacagatcaggagtttgaagagagtctccggctgaagttcgggcagtcagagaatgaggaagaagagctccctgccctggaggaccagctcagcaccctcctagccccggtcatcatcttctccatgacgatgctggagaagctctcggacacctacacctgcttctccacggaaaatggcaacttcctgtatgtccttcacctgtttggagaatgcctgttcattgccatcaatggtga

SEQ ID NO: 170 - DNA, 1125 bp, Homo sapiens
  SIMILAR (568)..(1071): 621254mologous to Homo sapiens p40,accession number U93564,Smith-Waterman Score=516.
atggtgctgttgacactcgatggtgattacactcatgcagacaggaaccttgagtggtgggggctgaaggtgctgagcgcaacgccccaggcagacaagaagaaacttgcaagtgcagataatcagccagagactgtttctctgctcctcgctaaaaatgctttgtttccctgccgctcggttggagtctccacgaccgagctggtctcggcacaaatccatgcaggcccaggtcctgaagtcagccttgtggagcctgtgggcgccatgtggaccatggttctcagggcagtgctaaagcagtcacaggtggaggctccctccagggcactaaaactcccatccctggagtgtgcagccagtcttgggcagctccacaccccagctgacctcacttactattgccaggaaaaagtcctgtttgtggacttcttgctgcaaggggggattggctttaagacaacgggttcctggctgatctccaataaggaacaccataaaacattttttaaagcccaacaagccctggaggaagagggaatatctgctttccagtttctgcattataaggttcagagtccagtcaacaacaaaaacaacaaagaaggcataaaaaaggggaaagaacacagctcctcgccagcaacagaacaaagctggacagagaatgactttgatgagttgagagaagaaggcttcagacgatcggtaataacaaacttctctgagctaaaggaggatgttcgagcccattgcaaagaagctaaaaactttgaaagaagattggacgaatggctaactagaataaacagcaaagagaagaccttaaatgatctgatggagctgaaaaccatggcacgagaactatgtgatgcatgcacaagcttcagtagccaattcgatcaagtggaagaaagggtatcagtgattgaagatcaaatgattgaaatgaagcaagaagagaagtttagggaaaaaagagtaaaaacaaatgaacaaagcctccaagaaatacgggactatgtgaaaagaccaaatctacgtctgattggtgtacctagttcaaccattgtggaagatagtgtggcaattcctcaaggatctggaactagaaataccatttga

SEQ ID NO: 171 - DNA, 561 bp, Homo sapiens
  SIMILAR (331)..(558): 721254mologous to Homo sapiens PRO2221,accession number AF116695,Smith-Waterman Score=275.
atgccagggaactcagaggcaaaaagctattacaatgcaaagacagttttggaatcatgcacactactatgggagcagttcaagaaagtaactaagccctactggagtcagggaaagcttctcagagaagcccttgaaagtgatgacacctgcctgtggttgtgtagtattttgccggatgaagagcaagaagaaaaacattcctttgcagaggtgtcagtaagtcctattggcctgtccctaacccaaccaccactactatatttactgctgaaaccctggcacaactatcatcttctcacccagattactgcaaagcacaacagaaacacagctcctccagcaacggaacaaagtgggacagagaatgactttgacgagttgagagaagaaggcttcagacgattggtaataacaaacttctccaagctaaagggggaagttcgaacccatctcaaagaagctaaaaaccttgaagaaagattagacgaatggctaactagaataaacagcgtacagaagaccttaaatgaccagatggagctgaaaaccatggcatga

SEQ ID NO: 172 - DNA, 498 bp, Homo sapiens
  SIMILAR (325)..(486): 621254mologous to Homo sapiens Human secreted protein, SEQ ID NO: 7003,accession number AAG02922,Smith-Waterman Score=153.
atgaagccccctaaaggtccaccatctctacaagttccatcagcccctcccaagaagttgaggacagatggcagaatcacaacacccagcacgcacagtctgcactggcagctgattggatggtgtccattcacactgcgtgtgggtcttcctctcctaggccaccaactcaactgtcagtcttctctggcaacaccctcacagacacacccagaaacagtactccaccagccatctaggcatccttcaatccaatcaagtggacacctaatattaaccatcacaagtcctggaaccatggccagtgctgctagtgtggtcatgagacagactggctctgaccactttccatccttgcatctctccttgagggagtgcagctcctcaccagcaatggaacaaagctggacagagaatgactttgatgagttgagagaagaaggcttcagacgatcggtaataacaaacttctccgagctaaagaagctaaaaccttga

SEQ ID NO: 173 - DNA, 579 bp, Homo sapiens
  SIMILAR (54)..(578): 921254mologous to Homo sapiens p40,accession number U93570,Smith-Waterman Score=840.
cgtcgactttggatcctgtttcatggacttgtaaattaaaaacagaatgattacgcagctcctcaccagcaacggaacaaagctggacggagaatgactttgacaagttgagagaagaaggcttcagatgatcaaactactccgagctacaggaggaaattcaaaccaaaggcaaagaagttgaaaactttgaaaaaaatttagaagaatgtataactagaataaccaatacagagaagtgcttaaaggacctgatggagctgaaagccaaggctcgagaactacatgaagaatgcagaagcctcaggagccgatgcgatcaactggaagaaagggtatcagtgatggaagatgaaatgaatgaaatgaagcgagaagggaagtttagagaaaaaagaataaaaagaaacgaacaaagcctccaagaaatatgggactatgtgaaaagaccaaatctacatctgattggtgtacctgaaagtgacggggagaatggaaccaaattggaaaacactctgcaggatattatccaggagaacttccccaatctagcaaggcaggccaacattcagattcagg

SEQ ID NO: 174 - DNA, 456 bp, Homo sapiens
gtaaaatccaggttattttgttctgctcacgagttgagcctgtaagcctttctgtttgcctttctgcagaaagctgtttgtgagaaccctgtcttgagtacatgactggactgcacatgcagcaggcctgggcccttcaactccaactacatctggaggaggggtcccagtgtgaaggggttggataatagtcatagtggttctgtacaatcagaataaatcctggctcctgaagagaagaggggcaggcagcagggctcacactgtgcgtgctgggtgttgtgattctgccatctgtcctcaacttcttggggaggggctgatggaacttgtagagaaggtggacctttagggggcttcatggggccttctcaccagtgagaatccagccctgtcccagaagcagcctcaagcttccgcacttttaagtccagtgctgtctcccaaagccccctt

SEQ ID NO: 175 - DNA, 1758 bp, Homo sapiens
  SIMILAR (1061)..(1120): 351254mologous to Homo sapiens putative p150,accession number U93569,Smith-Waterman Score=48.
atggacgatatcccgcaagaggcccggcagtaccggcataaccaagcctatgcctacagcatccagggtgacggtgccgaggatgacgatgagcgcattgttagatttcatacacgggtcaccgtcgacagcgacacacttgcatcggatgcagcccggttaacgtgccggcacggcctgggtaaccaggatcgcagctcctcgccagcaatggaacaaagctggacggagaatgactttgatgagttgacagaagtaggcttcagaaggtcggtaataacaaacttctccgagctaaaggaggatgttcgaacccatcgcaaggaagaccacagtgcaatcaaattagaactcaggattaagaaactcattcaaaacctcacaactacatggaaactgaacaacctgctcctgaatgactaccgggtaaataatgaaatgaaggcagaaataaagatgttctttgaaaccaatgagaacaaagacacaacatatcagaatctctgcgacacatttaaagcagtgtgtagagggaaatttatagcactaaatgctcacaagagaaagcaggaaagatctaaaatcgacaccctaacatcacaattaaaagaactagagaagcaagagcaaacacattcaaaagcttgcagaaggcaagaaataactaagatccaagcagaactgaaggaaatagagacacaaaaaacccttcaaaaaatcaatgaatccaggagctggttttttgaaaagatcaacaaaattgacagaccactagcaagactaatcaagaagaagagagagaagaatcaaatagatgcaataaaaaatgataaagggtatatcaccaccaatcccacagaaatacaaactaccatcagagaatactataaacacctctacgcaaataaactagaaaatctagaagaaatggataaatttctggacacatacacactcccaaggctaaaccaggaagaagtggaatccctgaatagaccaataacaggctttgaaattgaggcaataattaatagcctaccaaccgaaaaacgtccggtaccagacggattcacagccaaattctaccacagttctgcagactgtacaagaagcatggcaccagcacctgcttctggtgaggccctcaggctgcttcctctcatgggagaaggtgaaggagagctgacgtgcagagatcacattgcaagagaggaagcacaagaatgcagctcctcgccagcaacggaacaaagctggatggagaatgactttgaggagttgggagaagaaggcttcagacgatcggtaataacaaacttctctgagctaaaggaggatgttcaaacccatttcaaagaagctaaaaaccttgaaaaaagattagacgaatggctaactagaataaacagcgtagagaagaccttaaatgacctgatgtagctgaaaaccgtggcatgagaactacgtgacacatacacaagcttcaatagccgattcgatcaagtggaagaaagggtatcagtgattgaagatcaaatgaatgaaatggagcgagaagagaagtttagagaaaaaagagtataaagaaatgaacaaagcctcaagaaatatggaactatgtgaaaagaccaaatcttcatctgattggtgtatctgaaattgacagggagaatggaaccaagttggaaaacactcttcaggatattttccaggagaacttcacctacctagcaaggcaggccaacattcaaattcagg

SEQ ID NO: 176 - DNA, 324 bp, Homo sapiens
  SIMILAR (150)..(320): 641254mologous to Homo sapiens Human complement component Clq C,accession number AAB30234,Smith-Waterman Score=186.
  misc_feature (1)...(324): n = a,t,c or g
nnnnnnnnnnnnnnnnnnnnnnnnnnnnnnnnnnnnnnnnnnnnnnnnnnnnnnnnnnnnnnnnnnnnnnnnnnnnnnnnnnnnnnnnnnnnnnnnnnnnnnnnnnnnnnnnnnnnnnnnnnnnnnnnnnnactctnggcctatactatacgggctgctacggaatttcaaggatgcccgatctttcccgggcaccttggaaggatagcttctacttactgccggtgcccatggtggagccaggaataccacccatttccgggtttcgaggacccaaagggcagatgggagaacctctcttacccggttatactggaaaaaaag

SEQ ID NO: 177 - DNA, 546 bp, Homo sapiens
  SIMILAR (352)..(504): 661254mologous to Homo sapiens Human secreted protein, SEQ ID NO: 7879,accession number AAG03798,Smith-Waterman Score=175.
gggctggctattggagggcaggcggttggagggctggcggttggagggctggcggctggagggcaggcggttggagggcaggcggttggctttctggtcttagtcactcccagtctgaagacaaggcagaggcctagtgattcccagattcgatatgtgtcaagaatcaccccagaaggcttggctgttaagaggccagagtgctgcgttccccagagttcccgactaggcctgtctggtgtggggcccaagaatgcatttctgaaacagtcccaggtctgccaagagcctccggtgcaggtcagaggctttctgggtccacctctcttagaagcagtttgaaaaaccgtatccctgcctggtatagtgcctcacgcctgtaatcccagcactttgggaggtcgaggtgggtggatcacgaggtcaggagttcaagaccagcctggccaacatggtgaaacaccatttatactaaaaaaaaaaaaaaaaaagatttgcggccgcaagcttattccctttagtgagggttaattttagcttggcacg

SEQ ID NO: 178 - DNA, 528 bp, Homo sapiens
  SIMILAR (229)..(483): 671254mologous to Podocoryne carnea ribosomal protein L9,accession number AJ009693,Smith-Waterman Score=283.
atgaagaccattctcagcaatcagactgttgacattccagaaaatgtcaacgttactctgaagggacgcacagttatcataaagggccccagaggaaccctgcggaaggacttcaatcacatcaacgtagaactcagactccttggaaagaaaaaaaagaggctccgggttgacaaatggtggggtaacagaaaggaactggctaccgttcggactatttgtagtcataatgggtctcttgttgaaatccgaaatttcttgggtgaaaaatacatccgcagggttcagatgagaccaggtgttgcctgttcagtacctcaagcccagaaagatgaattaatccttgaaggaaatgacactgagcttgtttcaaattcagcagctttgattcagcaacccacaacagttaaaaacaaggatatcaggaaatttttggatggtatctatgtctctgaaaaaggaactgttcagcaggttgatgaatcagatctaagagttatccagctacagaaagaagatgccagatga

SEQ ID NO: 179 - DNA, 1142 bp, Homo sapiens
  SIMILAR (413)..(997): 421254mologous to Homo sapiens ribosomal protein L9,accession number U09953,Smith-Waterman Score=201.
ggaaaggctgcggcgcggctcccactctcggaaccttgtcctgtttgtcccccagctcggcaagcgccatatgagcctggcggcgccagatgcgaatcctgttgtgggctttttggcctattcccgcccctcagtcttgccgggatggcaccgcccgcataggacttccagggttgggctgagtgggagttcgactgctgggcctcgtaattctcgctttggggctgctccttccaggctgggacacactggggcccgctgtcggtctcccgtcctccgacatcttgtctggaacttccgcctggcagtctccagtaggagtggagctctgtgcggcgtagtttggtggaaaaacgggccttgcgtcggcctcacccccagtgtttgtgtttcagaatgaagactattctcaagcaatcagacctgtcgaccattcccagaaaaatgtcgacattactctgaagggacgcacagttatcgtgaagggcccccagaaggaaccctgcggagggacttcaatcacatccaatgtagaactcagccttctttggaaagaaaaaaaaagaggcttccgggttgacaaaatggtggggtaacagaaaggaacttggctaccggtcgggactaatttgtaagtcatgtacagaacatgatcaaggggtgttacactggggcttccggttacaagatgaaggtcctgtggtatgctcacttccccattcaacgtttgttattccagggagaattgggtccttctttgttgaaatcccgaaattttcttggggggtggaaaaatacatcccgcagggtttccggatgaggaccaggttgtttgcttgtttcagtatctcaaggccccagaaaagatgaaattaatcccttgaagggaaaatgacattgagcttgtttccaaatttcagcgggctttgattcagcaaagccacaacagttaaaaacaaagggtatcaggaaattttttggatgggtatcaatgtctctggaaaaaggaactgttcaaccaggcttgattgaataagatctaagaagttacctggctacagaaagaagatgccagatgacacttaagacctacttgtgatatttaaatgatgcaataaaagacctattgatttggaaaaaaa

SEQ ID NO: 180 - DNA, 338 bp, Homo sapiens
  SIMILAR (241)..(336): 961254mologous to Homo sapiens transducin (beta) like 1 protein,accession number Y12781,Smith-Waterman Score=159.
  misc_feature (1)...(338): n = a,t,c or g
gcggcggcggcgaggaggggaatttccttgtgcctccattcccgggaggggggagcggcgttggaggccaccgtttcnnnnnnnnnnnnnnnnnnnnnnnnnnnnnnnnnnnnnnnnnnnnnnnnnnnnnnnnnnnnnnnnnnnnnnnnnnnnnnnnnnnnnnnnnnnnnnnnnnnnnnnnnnnnnnnnnnnnnnnnnnnttatatcctgtgttgtgacctcatggtttaagtgggaataaagatgagtataagcagtgatgaggtcaacttcttggtatatagatacttgcaagagtcaggattttctcattcagcatttacctttggtatagaaag

SEQ ID NO: 181 - DNA, 792 bp, Homo sapiens
atggggtttcgccatgttggccaggctggtctcaaactcctgacctcaagtgatctgcccgccttggcctcccaggtccagtgtaaactcgtggtccctgcatctgcagaaaggcacatttcccctctgcagcgcggactgattgcgttctcgctgcgtccagatccagggctcgccggcgacagagccagtctcggggtcccactgtgcggataccggattggtaatccgaggcggagccctaagcgcacacgccattgcgcccggacagcggctgtctcatgctctgcatacagcaagtgcttatatcaattcaggccgaatgtgggacacagtgcatctaccccaaaagcgatgtgtcagaccacggccgcaggggagggtgcgcacgccgcggacgagggctacacacaaagagtagtgggagcgaggcgagggacacctcaacgctacacgggcggggcagagactaagaaccgagcctttcgcagctaccccaaaatggagacctcttggccgcgcggcggagggagcaccccgcctgtagcactggatgcacaagtggagcgcgagtgcgctctagggtctggcgcgcagggcaagcactcgtgcctggctgtgcgggttgtgcttatattttgcattaacgaacattacccccaaacactcacctaccgattacctttcgtgcttcctctccgctcagggggaaccccaacctcctggagagctctgttctttcccagttccagcgactctaactgtaagctctgtgggggcacgagctcatag

SEQ ID NO: 182 - DNA, 413 bp, Homo sapiens
  SIMILAR (1)..(411): 1001254mologous to Homo sapiens homolog to cAMP response element binding and beta transducin family proteins,accession number AL163279,Smith-Waterman Score=713.
cagctctcacataagtcggattcagtggttttggtatcacagtctagacaaaggacatgtaggcgtaaatatccaaattatggtagaagaaatcgtagctggcgtgagttatcttctggaaatgagtcttcaagctctgtaagacatgagacttcctgtgatcagagtgaaggttctggttcttcagaagaggatgaatggagaagtgacagaaaaagtgagagttacagcgaaagttcaagtgactcttcatctagatattccgattggacagctgatgcgggcatcaatttgcagcctcctttaagaacatcatgtcgtcgacgaattactcgattttgtagtagttcagaagatgaaatatctactgagaatttatctcctccaaaaagaagacgaaagagaaaaaaaaa

SEQ ID NO: 183 - DNA, 3705 bp, Homo sapiens
  SIMILAR (146)..(880): 991254mologous to Homo sapiens homolog to cAMP response element binding and beta transducin family proteins,accession number AL163279,Smith-Waterman Score=1311.
gctttccatgtcagaagagatcattctccaccctgttgtcctatctctagccttaggagggccactacagtgcatttcttccagggctgccctggctttagtgtttgggccctatgcagttggtgaaggcctatgggaaaaaattgtggtcttgtccaataagcatgtggctcctgatcatcttttgcaaatctgccagcgcatcggtcctatgttggataaagaaattccacccagtatttcaagagtcacttctttacttggtgcaggaaggcagtctttgctacgtacagcaaaagactgcaggcacacagtttggaagggctctgcctttgctgctcttcatagaggaagacctcctgaaatgccagtgaattatggttccccaccaaatcttgtggagatacatcgaggaaaacaactcacagggtgttccacttttagtacagcatttccaggaactatgtatcagcatataaaaatgcacagaaggattctcggacatctatctgctgtttactgtgtagcatttgataggacaggacatagaatctttacaggttcagatgactgtttggtaaagatttggtcaacacataatggccgcttgttatctacattaagaggtcattctgcagaaatttcagatatggcagtaaactatgagaatacaatgattgctgcggggagctgtgataaaattattagagtgtggtgcttgagaacttgtgccccagttgctgtgctccaaggacacacaggatcaattacatctttacagtttagcccgatggccaaaggctctcaaagatacatggtttccactggtgctgatgggacagtttgcttttggcaatgggatttagaatccttaaaatttaggttcctaagtggtagcagagatggaacagcacggatttggagatttgagcagttagaatggaggagcattttattggatatggctaccagaatctcaggtcggattcagtggttttggtatcacagtctagacaaaggacatgtaggcgtaaatatccaaattatggtagaagaaatcgtagctggcgagacttcctgtgatcagagtgaaggttctggttcttcagaagaggatgaatggagaagtgacagaaaaagtgagagttacagcgaaagttcaagtgactcttcatctagatattccgattggacagctgatgcgggcatcaatttgcagcctcctttaagaacatcatgtcgtcgacgaattactcgattttgtagtagttcagaagatgaaatatctactgagaatttatctcctccaaaaagaagacgaaagagaaagaaagaaaataagcctaagaaggagatctggcaggaccggagacaactgggaattgccacagtggtttgggatgtggccatggttctctccacacatctggagatgggagctgtggagctcttgggctgccccgcagtgaaactgggtgctggcatagggctgatgggcatagtggctgccctgctgggtgctcatgtgactgtcatagatcgaaaaaatttgcggaggatgactccagcagagcttgcaaatatggagcatttatatgaatttcaccctccagtttggattactgacaccacacttagaaaatctccttttgttcctcaaatgggtgatgaggtaatatattttcgacagggtcatgaagcttatattgaggctgtaagaagaaataatatttatgaactgaaccctaataaggagccatggagaaaaatggatcttaggctcaagaaagaattccacattttagcaagtggcaaagatgttggtttgttaacagttattcagattgctggtggggatcaagaattggttaaaatagttggaatacgatatgaagttgggccccctacactctgttgcctaaaactagcatttatagatccagcaactggaaaacttatggacaaatctttctctattagatatcatgatatgccagatgttattgactttcttgtattgcgtcaattttatgatgaagcaagacagaggaattggcagtcttgtgacagattccgctctattattgatgatgcttggtggtttggaacagtgttaagtcaagagccatatcaaccacagtatcctgatagtcatttccagtgttatattgttaggtgggataatactgaaattgaaaaacttagcccatgggacatggaaccaattcctgataatgttgatccacctgaagaattaggagctagtatttctgtcacaacagatgagctagagaaattgctctataaaccacaagctggtgaatggggtcagaaatcaagagatgaagaatgtgatagaattatcagtggtatagatcaacttttgaatcttgatatagcagcagcttttgcaggccctgttgatttgtgtacatacccgaagtactgtactgtagtagcttatccaaccgatctttacacaattcgaatgagacttgttaatcgattttacaggttagtagaaacctgctttcaaaatgtttaaaaagctatatttggcaatattgactagggtaaacaaagaaagagatagtggtagaattgggggctgattagcattttctgtttcattattctctttcattgtcagatggtgttagatgcctatgggtaggtgtgggtagggccaggcagaagattgactaccatatttcaccctcgtttttttttcagtgattatttccatatcactgaaattttacttttattccacttatttcagtaaactttcactggtactttagtaatgagaatttttctatcctcatacatgattgaagacataatttgttttaaaattaatagccataattgaagaaacagttgtttgtttttctaatcaggtaaccaaggtgcagaatcttaaggcctcagtaaatgttgtgttttattatttgaacaataagaccttctattttaattattcttgggaaatagtggttttgtttctccagtggttttcatttgccaaactcatgacagatggtttaacaggggggctactgctcccagggaactgtcagataaatcctcatttccagtgcagcagctgttggcagtctttcatcaaaagtccatccatctggagttacctattgtgattggccaagtagttttgctttggctaccagggcttcgttctgttgaatatgataatccggaaatcgcttggatattctttgtgtcatttaaaaataatttttgtgggaggccaggcgcattggcttatgcctgtaatcccagcacttcatgaggcccaggcgggtagatcacctgaggtcaggagtttgagaccagcctggccaacatggtgaaaccctgtctctactaaaaaatacaaaaattagctgggcatggtggcgtgcacctgtaatcctagctactcaggagattgaagcagaagaattgcttgagcccagcagtcagaggttgtggtgagccgagatcaggccactgcactctaatgtgggtgtcagagggagactccgtctcaggaaaagaaaaaaaagacacacccaccagtgttctgtgtcagtttaccatcgccatggcaacactcccacccctttccatggcaatgactcagtgacccagaagtgactactccttccccagaaatttctgcataaactgccccttaatctg

SEQ ID NO: 184 - DNA, 4791 bp, Homo sapiens
  SIMILAR (4790)..(3240): 1001254mologous to Homo sapiens VEAR protein,accession number AF165531,Smith-Waterman Score=2678.
agggcttgaaaggactttattgtggctgtggtgaagcaggccctggtcttggcagatgataccagaagggcactgagtgccagcgtgcaacttgaatttgatcccataaagtcaggcatcaggaagccattcagaatttttcaccctgtcagatgctcagatttgctagagaactctggtagtggcaagaaccagagctgttactcagaattgggacagaggcattgtcccaaaaaaaaaaaagcccaaatcagagcagtggcaatgtaagtgcagggaggacatgatgtgggattatttagaaaacaggccaaatgacatgcaactactctgcggatacagacgaagcaggaatcagggacccaataagtctcaggtgctttcaagtaagagcatgtaggtggaaaggggcaggactctgggttccattctaagtaactgagactgaagcaacagtggaacctccagatacagataacccctgacagactgaaatacgatctggcgacagcaaggaggtggcagcttgagagaggtctacaacccacctaatggtttagagccacctgactaccaggcctgtgtgtggacgggaaagtcctgaggattggactctggaaaaccatcacacttaagagacagaggaaaaagagcagtcacggaggtaggtcacgaaatgggtcaacaggacccccgaagagttcaagatactggaaagcactggccatgagtgccagatctccagcacacacatcatgaatttgcttctccccagaggaaaagaagctccttcagggtggtgcctggctcagggtagctggtcaacaactagcttttaaaaaaacagagacacggtctcactatgtagcccaggctggacttgaaatcctgggctcaagcggtcatcccactcagcctcccaaaatgctgggactacaggcgtgagccactgtgcacagccaataactacttgttaagtgaatgaagaggtaggagctgggctctaagtggccactggacttgctgattagaagggagtgatgccataaaccacagccactttcaggacagcagcctgcctcctctcctcctacccctatcctgtccaacacctaagcatagtagtaccactgggagtctgtctcctcaaaagcaagaatgttcaggtacacatgtgtgagttcacctcctaactataggggagaaagcctgtctttatgtataagtctcattcacccattttgaccaaaacccttcagagggagatgctgtcattatgatgggtacctcttcaagactacgcaacagtaacagagcctataaaagctacacagaggccgggtgcggtggctcacgcctgtaatcccagcactctgggaggccaaggcaggcggatcacctgaggtcaggagttcgagaccagcctggccaacatggtgaaatcctgtctctactaaaaatacaaaaattagctgggcgtgctggctcacgcctgtagtcccagctactcgagaggctgagattataccaccgcactccagcctgagtgacagagtgagatatggcctcaaaaaacaaaaaaaagccacacagaatacaagcaagaaagtacttttagattaaaattcgtcttatgtgaattatggcaaatgaaatcaccccactgtttacctgttttatgagtttttacatttgcttaaaattagcatacttgatcttttacagttcccatctccaccaattagtattggcagatttccactatatgtagaagtcaaaagatcagactgtaaaaatatcagatattgtaattaagagctccaaacaagtcttgcagtttcaaaggtagaaacccacccagccagttcagctgcttggacttcaaagccctccgcctagccatctcagccaggctcaggttccttctcccacccatcaggccaagcaggacttgtcaaacatacacattcaagttcctagcacacagtaggtgctaagtgggaattgattataaacttgaattcttccatcaacaaatatccacctctcctgtccagcttgcctcagatcttcaggttctctcttctctgaggcagctaagcttctacatccttcatgaagtttcctttacttctcgacagaagacagttccctttaggcctatcatctctaaatgcaactggctttccattttccacttactcaacactccacaaagtacacttgctacatggtatttattcaatgactgtatatttagtcaccacctcaatcactgctaagctctcttcatgtctatctgtaccagtttcccatcttagactgtgacgtcagctggcaagggctggctgttggccgattcatcatgactgacatggtgtgtcacaaagagctccaagtaaatgctgtgaaggaagaggatgaggatggagatgaggatcctgagaagggcccagactggctgcccaacccatggacctgaggcctgagtaaggcctgggagctgctttcccctctgcccaggaactctgtccaggggcgattctaaggcacagtggtgaaggacatgattggtcccccaagtgtggtcctcaggtctcatggcagccactcgcctgggaacagtgcaacaagcattccatttagaagatcttccagaacacacacaagaagcattgtctaatgaaaatggagacaaggtctttcttggaagagagtgcccaagtagatactctctgccccaagactaaccaggtcccttttaaggtccctgagaacagcagcctgggagcaaccaagcctttcaaaggctgacaaggcacagagtggatgaatggaacgaacgatacatgaaaaaaacactttggctgataaaacctccaacctgaggcagggacagtgtcgctcgctgacatgcagaaacatgactgtagcagagatgatgatgatgagaaatgcttcgcatttcccacactgccgatatcccaagccctgtgctaccaccctctccccgaacacacacacacacacacacacacacacacacacacacacacacacacacacacacacacacacacagagcatctgcagaataagtcagaggttgacacccagagcctgacgtcaggataggactcttggcactccgcactgaaacaccgtgattagtcctgactagacagcaaaagtaacgccagcctaagcttgaaatgaagggtccatcttgtgaaaagttaggctgcgcccaagacagccaggtctgggaagtctttcacttctcctacttcgctgaaaggctgtccaccttggttgaatgtcagcttgtaccgtaagcggataggttctttgtgtggattgtcaagcagcagcatctgagatatcacagctggaggcatcaaaggactgaatgcaggaagcttggagctggatgccggctgcagcttcactctcattgactttggcacagccacttgaaacatgatatcccagacaggctggggagccgtgctcatcatggtcaagagcagcacctgtacctctgggtgcccaggggctcccgtctgggagaagtggagcagaattctgaatccattccggtcatacacaatgagaggcggcaggctgctgggcttaacagactccaaagggacaaacacttgagccagaggtgtattctgtgaagatggggaaggagccaacgggccagcctcccaggaccaacctggagaggacttagtacctggtggcacttccttggggacacttttctgcgaaacataattcagagggcacggagctggctgtgctgagaggaggtccagcaaattcctgtctgcagaagggttctgaacaccaccgcctggcagcgtgctggaggagggattcctcttttcctcacagcaattctgaccagaaaccatgcctgtaacaggagcatcactgattcccaaggctgccaggtcctgatgaagcaaagatggcaccacagtccccatctgcgcaggtccattgtccacctccaagtcaatcagggggcaggtcttcatgcagcctgctggattctgaaagactctggagacagggatgtctcccaatgagctggtcactctgtttccaaaggtgacccggccctccatcacctgtttgtacagcagaactccttgggtgaggaggtcatttgcctggagaatttccgcgagtgcatcatcgtcatcagtggtgtcactcgccaaccggaacagcgtgggccgcagcttttcacacctctcatacacgacctgcagggcctcctggtcgggcggggcctgccctggcctgcggtacatgctcagcatctcctgcagcaccttcacatggcttcgcacttcctccaccgcactgaccctcttggacaccttctccgatttttcttgttcctccttgaccaaattcttgattaaccggtttgcagcctgaaggtcctcggggtggttgctctttagaagccttgtcagaagcttggacttttcttcatcagcatcaaagatggagctcttgggccagggagatggtgggggtaagattttatccactggtagtttagggtcttgttttataattccttgtttcttcagcatctgataagcgtctcgaatcttgatgtcttccggaaaccagactgtccaactgaagagtatttcaatgactcttcctttaacttttcctgtggcccaggaccccaggtactttggggacaacactttgatcagttcgttcaggaaacgaaatttggccacctcgctgtggaac

SEQ ID NO: 185 - DNA, 345 bp, Homo sapiens
  SIMILAR (121)..(318): 621254mologous to Homo sapiens Human secreted protein, SEQ ID NO: 7879,accession number AAG03798,Smith-Waterman Score=199.
ttttaacacaggagttaccgggcgcggaggctcacgcctgtaatcccagcactttgggaggccaaggcgggcagatcatgaggtcaggagctcgagatcagcctggccaacacagtggaaccccctctctactaaaaatacaaaaaattagccgggcgtggtggcacgcacctgtagtcccaactactcaggaggctgaggcaggagaatcgcttgaacctgggaagtggaggttgcagtgaactgagattacgccattgcactccagcctgggtgacagactccgtctccaaaaaaaacgaattagaaaaagaaagttatctgatattttctagtttgacttaa

SEQ ID NO: 186 - DNA, 336 bp, Homo sapiens
atgggccgggcgcggtggctcacgcttgtaatcccagcactttgggaggccgaggcgggcggatcacgagaggtggaagaatacatgggagctgaggcagttaaatcttggacaagctccatgttcaaggaatgggatgagaaggtacggagagagaagacatcatccagacgagcccgggcagcccagtgtggaggggtttttgagagtcctgagtatgtgcatctgctgaaggtgttcctagaggacctagataaacaacagcagaccaactccaaagctagcagaagacaagaaataatcaaaatcagagctgaactggagattaagacatga

SEQ ID NO: 187 - DNA, 1624 bp, Homo sapiens
  SIMILAR (167)..(967): 1001254mologous to Homo sapiens C33 antigen=type III integral membrane protein,accession number S48196,Smith-Waterman Score= 1413.
gccgactgaggcacgagcgggtgacgctgggcctgcagcgcggagcagaaagcagaacccgcagagtcctccctgctgctgtgtggacgacacgtgggcacaggcagaagtgggccctgtgaccagctgcactggtttcgtggaaggaagctccaggactggcgggatgggctcagcctgtatcaaagtcaccaaatactttctcttcctcttcaacttgatcttctttatcctgggcgcagtgatcctgggcttcggggtgtggatcctggccgacaagagcagtttcatctctgtcctgcaaacctcctccagctcgcttaggatgggggcctatgtcttcatcggcgtgggggcagtcactatgctcatgggcttcctgggctgcatcggcgccgtcaacgaggtccgctgcctgctggggctgtactttgctttcctgctcctgatcctcattgcccaggtgacggccggggccctcttctacttcaacatgggcaagctgaagcaggagatgggtggcatcgtgactgagctcattcgagactacaacagcagtcgcgaggacagcctgcaggatgcctgggactacgtgcaggctcaggtgaagtgctgcggctgggtcagcttctacaactggacagacaacgctgagctcatgaatcgccctgaggtcacctacccctgttcctgcgaagtcaagggggaagaggacaacagcctttctgtgaggaagggcttctgcgaggcccccggcaacaggacccagagtggcaaccaccctgaggactggcctgtgtaccaggagggctgcatggagaaggtgcaggcgtggctgcaggagaacctgggcatcatcctcggcgtgggcgtgggtgtggccatggtcgagctcctggggatggtcctgtccatctgcttgtgccggcacgtgcattccgaagactacagcaaggtccccaagtactgaggcagctgctatccccatctccctgcctggcccccaacctcagggctcccaggggtctccctggctccctcctccaggcctgcctcccacttcactgcgaagaccctcttgcccaccctgactgaaagtagggggctttctggggcctagcgatctctcctggcctatccgctgccagccttgagccctggctgttctgtggttcctctgctcaccgcccatcagggttctcttagcaactcagagaaaaatgctccccacagcgtccctggcgcaggtgggctggacttctacctgccctcaagggtgtgtatattgtataggggcaactgtatgaaaaattggggaggagggggccgggcgcggtggctcacgcctgtaatcccagcactttgggaggccgaggcgggtggatcacgaggtcaggagatcgagaccatcctggctaacatggtgaaaccccgtctctactaaaaatacaaaaaaaatttagccgggcgcggtggcgggcacctgtagtcccagctacttgggaggctgaggcaggagaatggtgtgaacccgggagcggaggttgcagtgagctgagatcgtgctactgcactccagcctgggggacagaaagagactccgtctcaaaaaaaaaaaaaaaaa

SEQ ID NO: 188 - DNA, 629 bp, Homo sapiens
  SIMILAR (458)..(363): 871254mologous to Homo sapiens PRO2852,accession number AF130079,Smith-Waterman Score=149.
taggtagggcaggctaagtgaacagcattgagtattttctgaatccctcatgataatttatagccacatactgcttcctttgacttcaggaatgatcagttttcataatggccactgggcctgcttagattgcagtattcattatctgcatctaatttggtagtttccacaatcgtatttgaatgaaaagaaaacttcaatccccccattaataacctgtgtcctttgcccaagctgccctagcaatacatcaattatgtaatgttaaaagacatatgagcaagaaaaaaagtgatttaaacttacctcatcaagaaatgtgccccctacaggcccgggcgcagtggctcacgcctgtaatccccagcattttgggaggccgaggcaggtggatcacctgaggtcaggagtttgagaccagcctggccaacatggtgaaaccccgtctctactaaaaaatacaaaaattagctgggcatggtggcgtgcacctgtaatcctagctactcaggaggctgaggcaggagaatcgtttgaacctgggaggcggaggttgcagtgagccgagatcacaccattgcactccagcctggacaacagggtgagactccgcctcaaaaaaaaaaaaa

SEQ ID NO: 189 - DNA, 730 bp, Homo sapiens
  SIMILAR (682)..(416): 791254mologous to Homo sapiens Human secreted protein, SEQ ID NO: 7870,accession number AAG03789,Smith-Waterman Score=337.
ctgggcctcagatattgaagagtatagttagggcccagaaagaaaagggcttcttaagtggccccaggttgtgtggtttccaaacccgaaagcatagaggtcagaaggtgccttgcaggcagttttaacagttccaagtgtcccgaactgacttgttcaaattgcaacgtcatgacttgtggcgttattaaaacttcctgtattcctggttggctggatataatcttgaacaaaaggcatgcacttaaacaggaaaggtgaaaggcggaatgcaggttttcagctaaggagcttcccttttaaagaattgatgaagtgtcattattgggggtgggtgtgaaaggtgttagctaggaaaattaactttgcacttgcattgatattaagaaattattttcggacgggcgcggtggctcacgcctgtaatcccagcactttgggaggccgaggcgggcggatcacctgaggtcaggagttcgagactggcctggccaacatggtgaggccttgtctctgctaaaaatacaaaagttggctgagtgtggtggcgtgtgcctgtggtctcagctactcaggaggttgaggcaggggaatcgcttgaacctgggggacagaggttgcagtgagccaagatcgtaccgctgcactccagcctgggtgacagagcaggactctgtctcaggaaaaagaaaagaaaaaggaatgaaaagaaaaaaaaaaaaaaaaaaaa

SEQ ID NO: 190 - DNA, 8008 bp, Homo sapiens
  SIMILAR (7046)..(7165): 971254mologous to Homo sapiens dyskerin,accession number AJ224481,Smith-Waterman Score=203.
  misc_feature (1)...(8008): n = a,t,c or g
tttttttttttttttttttgacacacacagggatttcattaatacaactgtcttgaaatggcaaaattttacaaatagaaaacagtctcctgggttgcagggatataagcaggagtgagagctgaaagaggtgggtttggctgtaaaagtgctccttggggaggccgggcgcagtggctcacgcctgtaatcccagcactttgggaggccgaggcgggcggatcacccgaggtcaggagttcgagaccagcctggccaacatggtgaaaccccgtctttactaaaaatacaaaaaatttaggtgggcgtggtggtatacgcctgtaatcccagcactttggggaggccgaggcaggagaattgcttgaacctggagaaggaggttgcagtgagccgagtttctgccactgcactccagcctggggaaagagtgtgaccgtctcaaaaaaaaaaaattatatatatataaatatgtgtgtgtatatatgtatattatatatgtatgtattatatgtatgtatattatatatatatagtacacaaggttataagtggtgcacccgaagaggagggcacttaccatgaatggagcttgctgagctggaagttgccctggttgagtcggtgactgaatgtgaaggcctcagacattacactactggagactttataatctgtacacctaggctacactaaatttataaaaatatatttttcttcagaataaatcaaccttagcttactgtaactttataaactttttacttcgactgttgtaataatacttagcttaaaacaaacacattatttagctgtacgtaaatattttctctgcttatctccttatttataagttttctattttaaaattttttaatttttttcttaaaaaatttttttttgttaactaagacacaaacacagcacacacagtagccttgacctacacagggtcaggatcatcaagacatcactaggagataggaatttttcagctctgttataatcttatgggggccaccatcacatacgcagtctgtacttgcaaaacattatgtggcatgtgactgtaattgtagacctaaaatccatttcctacctgccctaatttcggtctttattttaaacccttgtttcatttattcttggggaaaattcccaaatcctgtgtttgtttttttagtaattattttgccaaagaaacataagaagaaaaaggagcggaagtcattgccagaagaagatgtagccgtgagtagtaatgtgtttgacttcactttgactaaaaagaaagtttacttaaataacaaactaaaggaaagaagtgtttttaaaggtttccaaggaatgggccagcattggtagtcattgtgtagattcgaaaaagcactgaaatgacacagccccagacagtccaagtgtccttcaggcatagcttactaaatggtgctggccttaccaactgctgtctctgaatttgtcttccttatgccacccacagacccgccatccccctttctctttaaatgtttggacccatcttagtgacatttcacttcccctctgtactcctggttcatttcttctctctctttcccttggaggtcccagtgaaaaggcataggaagccttgttttctgtttaaaaggcatacatttccatggcagtaatggaattgttcaaaatcgggtgggaagtttaataggttatatttctgtcctgtcgaaggaaatacaacacgctgaagaatttcttatcaaacctgaatccaaagttgctaagttggacacgtctcagtggccccttttgctaaaggtatgtggttaaaatcgtgcatcagatgaatgcctgcttttacgttatttccaagtgttaaacaattgattgagaatgcttactgctggcatccttgactttgggaagtgcccactgatacagtttaaagcaggattccttaaggtatctgaaatgagaaccaagtttttaaaaaattggcagtgcactcaacactgttgtagaacacatgtccccacaatgttaaattgctgagtttgtcaacagttctcagtttttgtacttagtccatcttgcagacctatgccagtttgtgggccacatagtggtactgactctttttttacatgtgctcacgacatggtattttgttttgtgttgtgtcgttgctttgtagaattttgataagctgaatgtaaggacaacacactatacacctcttgcatgtggttaaaatcctctgaagagagagattggggactatatcaggtaagtgttgggaggaggcactgtgcaaacttactttcttttgaaaatgctttcacatcagctattcaggaaggcagtggcatgccagaatagctttgtcttgaatatataacctgtacccgcagtgaattatttttctttttaacttttcagatttgttgtttcactggagcattaagagtgggtgatacattaattttttttttttccattccaggacaggtttcattaatcttgacaagccctctaacccctcttcccatgaggtggtagcctggattcgacggatacttcgggtggagaagacagggcacagtggtactctggatcccaaggtgactggttgtttaatcgtgtgcatagaacgagccactcgcttggtgaagtcacaacagagtgcaggtatgtgggagagggagggaaggactggctagagtgaaaagctttctgtatttcccttctatgttttgtctgctggaaactatttcttcattaagaaaaaaaaaaatcctaaagcaaggatattgttttggtttctgtgtacgttctgtcccctgccagatcttggtggtccgcgctttttggaattccacatactaagcatgtattcatcaagctgactggatccatttgtccgggttcagctctcagcttgtcactccaggcttctcactctgtgctaccgcttctgcctaaagtatccttcgttcatttttatctgagaaaagcctgcttatcttgcaaggctttttccacgcagcttctacactgagtactcccaactgtccctgttagtacattgaattcccagtgagaaagtgtcttcattctttcccacatcatcaccatgaaatctctcttaatgcaaattttatagaaacacaaggtcaaactgccgcttttcctgctgtgcaaaatgggagtgactgagcatataagaaatatggaaaacagaaaactcagtggccacacctgactactcttttgtcatttttcaggcaaagagtatgtggggattgtccggctgcacaatgctattgaaggggggacccagctttctagggtaagtctgcaattgtagggaggacaccctttgttgacttggatctctgagcccctaaacatctggagatgggttagctgtcctgactgactccttttgtccccttttcagtcggctgctgcagccagcctggaccagtgactgcacatgtacattctgatgaggtgtttgttttcatttgtgtttgttcttaggccctagaaactctgacaggtgccttattccagcgacccccacttattgctgcagtaaagaggcagctccgagtgaggaccatctacgagagcaaaatgattgaatacgatcctgaaagaagattaggtgagtcattaggcctgtgagtgggtatgaacacattcttcaggattctgttctcttattaaaagtagatgcccttgaagttgaagactttctaaaacctgccctacagctgggatattgtctgtgggcgatagtttttgttatcttttgttgaaaaagtgaacagtgcctagtaaagtgagatggcttttacaccttttatgatgactgcttctgctggagttgaaatgttttcattctgcatttgtgtagttcggtgctttgttcaaaggtaagtgttttcaccaaagtatgttttgcatgtgttttttatttgctgcaattttgactgcttagaagtttctgttgtcagaagtaaatttaagacaatgccaattttcctcccatccatgaaacataccatgctgaatatacctgcaacttaagtgttaaaaattctgctaatatcagaattacagatctttttttttttttttttttttttgagacggagtctcgctctgtcgcccaggctggagtgcggtggcatgatctcggctcactgcaaactctgtctcccgggttcacaccattttcctgcctcagcctcccaagtagctgggactataggcgcccgccatcatgcccggctaattttttgtacatttagtagagacggggtttcaccatgttagccaggatggtcttgacctcctgacgtcgtgatccacccgcctctgcctcccaaagtgctggaattacaggcgtgagccaccgtgcctggccagaattacagatctttacagcaaatgcttatattttaagaagtgtgtctgtcacctctagtcttggtggctcagatgaaggataactgcatttctcaaccagtgatgtatttacagtaggtgctgcttttcttttgtgtgtgtgtatcttaggaatcttttgggtgagttgtgaggctgacacctacagtcggacattatgtgtgcaccttggtttgttattgggagttggtggtcagatgcaggagcttcggagggttcgttctggagtcatgagtgaaaaggtatgtgttacggggctagaagttttagagctggttcttaccatctgccagcctttgatggcactccacttgcttcatgtcgtgggaaagatgctttccaaagtgttgagttcagtccagggcagcttccctgttctgttaattaaactttgggacattaaaatgggctaagggagatgattgggtagaaagtattattctattcatttgcctcccagcctacaaaaatgcctgcttggggtctaatacttcaacggttaaagatgcctggaagagggcgcggtggctcacgcctgtaatcccagcactttgggaggccgaggcgggtggatcatgaggtcaggagatcgagaccatcctggctaacaaggtgaaaccccgtctctactaaaaatacaaaaaaaattagccgggcgcggtggcgggcgcctgtagtcccagctactcgggaggctgaggcaggagaatggcgtgaacccgggaagcggagcttgcagtgagccgagattgcgccactgcagtccgcagtcccacctgggcgacagagcgagactccgtctcaaaaaaaaaaaaaaaaaaaaaaaaagatgcctggaagagccaggactgaagaggctgaaaacataatgagcttggactagtaaacaagtgacattcagttttaggaagtttggggtctgatgggctgagatacaaataaactgaattattttcatacatggctgcttttcaggaccacatggtgacaatgcatgatgtgcttgatgctcagtggctgtatgataaccacaaggatgagagttacctacggcgagttgtttaccctttggaaaagctgttgacatctcataaacggctggttatgaaagacagtgcagtaagttccgggttaggagtttatatttggaaagaacgtactccaaagatgacgcttgctctttttattgttttccttgggttttattttatttttttcaagtccaaaccaagtatattaatttaaagtaaaagtttaatggtaggcatacttaaaaataaggcacattaggccaggcacagtggctgatgcctataatcctagcactttggcaggctgaggcaagaggatcacttgagtccaggaaggagtttgagaccagcttgagcccaggagatcaaggctgtgagctgtgtttttatgatgatcagagagttggccttttataaattaaaacattgtctttttctctaacttgagggataaaaatttctggatatttaaaatgtttgtagttggtaattatttatattcaaatcttgtatagatgttcacattttttgtatgtgtataggctgtaataaatactgaaagatggcaccataatagttgaaaaaactcagtcacaaaacagtggacaacataaatgtgatgtcctctccttatcaaaccattggcttctgggtgaatgtaaagggaggggagaatgtgatcaaaagaggtctaggtgagtggagatggtatgaggcagatgggtgcattgggtaccattgaacctctggagaggtagccttaacttgtacccactgacctataaattctgcaccaagacttttgtgtgattggttcaacagggctcagtaatcttgttctcaagttctttaagagcctgttattgcctggatctccagtaaatctgttctttctcctcataaggaggagagaggagtaattaaggaatgccaaggctatttttatgtttcaaatgaaaatatggaccacgtgcggtggctcacacccataatcccagcgctttgggaggccgggccaggcaaattgcttgagctcaggagtttgagaccagcctgggcaatatggtgaaaccctgtctctattaaaaatacaaaaattaggtgggtgtggtggcacgtgcctataatcctagctactgggatggttgagacaggagaatcacttgaacttgggagatggaggttgcagtgagccgagaatgtgccactgcactccaccctggacaacagagggaggttctgcctgaaaattaaaaaaaaaaaaaaaaaaaagaaaatacttgtgagtctctagaacctgaaaacctgaaagtcttctttactacttttgagtcgtgtgtaatgtgcggagagtggtacctatagcacagtgaggtggctcttctgagtaccactcatgccccttgcagctagtgggctataagtgtcatccctgtttcctggtgtcaggccccactcccttgttgtcctcctttactctggtgtgggagtggggtggagggcagcagctgggccccttacacttggtgccatctctgcaggtaaatgccatctgctatggggccaagattatgcttccaggtgttattcgatatgaggacggcattgaggtcaatcaggagattgtggttatcaccaccaaaggagaagcaatctgcatgggtnagaggggatgtttatttcccaaattctaaatgtttgtggttacatactaggtgtatatatttatggggttcatgagatgttttgatacaggcatgcaatacataataatcacatcatggagaatggggcatccatcttaagcatttatcctttgtgttacaaacaatcctattttactgttagttatttatcaccttagttattttaaaatatacacttaagttattattgattatagtcaccccgttgtgctattaaatagtctcactcttcttgttcattcttttggttttttggtggtggtgttttttttttttttttttttttgagacggagttttgctcttgtcacccaggctggagtccaatggctcgatctcggtgtcaccgcaacctctgcctcccaggttcaagcaattctcctgcctcagcctcccgagtagctgagattacaagcatgcaccactatgcccggctaattttctgtatttttagtagaggcggggtttctccatgttggccaggctggtctcaaactcctgacctcaggtgatccacccgcctcggcctcccaaaagtgctgggattacaggcgtgaaccaccacgccaagaattacttttaacttttaaaacaaaacatcaattaaagagaaatatcgttattactaggcctcatatatcaagcattggatatctcttgtattttcttggtagttcttggaaatctgtcagcatttatccaaagattttttttaaaaggattcatagcagatatgaatattattattccaactaaaggttgatcaaatgtccatgctacttgttaattgaaatgtggt

SEQ ID NO: 191 - DNA, 395 bp, Homo sapiens
tttcgttgcactgctgaatcccacagggagctcacgctccagtctctccacggggcttccacggcaggacggtgacatcacaagccttctcttcagagttgggtgggattgcagagtgtctgctggctcccaggtccagctgggaaaggcgggagggaaatgaagtgtgtgagtgaacagccacccgaagggagctacttctgagcatcttgagcctcgggggccaacaagcaagcccttaggaagaacaggctggaccctgagtctgagactcggttactccccaagtctccagaaggcagtaacacactcccttggttgccttttagtccgtgcactggagaaggcgaggtcaagtgcccaactgcagaccaactacccctcctcagacaacg

SEQ ID NO: 192 - DNA, 404 bp, Homo sapiens
  SIMILAR (278)..(379): 881254mologous to Mus musculus putative,accession number AK002822,Smith-Waterman Score=164.
tttcgtctgaggggtacggagactctgggggagggagacggcagcggcatggcggccgggtgtaagacgcccgaccctcctcttccctgtcttcgccgccgccgctgctggagtcactgggaccctgtagtctgcgtgtgttagttgtaatcccgccgccctcctgtcagccctccgctccgccggccctccttccttccgccgccgcagccagcccgagggtcggccggctgtgtaacactctcccaccccacccaccagcccgcgggccagcaccatggaggacgtgaagctggagttcccttcccttccacagtgcaaggaagacgccgaggagtggacctaccctatgagacgagagatgcagctacctgtactacagaaacatggaataacccatataa

SEQ ID NO: 193 - DNA, 968 bp, Homo sapiens
  SIMILAR (675)..(965): 951254mologous to Mus musculus protein tyrosine phosphatase- like,accession number U34973,Smith-Waterman Score=483.
tgaggggtacggagactctgggggagggatacggctttggcatggcggccggggtgtaagacgcccagaccctcctcttccctgtcttcgccgccgccgctgctggagtcactgggaccctctagtctgcgtgtgttagttgtaatcccgccgccctcctgttagccctccgctccgccggccctccttccttcctgccgccgcatccagcccgagggtcggccggctgtgtaacactctcccaccccacccaccagcccgctggccagcaccatggatggactgtgaagctggaagttcccttcccttccacagtgcaagggaagacgccgaaggagtggacctaccctatgagacgagagatgcagggaaattttacctgggattgttcttaggcccatattcatctgctatggaaaaagcaagatccctcccttcttgctgtatcctcacacggccaagagaacgagttcttgcctcttcttacaagggtacaatcctgtcatggaggtttctaccctcatgacctcaatctaaaactgattatcttccagagactccaccatcacatcttggggctacctgtactacagaaacatggaataacccatataatatgcatacgacaaaatattgaagcaaactttattaaaccaaactttcagcagttatttagtgcagcctttgttattgcatacattatggaaacatttggaatgaagtacagagatgcttttgcttatgttcaagaaagaagattttgtattaatcctaatgctggatttgtccatcaacttcaggaatatgaagccatctacctagcaaaattaacaatacagatgatgtcaccactccagatagaaaggtcattatctgttcattctggtaccacaggcagtttgaagagaacacatgaagaagaggatgattttggaaccatgcaagtggcgactgcacagaatggctga

SEQ ID NO: 194 - DNA, 927 bp, Homo sapiens
  SIMILAR (547)..(774): 821254mologous to Mus musculus putative,accession number AK004617,Smith-Waterman Score=345.
atgctccgcgccaggccccgccccggctcgccgtggagaccggcgcgtgaggaacctaccggtaccggccgcgcgctggtagtcgccggtgtggctgcacctcaccaatcccgtgcgccgcggctgggccgtcggagagtgcgtgtgcttctctcctgcacgcggtgcttgggctcggccaggcggggtccgccgccagggtttgaggatgggggagtagctacaggaagcgaccccgcgatggcaagtgatggcaatgcgaaagcttgcgccttgcatttacctggcgcttccacctgcccggtagctcgggccacgggcagttcggccacacccacgctgagaacaacccctgggcgagaaacatcttatcccaaaaataacccaaatgcacatggcgattttttaaaaataaatagagcatatgaagtactcaaagatgaagatctacggaaaaagtatgacaaatatggagaaaagggacttgaggataatcaaggtggccagtatgaaagctggaactattatcgttatgattttggtaaggatggtcttgttaatgtaggatggatggactgtgccacccaggataacctttgtaaaagcttagatattacaacaagtactactgcttattttcctcctggagccactttaaataacaaagagaaaaacagtattttgtttctcaactcattggatgctaaagaaatatatttggaagtaatacataatcttccagattttgaactactttcggcaaacacactagaggttggcaggtttgactgttcctctgcaccagacatctgtagtaatctgtatgtttttcagccgtctctagcagtatttaaaggacaaggaaccaaagaatatgaaattcatcatgaatatttagcaaactccaaattgcctttcaaaacttaa

SEQ ID NO: 195 - DNA, 707 bp, Homo sapiens
  SIMILAR (465)..(704): 871254mologous to Homo sapiens Human PRO1012 protein sequence,accession number AAY41758,Smith-Waterman Score=362.
atgaggagcgtggaccgtccggattcccggtcgacccacgcgtccgagaccggcgcgtgaggaacctaccggtaccggccgcgcgctgtgtattcgccggtgtggctgcacctcaccaatcccgtgcgccgcggctgggccgtcggagagtgcgtgtgcttctctcctgcacgcggtgcttgggctcggccaggcggggtccgccgccagggtttgaggatgggggagtagctacagggaagcgaccccgcgatggcaaggtatatttttgtggaatgaaaaggaagtattagaaatgagctgaagaccattcacagattaatattgttggggacagatttgtgatgcttgattcaccccttgaagtaatgtagaacggaattctcaaatatgcatattacatcaactggaaccagcagtgaatcttaatgttcacttaaatcagaacttgcataagaaagagaatgggagtctggttaaataaagatgactatatcagagacttgaaaatgatcattctctgttgtctgatagtgtatatggccatattagtgggcacagatcatgattattacagtttactcggagtgtccaacactgcaagcagtagagatataagacaagctttcaagagattggcatcgaagttacatcctgataaatacccgaataacccatatgcacatggcgattttttaaaaataaag

SEQ ID NO: 196 - DNA, 464 bp, Homo sapiens
  SIMILAR (136)..(462): 891254mologous to Homo sapiens KIAA1696 protein,accession number AB051483,Smith-Waterman Score=491.
gaactggaaaatccggacattcctggggcgacgatttcgtagtctaccatatttgtgagagtgagaagaggagttcgtttctttaaacagaggctgaagactctatagaatcagcgcagaaagtggagaaggtccaggacgcagttgcagactctacaggaggctcttaaagcggaaattcagggtcaccagaaactggctgctcaaatgaagcaagatccacagaatgctgacttatagaaacagctttatgaactccaagccaaaatcacagctttgagtgagaaacagaaaagagtagttgaacagctacggaagaacctgatagtaaagcaagaacaaccggacaagttccaaatacagccattgccacaatctgataacaaactacgaacagcacagcagcaacctctacagcaactacaacaacagcagtagtaccaccaccaccactcccagcagtc

SEQ ID NO: 197 - DNA, 670 bp, Homo sapiens
  SIMILAR (343)..(669): 1001254mologous to Homo sapiens KIAA1696 protein,accession number AB051483,Smith-Waterman Score=549.
tttttgttttttaaagatggggtcttgttctgtcacccaggctggagtgcagaactagaaattcagaggccgaaggacttgcctgagctcacacagcgagtggcagccggaagacgaactctggctgctgccttactccactttatcccacagcatggcacaaaaccaaatccaatcttaaggccatcacatgaaaccaaatgtaaaaatgttttgcaatatatacaatcattaagtttgaacatgtttattatctttacagctgcagtgagaagaggagtttgttactttaaacagaggctgaagaaactatagaattagcagagaaagtggagaaggtagaggatggagttgcagactctacaggaggctcttaaagtggaaattcaggttcaccagaaactggttgctcaaatgaagcaggatccacagaatgctgacttaaagaaacagcttcatgaactccaagccaaaatcacagctttgagtgagaaacagaaaagagtagttgaacagctacggaagaacctgatagtaaagcaagaacaaccggacaagttccaaatacagccattgccacaatctgaaaacaaactacaaacagcacagcagcaaccactacagcaactacaacaacagcagcagtaccaccaccaccacgcccagcagt

SEQ ID NO: 198 - DNA, 445 bp, Homo sapiens
  misc_feature (1)...(445): n = a,t,c or g
tccaggaattcttttcttataattatcaatttgacctggaacttgcatgtcctgattcttagatcttgcatgattatacacgtgttatctaattgatgaatttcaaatatgatctatttcaacagttaaatggctgaacagtcattaatttcaggtggtcctaaacccaaatcagtaaattctttgaggtggataaacctacnnnnnnnnnnnnnnnnnnnnnnnnnnnnnnnnnnnnnnnnnnaaagtnnnnnnnnnnnnnnnnnnnnnnnnnnnnnnnnnnnnnnnnnnnnnnnnnnnnnnnnnnnnnnnnnnnnnnnnnnnnnnnnnnnnnnnnnnnnnnnnnnnnnnnnnnnnnnnnnnnnnnnnnnntcctgggtcgataagtgactttatccttctaagctataaaatgaaggagctacactagatagtctctaagcan

SEQ ID NO: 199 - DNA, 396 bp, Homo sapiens
  misc_feature (1)...(396): n = a,t,c or g
ggcacgagcggcacgagcggcacgagaactggaagaattaataaagatcnnnnnnnnnnnnnnnnnnnnnngggggcaaattttggctttaatgcccaagggggggggccaggggggcattttaacttacccaaaccctccccttccggggtaaaacaattttccgggcctaacccccccgagaaccgggattaacgggctgggcccccccggccgggtaaattttgggatttttaagaaaaaagggggttttcccccgggggcaaggggggtttaaaaccccggccctcgggggannnnnnnnnntgggtttccaaaggggcggggataaagccccccaccccgggcccctttaaacctttgaaaaggttccccgacctcccaattttccccagg

SEQ ID NO: 200 - DNA, 531 bp, Homo sapiens
  misc_feature (1)...(531): n = a,t,c or g
aatatatccggcctatcctcttataattattaatttgacctggaacttccatgtcctgattcttagatcttgcatgattatgcacgtgttatctaattgatgaatttcaaatatgatctatttcaacagttaaatggctgaacagtcattaatttcaggtggtcctaaacccaaatcagtaaattctttgaggtggataaacctacatttcatttgtagtttaaaaagaaaaagtgaaaaaagtatttaaagtcctgggtcatggaaggcggagcttgcagtgagccaagtttacaccactgcactccagcctgggtaacagagcgagactctgtctcaaaaaaaataaaaaataaaatgggactgacaaattatttaataaagtctgataacactattagccaaggtggaaggggtggatactctcatgcacgctagtgagagtgctagttgatttgttgatttgacccatgcagagagtatggtgaaggaaagaagtccttagtacatgnggctggtgataggcccgat

SEQ ID NO: 201 - DNA, 945 bp, Homo sapiens
ctcctttgtcaatggtttatttattctgtgggaggtcgctgagattttatctgtggatttcaagaatgtcaccaggagatgccaagggtgtgtctttttctttaaagtaaccctgcctggagctctaccaacactttcactgtgcagactcatgccctcttctgatcagggaaaatttccactattatttattcatcatattaatcatctccagacctggtcctttcttcttccagagcctataacattcacaggtgaatgaagaagcaaccaccaagcctatcttttctttcatgacttccatttgggtttctgattttctgggaggcctttgcatcctggaaacaggaaatccatcctcttttccacttcagctttttaattttctaaagctgaaaatcctcgttctagaacctcttttcttgggaagtatctggatttccctcggttttggaaactgaacacttgcccaggatgtgccactggactttacttctccctccagcagggggcccctcgaggcccctccatgtcccttgaagctaggtccagctgtggggtccccttcctgtgggtgcatggtcacgcctctggccccagacttgccaaggtgacagcaacagcagcaaggtgtggtagggacagagcagaaagacccttacgcctcttgcctttgttgggaggccccactcccacaaggccccactcaagtctcccaggagaggcactggttcccactttctcttttgacttgtttcagcgcccttcggcgaggggcttggtctccttcacccagaagaacccatcctcaggaacagtgtgggctgtggggccggcctccattggaggagcctcctcaccccctttctgagcgcacgaggaggcctccagtcacaccagcagaagcggaaccctgtctcccaactccaaagcattctgtctact

SEQ ID NO: 202 - DNA, 564 bp, Homo sapiens
  SIMILAR (355)..(462): 801254mologous to Mus musculus putative,accession number AK004438,Smith-Waterman Score=153.
agggcattaagggaaatgaggctggctttttacttgtagtactctacaacagtaggaaaacattatgtctagtctttctggaggggctaatgggaagaattgcaagaactgcttagagagtgagagatgggatgaggcaggacaagagggtgttccagcatacatcattttctccttaaagaaccaacttctctgtcttctttccatttggagttataggtattgttctaaggcctccagattattcagtccttatgccttgtagctttttggaaaaagagggtctttggaggccaagcaggctggctggcggaatcatggctcatgctgggctggctagtttttcccttaattcttgcttctcaaatgtatgtccctgggaagctgcatgatgtggaacacgtgctcatcgatgtgggaactgggtactatgtagagaaggtgagtgagagcatgttggatgcccctctaaacagggaagggaaattcaggggaagctctatagcgcagcatggccagagggagtctccttttagccccttattcacctctgatcttgtagaa

SEQ ID NO: 203 - DNA, 602 bp, Homo sapiens
  SIMILAR (174)..(485): 501254mologous to Homo sapiens c-myc binding protein,accession number D89667,Smith-Waterman Score=199.
  misc_feature (1)...(602): n = a,t,c or g
gccttcccaacatggcgcagtctattaacatcacggagctgaatctgccgcagctagagaatgctcaagaaccagctggaccaggaagtggagttcttgtccacgtccattgctcagctcaaagtggtacagaccaagtatgtggaagccaaggactgtctgaacgtgctgaacaagagcaacgaggggaaagaattactcgtccctactgacggagttctatgtatgtcccctgggaagctgcattgatgtggaacacgtgctcatcgattgtcggaactgggtactatgtaaaaaagacagctgtaggatgccaaggacttcttcaagaggaagattagatttttttaaccaagcagatggagaaaatccaaccagctcttcaggagaagcacgccatgaaacaggccgtcatggtaaatgatgagtccagaagattcagcagctcacagcccctgggggaggctcaggctactgctaaggcctgagagtttttgcagaaatggggcagagggacaccctttgggcgtgggcttcctggtgatgggaagggtcttgtgttttaatgcccaataaaaatgtgcccanctgggcaaaaaaaa

SEQ ID NO: 204 - DNA, 423 bp, Homo sapiens
cgatggctgggcttgagtaaccttaccctccgcttatgcaagtgatggagctactgacgtgatggtaatttagcctgagaggaaggaaaagccctttgatgtaccccgggctttgatcccgtatcagctgttcggcctcccctggtggcctgtttttccctatcatgggggcttccccacctctaaaacctcaggcaacgaaagcagggaagtagctcctattcactcaggagagcccacggtcaattctccaggaagtttgtgggccagtttttattattattattttttagacacagtctcgctgtggcccagcctacaagtttcagtggcacaatctcggctcactgcagcctccacttcctgggttccagcgattctcctgcctcagcctcccaggcagccgggactacagcgcccgcc

SEQ ID NO: 205 - DNA, 918 bp, Homo sapiens
  SIMILAR (638)..(796): 771254mologous to Mus musculus septin,accession number D49382,Smith-Waterman Score=209.
tttgttcttgttcagctttgaacacaaggaaaacacttttatggtgtaggtgtgctgcaccgaggtccttgtatttgtattgtagactttctttgacacttatccatggatccatcctctattgagtttgtctgtaaaatgtaataagtagtttctgcctatattacatatttgatggaaggattaagtgagaatgttttacatcaaaaatgctgtgtaactagaagattactaggatagatgtactaattcatctactgtcagaaagttccagcacaggacaccaacatccacaaatgactgttgaatgaaataggcacacatagtgagagcctaagacttgggctgctgcaagaatatgtagccctttcagaatatttttgaattcagtttttaaatgaattcgtaaattgctttctttttcccaggaacagaaattataatttttaacatttgtgtttttaaccttccccagtagcacaataatcttagctttaaccttcccctttctgacttctctgggatctttttttcttaatccccatggtatctttggagaacctacctctgtagagaggcagtagactctgaagtcacctgtcgtaagaacgtgagctttcctcttcacatgctgcttatattccctattaagtttgtttcttttctagaaaaaattgaaagaactgtccagattgaggcttcaactgttgaaattgaagagcgaggggtcaagctacgcctgacagtggtagatacccctggctatggtgacgctatcaactgcagagattggtatgctcccccatgcccagggatctgcatttgtttacttaatatacttcataaatttatagatagtgttaatgagtgattattaagtttgggattgctgtatataataaaacacctagacaattt

SEQ ID NO: 206 - DNA, 3439 bp, Homo sapiens
  SIMILAR (1338)..(1466): 931254mologous to Homo sapiens Human Diff6,H5,CDC10 homologue,accession number D28540,Smith-Waterman Score=225.
  misc_feature (1)...(3439): n = a,t,c or g
atctcggctcactgcaacttctgcctcccacgttcaagcgattcccctggctcagcctccggagtagctgggactgcagacacgtgccaccacgctggctaattttttggattttagtaaattcggggtttcaccgtgttggccaggatggccttgatctgttgacctcgtgatccacccgctttggccccccgaagtgttgggattacagcaacagccaactcagtttataaatccagaaacacctggctatgttggatttgcaaacctccccaatcaagttcaccgaaaatcagtgaaaaaaggttttgagttcacactgatggtggtcggtgaatcaggtctaggaaaatcgagctgtcataaaacagcctattcctaactgatctgtacccagaaagagtcatacctggagcagcagtttgattcttttctagaaaaaattgaaaagaacttgtccagattgaggcttcaacctgttgaaattttaagagcgagggggtcaagcttacggcttgncagtggttaggatacccctgggctatgggtgaccgctattcaactgacagagattgtttttaaggacaatttatctcctattatttgatgaggcaattttgaggagggtacctggcatgacgagagcggctttgaacaggcggcacatcattgataatagggtgcattgttgctttcactttatttcacccttttggacatggacttcagcccttagatgtggcgtttatgaaggccatacacaacaaggtgaatattgtgcctgtcattgcaaaagctgacactctcaccctgaaggaacgggagcggctgaagaaaaggattctggatgaaattgaagaacataacatcaaaatctatcacttacctgatgcagaatcagatgaagatgaagattttaaagagcagactagacttctcaaggctagcatcccattctctgtggttggatccaatcagttgattgaagccaaaggaaagaaggtcagaggccgcctctacccctggggtgttgtggaagtggagaacccagagcacaatgactttctgaagctgagaaccatgctcatcacccacatgcaggatctccaggaggtgacccaggaccttcattatgaaaacttccgttctgagagactcaagagaggcggcaggaaagtggagaatgaggacatgaataaagaccagatcttgctggaaaaagaagctgagctccgccgcatgcaagagatgattgcaaggatgcaggcgcagatgcagatgcagatgcagggcggggatggcgatggcggggctctcgggcaccacgtgtaaggtgatgtgcacatatcaagaagtcagagaaaacactttcctggataaaaaagaaaacattccagatgcatgatccagctgtgtgttttcaatccttgggagggtgccatccacattttaacagtacctgtgcctgagaatttaatttttaaaagactttgatgtgtttttgtatgaagtacttttaacgtatgtatttcattgctgtgtcacactctgtgttttgtgaggtgaatgtcttccttttctttctccctaaccaactaatgttagaattgatttccaagaatcggcatgtatacttaatactgaatttctttgatttaactgacttaacaactgactaaccattgatgagcactggtgatttttatctagaacattcagatttaccataatgttccttagtggtagaggtgtgtgcctagtgatgttaagaaagatacactgacttggtgcaaggccatctgcttaccacatcacaccacttggagatctttgcttccttgcttttatgtttgtacacaacacctaaaaccagttttgctgctataattctatactgttgattcgtctgcgattttatctgttaaccaaataaaacataatagaatttcctaatgagatatatctttatacttaaacagcttttttagaggtgagttttaaagaagtctcttaattctgatgctaggttgtttttaaaaccactatgcaaaggaacaactcaccacaagccaccttttgtagttgttctccactaatactggttatcctgtgctacagagaaaatgcaaagcagtcataagctccagttttccgtattgcaaataagactcttacctacaaaatgagattccagtgaactaattttggtttttactcaaccaaattaaaaatttttttaaggaaaattagcagttggtctattcagaatcaaacctttttatattttatactgcactttagtgtattttctgtcactgtaggtatagaagatctgcctcccctgtggaaattggggtctgttggtgggcttgcccctgaagcctggcttgggttgaaaagtgttcccgccctaaggccttggtgccctgaacctctgatgcctaccgggttctcctgatttgagtttcctttaaatactccctttttgagtaattttctgatgggaggaaagtagcagtcatcatctttttgtgtgcaggctgtctcatttatttttagccattgtcgtttcattcattttgtgtaatataaaccgtgtgtcatgtcaaagtgaaagacatttcaaatctgtagcataggctagtgggcaggtccgcacagtcgaagccacacctggtctgttttctgtgcactgtagccttagtgtcacctttcttcttgtgtctccttatggtacactccagcggttgccttttttatcatttctactgaagttgggaaattcaaccccagaaattgacagatgaaaggagacaatggttgtgtgtagggagatggagaaaatgcttaatctgaggatgagacagggctttttcatttttgtgggggctagaaaaaacataaaatgaggcagttaaaataataatagttaatgaaggtgtgctacagaaaataatctggtgttcttgctaactttgcccttcactgttgcttaattgtgaacagccaaaagctatatgttatggcttattgtgtgaaggtaactaagaagtggtgttccatgacttcagagtcacatccatgcggagtccattatttgagtttgacatttaataactttgctggaaaatctgtaaaaaagaaaaacaagtttgctagtgactaagccccgcatatgtgagtgaaagtacttcaggtacgctgcctcctggtaacagctatgcagggagggaggacccacactgctacacttctgatcccctttggttttactacccaaatctaaatagatacttttgataatagataactgctcttttactaagacatagtctctacctatagaaatgtattttgaaaactcttattttacacagcaattttgtatccatttaaactaaccttttatcaataaagcactattgtttagatattaaaa

SEQ ID NO: 207 - DNA, 645 bp, Homo sapiens
  SIMILAR (438)..(572): 551254mologous to Homo sapiens PRO0117,accession number AF090895,Smith-Waterman Score=109.
aatttcttcatcctagaacattagctctttaatctgttaaaatagctatatctccatcaattgtgagatgtaatgaacatgaggtatgttttaacttactggtactaggttaaactataggaaattgctgttgttttgtagttggaaccaatcaaatattagcaattttacacagctcaccaaagtatcaaagtatcaaagagtgaataatttacttaaaaaatataaactagcacagatttattttactgccataataaaatgactaatacagctgacttccaataatctttctcaagtgggaattatttttcttgataaaatactttgttgtagactaaaaataggccccaaagatttccatgccctaatccctagtattaatgcctgtgtatgttaaatgacctagcaaaagagactttgcagatggaattaatgttttttggttttttggggttttttttgagacggagtctcactctgtcacccaggcgagagtacagaggtgcaaacacagctcactgcaccctcgagttcccagtcccaggccatcctcccacgtcagctgcccagtagctggtaccataggcacacgacactatgtccagctaattctaaaaaactttttgtagagaccctcgtgcc

SEQ ID NO: 208 - DNA, 375 bp, Homo sapiens
  SIMILAR (120)..(374): 971254mologous to Mus musculus neuronal differentiaion related protein,accession number AB049460,Smith-Waterman Score=435.
  misc_feature (1)...(375): n = a,t,c or g
tggagccgaagctcggctcgtgaacacacactgacagctatagggcaggcggcgggaccgtccccgcttcccctcnnnnnnnnnntgtcccgtcggcggccctgaagtgacccataaacatgtcttgtgagaggaaaggcctctcggagctgcgatcggagctctacttcctcatcgcccggttcctggaagatggaccctgtcagcaggcggctcaggtgctgatccgcgaggtggccgagaaggagctgctgccccggcgcaccgactggaccgggaaggagcatcccaggacctaccagaatctggtgaagtattacagacacttagcacctgatcacttgctgcaaatatgtcatcgactaagacctcttn

SEQ ID NO: 209 - DNA, 574 bp, Homo sapiens
tttttttttttaaaggctataccaaagggtttatttgcaaagctgtaaaaaactacacagtgtgcagagcagagtgggaagaggtcctgggacccggttaacacaggcagcccctgcactcatgtttgcaggggaagggaggaggagagcttcttttccagccatggttcagtgtcctggagaccaagactgctgggtctggatgcctcctttgccttctactagcaaacactttatttccttgctcgtattttctaatctacctagaatctcaaacccccaaaagcatggaggacttctgctatggtgtgaatgttgctgtctcccccaatatacaggttgaatcctaatcccgacactacagaattaagagatagggccttaagaggtgagatcatgaggactccaccttcatgaatgggattagtgccttaaagaaaaggctcaaggaagcccttttgcccttcccttctgccatgtgaggatgcagcaaaaaggcatcatctttgaagcagatggcaagccctcaccagacactgaatctgctggcaccttgatattggacttcccagcc

SEQ ID NO: 210 - DNA, 777 bp, Homo sapiens
  SIMILAR (677)..(594): 821254mologous to Homo sapiens PRO0898,accession number AF130051,Smith-Waterman Score=130.
ggcacgagaacgcagatctgagactattatattatcctgtgaaggagggtctgtctgtctgcacagttggtcctaggctggcttctgaggacttgaatttcaagagggttccctaactggtaatcatggtttactgtatctagactatggaaataatgtggcttatcctgctattctttttgtgagtctggaaatttcacacatgctaggcagagtacacatatgtgacccagccgagataaaacctgtgtttcttgggaagtcacataggttgttgtattttcattaagggggaaagaaggtagtctgtgtgatcctcatggaaggcacagcacataaggaagccggtacatggatttttccagactctgtcagtgtcttttgccattgagatctttctactatatatccatactatgttacaggaataaatcttagccattacaaccctaagctgatcccatgagtccttctagcaaatctccaaacatggaggcagtcttgtggatccctgacacaaatatagtgttgtgatctcttaaggtttatccttcctcttaaactataaagagctggctgggcacagtggctcacgcttgtaatgtcagcactttgggaggccgaggcgggtggatcacgaggtcaaaagattgagaccatcctagccaacatggcgaacgccgtctctgctggaactacaaagattagcagggcgtggtggcacacatctgtggtcccagctactcgggaggctgaggcaggagagtcgcttgaacc

SEQ ID NO: 211 - DNA, 475 bp, Homo sapiens
  SIMILAR (12)..(203): 701254mologous to Mus musculus putative,accession number AK008702,Smith-Waterman Score=249.
gcaccactgagaaggacagcagagagatgaaggtcttagaatcattgattggaatgatccagaaattttcttatgatgactctacttacgataaactccatgaagacttagacaagaacagaggaaaatttaaacagttttgttcgttactcaatgttcagccagactttaaaattagtgcagaaggttccggactttcattttgaggaggatggatgaacagagaccgaacgtcgaggaacagatgtgtgtgtgacgtgtttagaaatgcggtgaagggccagacggtgctgggaaggcagttgttcattgggagggtgagggttccggttcggccgggggagggcttccttccctggggttttctgcctgtgtcaccttggtgcccgtcttggggcctctccacacatgccctttggtgggccgaagccgtccctggcagagccctcgtgcattgacttgacagcctcttcgg

SEQ ID NO: 212 - DNA, 767 bp, Homo sapiens
  SIMILAR (79)..(540): 481254mologous to Mus musculus putative,accession number AK008702,Smith-Waterman Score=316.
cggacgcgggggcggacgcgcgggctcctcccaagcggagcatttgagcctgaagctgccgggtctgctacggcaccgcggggctgcaaaaacccgggggccaagggcgggctgcttgccgctatggctggcagacaggacatattccatgccatcgtgaaggcggatgaaaggtttcatggggaagggtatcgggaaggctatgaaaaaggcagcattttgggtgtgaaggagggaaggcagcatggcacgctgcatggagccaaaatcggcactgagatcggccgctaccaacgttttgcttttgcatggaaatgtctactgcacagttgcaccactgagaaggacagcctaaacatgaaggtcttaacatgcttggattggaaggatccagatattcccttatgatgaccctacttacgataaactccatgaagacttagacaagatcagaggaaaatttaaacaggtgcgtgcactgtgtgtttcctcctgctaggagcacctgattgcgcctttcccaggcggggcagcgcactcccggggccgctgcggcaatggcctggggctgcgtgcgccgcggaactgtccgtagaggcgcctcatccttgagtcgcagtgcaggaaaactgaagacagtccagagaaaaggagttagaactcatttatgggctggccacatagacaggaaaagctatagctagagatagagttatcttctcataattcagcaaaaatgcccaagattaaaaataaaaaaaaaaaaa

SEQ ID NO: 213 - DNA, 788 bp, Homo sapiens
tagaatcaaggtgggcctcagaaatagggctgggtctccataaggaggtaggccacgttcagtccacccctagcatagatggaactggggtctcgggcaaccaggagttacaggaattttgctaaagattcccaccttcccttgagtggggacacaatccctctggttggaaccttgttcccccctaaaatgaaaaaatgtaatgccagtaacatgtaaggggcccctactgtattctttttctgggggaaagctcttggtgttcacaatggctcaggcttacagtacctcccagcccatgtgccccatttcccacaagtctttggggaaggccatgagctgagctgagagggttctctggggcctgggatgacttaagaaccaaatggcagataatgggatagggggcagatgcagaggaccaacgggaagttttaacacaaatccccttccccagatgatatggtttgcctttctgtaggtgggtggcccaggccaatttttggcaatatccttaacccacctgataggagaagcgccctcccctgcctgccttgcccattctacccaacaaggactccctggtgaggcccttcacttccatgtcacgtttgagctgcagctacagtctccttgccctcatggtggtcttcggcaggtgccacagggccccctccagggtcctcctggcctactgtcccttcccggacctcctccccactgcctgggccctcacccagctccaggatggtgggtaggtggccctgctttggggagcgcttgcgccc

SEQ ID NO: 214 - DNA, 676 bp, Homo sapiens
taaaaatatgaaatctctcaatgtttaaatgttggcaacaaattcaaatgtctaaaaacactttggaaaccaaagtaaatgtgtctgtaggtgcaatattgcctgctgggcaccaggctgggaactttggagtaaacagggcaaggtaatgtctcagaatatggtcacatcagagcacattggttctaggccccatcacaattcaggaggcccccagggtcaccttgagttcatggcaagttgtatatgccaagcaccccatcccatcaggcaggtcccacctggcacccaagggcaaggggcctgccctagcagaggagttcttgggagagcagcagggatggggcttcagcttgggcttgaggcatggactctgacgcagagctgacgtgttgaccaggacctgccatcaatctcaggtagaccaggctagttctcagctcatggctgctccacaccctttggatgtcattcttcctttatgtttagggggtagtcctcaagcaaatgtctgcagatgagctactccctggggctcctgccaggacccagcaggcttgatctagcctagtctctctggattctcccatttctttttgtttttttctcatttgagacaaggtctcgctctgttgtccaggctggagtgcagtggtgtaatcacagcttactacgg

SEQ ID NO: 215 - DNA, 394 bp, Homo sapiens
  SIMILAR (167)..(316): 921254mologous to Homo sapiens pyruvate dehydrogenase E1- alpha subunit precursor,accession number L48690,Smith-Waterman Score=238.
  misc_feature (1)...(394): n = a,t,c or g
aaaggaggatcgatgcacatgtatgccaagaacttctacgggggcaatggcatcgtgggagcgcagggccagatattcgaagcttacaacatggcagctttgtggaaattaccttgtattttcatctgtgagaataatcgctatggaatgggaacgtctgttgagagagcggcancaagcacttgattactacaagagaggcgatttcattcctgggctgagagtggatggaatggatatcctgtgcgtccgagaggcaacaaggtttgctgctgcctattgtagatctgggaaggggcccatcctgatggagcttgcagacttaccgttaccacggacacagtatgagtgaccctggagtcagttaccgtacacgagaagaaattcaggaagt

SEQ ID NO: 216 - DNA, 722 bp, Homo sapiens
tgaccgagagcatcggcacgacttcccgtgtcgagccacgcgcacgcgtcgatcacaagagacttacgggggcacatacctgtgaaggagctcacctttgctctacatcagcgcttggcaaaggccctgtggtaaaggacctccccacaacctattgcaaaacaatacagacccattctcttggatgtccggactggcagtgtcaaattcggataatagcgtctgagtcctaactcagtttctatgcttctcttgttaccgagtaatccccagtctgtggccagcactctgtgaagccctgttctagaggctgattcttaggtgctggttcactctggctatccagtgggcctgatagatttcatattgatcttttttccagtgtgttccttactgctagcatggccccaaagaaacaagtagtagatgggttgtcaccttccttagttgcaagagtatgatgcctgctacttctcctccaccacccaccccgctttccctcaccacccaaagctcggttttagaagaggaggctttctgtgctttatggaaagctttctgtgccaggcagagcaggcagctgttaggagatgatgaagccgggggagaaagaagccaaatggaaacccctttttcgtaactacttccagggccagatatttcgaagctttacaacatggcagctttgtggaaattaccttgtattttcatctgtgagaatg

SEQ ID NO: 217 - DNA, 1503 bp, Homo sapiens
  SIMILAR (53)..(646): 1001254mologous to Homo sapiens pyruvate dehydrogenase E1- alpha precursor,accession number J03503,Smith-Waterman Score=1059.
tctgtcacgccgcggtgcgactgaggcgtggcgtctgctggggcacctgaaggagacttgggggcacccgcgtcgtgcctcctgggttgtgaggagtcgccgctgccgccactgcctgtgcttcatgaggaagatgctcgccgccgtctcccgcgtgctgtctggcgcttctcagaagccggcaagcagagtgctggtagcatcccgtaattttgcaaatgatgctacatttgaaattaagaaatgtgaccttcaccggctggaagaaggccctcctgtcacaacagtgctcaccagggaggatgggctcaaatactacaggatgatgcagactgtacgccgaatggagttgaaagcagatcagctgtataaacagaaaattattcgtggtttctgtcacttgtgtgatggtcaggaagcttgctgtgtgggcctggaggccggcatcaaccccacagaccatctcatcacagcctaccgggctcacggctttactttcacccggggcctttccgtccgagaaattctcgcagagcttacaggacgaaaaggaggttgtgctaaagggaaaggaggatcgatgcacatgtatgccaagaacttctacgggggcaatggcatcgtgggagcgcaggtgcccctgggctgctgggattgctctagcctgtaagtataatggaaaagatgaggtctgcctgactttatatggcgatggtgctgctaaccagggccagatattcgaagcttacaacatggcagctttgtggaaattaccttgtattttcatctgtgagaataatcgctatggaatgggaacgtctgttgagagagcggcagccagcactgattactacaagagaggcgatttcattcctggggctgagagtggatggaatggatatcctgtgcgtccgagaggcgacctatgattggtcgtgcctattgtagatctgggaaggggcccatcctgatggagctgcagacttaccgttaccacggacacagtatgagtgaccctggagtcagttaccgcacacgagaagaaattcaggaagtaagaaagtaagagtgaccctattatgcttctcaaggacaggatggtgaacagcaatcttgccagtgtggaagaactaaagggaatttgatgtggaagtgaggaaggagattgaggatgctgcccagtttgccacggccgatcctgagccacctttggaagagctgggctaccacatctactccagcgacccaccttttgaagttcgtggtgccaatcagtggatcaagtttaagtcagtcagttaaggggaggagaaggagaggttataccttcagggggctaccagacagtgttctcaacttggttaaggaggaagaaaacccagtcaatgaaattcaatgaaattcttggaaacttccattaagtgtgtagattgagcaggtagcaattgcatgcagtttgtacattactgcattaaaagatgaattaatgagtgcttaaagatt

SEQ ID NO: 218 - DNA, 511 bp, Homo sapiens
  SIMILAR (2)..(505): 851254mologous to Mus musculus putative,accession number AK003278,Smith-Waterman Score=732.
cgaactaagcacacccctctgctgggactccaaactaatcggctatggttctgcagctcagcatctcccctacctcaccagcctgctgcccatgaagctcctgcagtactgcctggccgatgcctgggtagctgagatcggcctggccttcaacatcctggagatggtggtctttgcctttgccactatcacgcctctcatgttcacaggatatgggttgcttttcctgtcattagtcatcacacctgtcatccgggctaaactctccaagctggtgagagagacagagcagggtgctctcttttctgctgaggcctgtgtgaatagcctgaccatgctgacggcctccggcatcttcaactcactctacccagccactctgaactttatgaagggggtccccttcctcctgggagctggccttatgctcatcccggctgttctgattgagatgctggaacaggctgatcctcatctcgagttccagcaggttccccagagcccctgatct

SEQ ID NO: 219 - DNA, 1458 bp, Homo sapiens
  SIMILAR (1)..(1083): 861254mologous to Mus musculus putative,accession number AK003278,Smith-Waterman Score=1603.
  misc_feature (1)...(1458): n = a,t,c or g
atggaggggagcgcgagccccccggaaaagccccgcgcccgccctgcggctgccgtgctgtgccggggcccggtagagccgctggtcttcctggccaactttgccttggtcctgcagggcccgctcaccacgcagtatctgtggcaccgcttcagcgccgacctcggctacaatggcacccgccaaagggggggctgcagcaaccgcagcgcggaccccaccatgcaggaagtggagacccttacctcccactggaccctctacatgaacgtgggcggcttcctggtggggctcttctcgtccaccctgctgggagcttggagcgacagtgtgggccgccgcccgctgctagtgctggcctcgctgggcctgctgctccaggccctagtgtccgtttttgtggtgcagctgcagctccacgtcggctacttcgtgctgggtcgcatcctttgtgccctcctcggcgacttcggtggccttctggctgctagctttgcgtccgtggcagatgtcagctccagtcgcagccgcaccttccggatggccctgctggaagccagcatcggggtggctgggatgctggcaagcctcctcgggggccactggctccgggcccagggttatgccaaccccttctggctggccttggccttgctgatagccatgactctctatgcagctttctgctttggtgagaccttaaaggagccaaagtccacccggctcttcacgttccgtcaccaccgatccattgtccagctctatgtggctcccgccccagagaagtccaggaaacatttagccctctactcactggccatcttcgtggtgatcactgtgcactttggggcccaggacatcttaaccctttatgaactaagcacacccctctgctgggactccaaactaatcggctatggttctgcagctcagcatctcccctacctcaccagcntgctggccctgaagctcctgcagtactgcctggccgatgcctgggtagctgagatcggcctggccttcaacatcctggggatggtggtctttgcctttgccactatcacgcctctcatgttcacaggtagtatttacaggttccagggctatgaatctgatgccattgggcaccattattcagcctcctatgcctcagaaccatcctgtgatgaaggccttattatcttcctcatacagggagtcaggatcagagagggatatgggttgcttttcctgtcattagtcatcacacctgtcatccgggctaaactctccaagctggtgagagagacagagcagggtgctctcttttctgctgtggcctgtgtgaatagcctggccatgctgacggcctccggcatcttcaactcactctacccagccactctgaactttatgaaggggttccccttcctcctgggagctggcctcctgctcatcccggctgttctgattgggtaa

SEQ ID NO: 220 - DNA, 839 bp, Homo sapiens
accaattgactctcctcctctttgtgccttctcaattctgtcggtgccaaatctccgtctgctttcctcttataaagatatgtgtgacggcatttagggcccaacctaatccaggataactctgctctctcaggaggcttaactgcacacctgcatagactcattttccaaataaggtagtatttacaggttccagggctatgaatctgatgccattgggcaccattattcagcctcctatgcctcagaaccatcctgtgatgaaggccttattatcttcctcatacagggagtcaggatcagagagggtaagtaccccaggccacacagataatatgtaatggcatcaggttttgaactcagggctgactccaaagcccatgcttgttttctgtgccctgccatatccttactaagtgccaagtgggtgggtgatgcctgctgtgaccacaagaggttcagacaagaaagcaatcaatgggaattagcattcattcatgagagctagcaggtggccaagcccagacaagggcagtctccattcctccttgactactgtcttcccaccctcaccatcaaggaagttcttcctgggtctaacctaagccccacatggggtatggataggagctctgctgcctttcccttggacgcccctctccccagccccattttcctgatgagtgtttgtttctccacaggatatgggttgcttttcctgtcattagtcatcacacctgtcatccgggctaaactctccaagctggtgagagagacagagcagggtgagtgtcagaacccacctgtgtgtggttcctcatgtccaggaattcgccgct

SEQ ID NO: 221 - DNA, 966 bp, Homo sapiens
  SIMILAR (357)..(464): 941254mologous to Homo sapiens bA291L22.2 (similar to CDC10 (cell division cycle 10, S. cerevisiae, homolog)),accession number AL133216,Smith-Waterman Score=175.
gcagagccaatcagaactcgcggtgggggctgctggttcttccaggagcgcgcatgagcggacgctgcctactggtggccgggcgggatgtaaccggctgctgagctggcagttctgtgtcgttaggtttttgcccggccgccgccgcacataagccacgaggaggagctttacgacttcccgtttttcggcgccgggcgcagcaagggccagactatgcgctagcaggcgttgcgcgccaaccggccggcacctgtcgcagaaggtgcaaccgatcgcactgtcgcgcagaagatcctcaatggccaacgccagctgcagccccggccgcccactcgcctcatatgagcctgggcgaatctggactgggaaagttgatattaatcaactcattattcctcacagatttgtattctccagagtatccaggtccttctcagagaattaaaaagcctgtacaggtctacatattggtatttttaattgatgataagctggaataatattaatacacacaaagcacgtgttgtaactttcattatgcttccctagagctggcagcctgctatcaattacattgatagtaaatttgaggactacctaaatgcagaatcgcgagtgaacagatgtcagatgcctggtaacagggtgcaggggtgtttatacttcattgctccttcaggacatggaccattacataactgaagactcccaccttcaggcaggattgggtagtacgtgtttgtaactacctggcgattgccttttgttgaggtggcgagacaagaaacatggattattgcgtggagttccattagtaggaataagactcattctacattcttgttgttcttagtgttttttgttttttcatgagaaggaattgtatcagcacaaggcaatattctaacatgacaatgacagcagacagaacctcaataaactctgacttggtactgcaaaaaa

SEQ ID NO: 222 - DNA, 385 bp, Homo sapiens
  SIMILAR (151)..(282): 771254mologous to Homo sapiens latexin,accession number AF282626,Smith-Waterman Score=180.
ggcacgagactggaagaagacattactgaacgagcttgcgacttttccgtcatcacaaccggacccagcagggatcaagacgggcggcgctctgctactgggcccgttaagccagagtagcccaagccctgaagacactgctcatccggaatggaaatcccgccgaccaactacccagcctccagggcggacttggtggcacagaactacatcaactaccagcatgggaccccgcacagggtgtttgaggtgcataatgcctaccgtgtcataatgcaggatactgtcaggatgaggacatcttgtatcaccttcatcacgcttctttctacattcattcgctacctctctattcgaatgatacattcgtcacttggcacttctg

SEQ ID NO: 223 - DNA, 438 bp, Homo sapiens
  SIMILAR (30)..(65): 911254mologous to Homo sapiens eosinophil major basic protein precursor,accession number M34462,Smith-Waterman Score=51.
  misc_feature (1)...(438): n = a,t,c or g
ggaaggtctctgggtggganaaagccaagatgnaactccccctacttctggctcttctatttgggtgctaagacgctgcctgaggatgnggagacaccagagcaggagatggaggagaccccttgcagggagctggaggaagaggaggagtggggctctggaagtgaagatgcctccaagaaagatggggctgttgagtctatctcagtgccagatatggtggacaaaaaccttacgtgtcctgaggaagaggacacagtaaaagtggtnggcatccctgggtgccagacctgccgctacctcctggtgagaagtcttcagacgtttagtcaagctttgtttacttgccggagttgcttacaggggcaacctggttttccatccacaacttcatttttaattattcgattccatgttcttttcagcgcgttcaaccag

SEQ ID NO: 224 - DNA, 1419 bp, Homo sapiens
  SIMILAR (1094)..(963): 311254mologous to Homo sapiens Similar to selectively expressed in embryonic epithelia protein-1,accession number BC003163,Smith-Waterman Score=48.
ctatgcaattgcagagggactttctttccaagtacggcattcccgatataccagaaaggggtggaagaatgtcagaagaatggcaagcatgaacatcacattcacgtaaaatgggtcattctgaagggagcctttgatgagggtgaagatggggaactggagcagagacaccacagccgacaaggccatcaccagcccaaagagcttgccaaagtgctctgaagggaaagcaagggtgaggaaggccgcgttgctcccatagaggaaggagcggctgatcacttgcaggatgaaggtgaggtactggagagggaggatggggactgaggcacagagggcgaagcccaggcacagcagggatgtcagggccagcgaaggcaccgtcgagcagagggccaccgccaaagtggaggaacctgtctttcttgcttccttctggtacttctgtttaagccggtccatgagcaggccattccagggggcacacagcactccgaactgagtgaaggcaaaggcatttgtgtaggtgctgacttccttcgctgaaaggaactcctttgactgtagctccctgttttcatgctcagctgtttccttctcttcctttgtggtgccattcccagggcacaggccatagctgtagttggggggcagtgggtatgggatgtgcccccggggcatcaggaggaaagtgcgtgctacatgccaggtactgcagacagagatgaagatgaaggaggccctgaggctgatgcctttttcataaagaagcttaataataaggaagactgccgaggaagagtcaaatgctccattgtacagagtgatgatggtcgaacggtgttggccaaataggttcccaatctgcaggttggtgatgagaaacaggattcccccaatggtgagcattggcatggccaggaagagcagcacggctgagcctgcagaggtgaaggctatgatgagtgtggcggtggtgtagaaaaatcttacaacaccgccgccgttattaggaagaagctctgtttgatgacgtcccacactgtgggtacctttatgaacaggaatttgctttttcaaatcccagagaagtaagattaaagttggctgttctccatccatataggccttttctgccctctcccgtgcagcatctggaggaacattgcagcaccccacgacagatccctgcttaatgtcagcctccacttccccatcctccagcaccatggaaactgttccagtctcttccggcttccctttgcctttttccacaacaaaagtccagtgttcaatcggccccagcagtttcctgctcttttcatctttggggtgttgggcaaagctctcaatgtgaaaaaccccgttgttttcactcaggagtcgtctccttctcctggatccatttcctcttttcat

SEQ ID NO: 225 - DNA, 579 bp, Homo sapiens
  SIMILAR (33)..(521): 1001254mologous to Homo sapiens Similar to selectively expressed in embryonic epithelia protein-1,accession number BC003163,Smith-Waterman Score=822.
tttgctgtccctagtcagtgtggtgaattccctacctcttcattggcactctcaactccttgctgaccaacatggccggtggggacatggcacgagtcagcacctacacaaatgcctttgccttcactcagttcggagtgctgtgtgccccctggaatggcctgctcatggaccggcttaaacagaagtaccagaaggaagcaagaaagacaggttcctccactttggcggtggccctctgctcgacggtgccttcgctggccctgacatccctgctgtgcctgggcttcgccctctgtgcctcagtccccatcctccctctccagtacctcaccttcatcctgcaagtgatcagccgctccttcctctatgggagcaacgcggccttcctcacccttgctttcccttcagagcactttggcaagctctttgggctggtgatggccttgtcggctgtggtgtctctgctccagttccccatcttcaccctcatcaaaggctcccttcagaatgacccattttaacgtgaatgtgatgttcatgcttgccattcttctgacattcttccacccctttctg

SEQ ID NO: 226 - DNA, 1251 bp, Homo sapiens
  SIMILAR (84)..(692): 1001254mologous to Homo sapiens eosinophil major basic protein precursor,accession number M34462,Smith-Waterman Score= 1106.
ggtcttttaacatccgaggaccacattctttgtgctttccaaatcatcacctgccccatgcaacttacagggataaagccaagatgaaactccccctacttctggctcttctatttggggcagtttctgctcttcatctaaggtctgagacttccacctttgagacccctttgggtgctaagacgctgcctgaggatgaggagacaccagagcaggagatggaggagaccccttgcagggagctggaggaagaggaggagtggggctctggaagtgaagatgcctccaagaaagatggggctgttgagtctatctcagtgccagatatggtggacaaaaaccttacgtgtcctgaggaagaggacacagtaaaagtggtgggcatccctgggtgccagacctgccgctacctcctggtgagaagtcttcagacgtttagtcaagcttggtttacttgccggaggtgctacaggggcaacctggtttccatccacaacttcaatattaattatcgaatccagtgttctgtcagcgcgctcaaccagggtcaagtctggattggaggcaggatcacaggctcgggtcgctgcagacgctttcagtgggttgacggcagccgctggaactttgcgtactgggctgctcaccagccctggtcccgcggtggtcactgcgtggccctgtgtacccgagagaatgatgccccccatctggagagcctagagacacaggcagacctaggccaggatctggatagttcaaaggagcaggagagagacttggctctgacggaggaggtgattcaggcagagggagaggaggtcaaggcttctgcctgtcaagacaactttgaggatgaggaagccatggagtcggacccagctgccttagacaaggacttccagtgccccagggaagaagacattgttgaagtgcagggaagtccaaggtgcaagacctgccgctacctattggtgcggactcctaaaacttttgcagaagctcagaatgtctgcagcagatgctacggaggcaaccttgtctctatccatgacttcaacttcaactatcgcattcagtgctgcactagtacagtcaaccaagcccaggtctggattggaggcaacctcaggggctggttcctgtggaagcggttttgctggactgatgggagccactggaattttgcttactggtccccagggcaacctgggaatgggcaaggctcctgtgtggccctatgcaccaaag

SEQ ID NO: 227 - DNA, 3364 bp, Homo sapiens
  SIMILAR (553)..(1455): 881254mologous to Homo sapiens Similar to selectively expressed in embryonic epithelia protein-1,accession number BC003163,Smith-Waterman Score=1336.
  misc_feature (1)...(3364): n = a,t,c or g
gcagctgtcgcactagtgattttcccgggtcgacgatttcgtcgagtcctaggcgagggtcatgggagttgggggtatttctggcagtagaatggcctgcgtcgtgactaannnnnnnnnnnnnnnnnnnnnnnnnncctgaaatccatgggagcttttgtttcattgtcagtaaactgaagataacaccaacttggcagcgggagtttgtgtcttctgtatgaaatctccccgcctctgcacctggttgagttgctgtcattattttaggggacggtattcagaattcgagcgcaggagctccgcttctccacctgctcccggggagctattgggcctcctcttccagcagcctctatctttattctacaggatccagagaatcacccgctgatggtttttgcccaggcctgaaacaaccagagagctacgggaaaggaagggcttggcttgccagaggaattttccaagtgctcaaacgccaggcttacggcgcctgtgatccgtccaggaggacaaagtgggatttgaagatccactccacttctgctcatggcgggccagggcctgcccctgcacgtggccacactgctgactgggctgctggaatgcctgggctttgctggcgtcctctttggctggccttcactagtgtttgtcttcaagaatgaagattactttaaggatctgtgtggaccagatgctgggccgattggcaatgccacagggcaggctgactgcaaagcccaggatgagaggttctcactcatcttcaccctggggtccttcatgaacaacttcatgacattccccactggctacatctttgaccggttcaagaccaccgtggcacgcctcatagccatatttttctacaccaccgccacactcatcatagccttcacctctgcaggctcagccgtgctgctcttcctggccatgccaatgctcaccattgggggaatcctgtttctcatcaccaacctgcagattgggaacctatttggccaacaccgttcgaccatcatcactctgtacaatggagcatttgactcttcctcggcagtcttccttattattaagcttctttatgaaaaaggcatcagcctcagggcctccttcatcttcatctctgtctgcagtacctggcatgtagcacgcactttcctcctgatgccccgggggcacatcccatacccactgccccccaactacagctatggcctgtgccctgggaatggcaccacaaaggaagagaaggaaacagctgagcatgaaaacagggagctacagtcaaaggagttccttttaagcgaagggaagagaccccagggcaagggcagaagcaggaactccgctccttctggagctacggntttctctcgggcgctttgcctgggnacctggtgtgggcttgtctgtgatacagttgtggcactacctcttcattggcactctcaactccttgctgaccaacatggccggtggggacatggcacgagtcagcacctacacaaatgcctttgccttcactcagttcggagtgctgtgtgccccctggaatggcctgctcatggaccggcttaaacagaagtaccagaaggaagcaagaaagacagttcccccgcttcttccgaggagacagcggaggcgaggccaccgggctgtcaggctgaagctccgtggcggccgggtcctgcacgcagagaagaccccagcgccggcgcggctcagggctgggcccacgggactccggacgcgccgcgaaagcgttgcgctcccggaggcgtccgcagctgctggctgctcatttgccggtgaccggaggctcggggccagcatggcccccacgctgcaacaggcgtaccggaggcgctggtggatggcctgcacggctgtgctggagaacctcttcttctctgctgtactcctgggctggggctccctgttgatcattctgaagaacgagggcttctattccagcacgtgcccaggaaagtctgagaaggaagatagggatggaaaaagggaaggcctcatccacgtggtcccattatggcttaaagctgtaggaaggcgccagtacagcccccccaccttcaaccgagctcctttacctgccaggtgggttttcttgcacgagaaggcttaccaggtacgggacacagccattgagtcctcggtggtaaccaaggtgaagggctccggactctacgccaacagagtcatggatgtgtctgattacgtgacgccacctcagggcacctcggtctttgtcatcatcaccaagatgattgttactgaaaatcacatgcaaggattctgcccagagagtgaggagaaataccgctgtgtatcagacagccagtgcgggcctgagcgcttgccaggtggggggtctgagacttccacctttgagacccctttgggtgctaagacgctgcctgaggatgaggagacaccagagcaggagatggaggagaccccttgcagggagctggaggaagaggaggagtggggctctggaagtgaagatgcctccaagaaagatggggctgttgagtctatctcagtgccagatatggtggacaaaaaccttacgtgtcctgaggaagaggacacagtaaaagtggtgggcatccctgggtgccagacctgccgctacctcctggtgagaagtcttcagacgtttagtcaagcttggtttacttgccggaggtgctacaggggcaacctggtttccatccacaacttcaatattaattatcgaatccagtgttctgtcagcgcgctcaaccagggtcaagtctggattggaggcaggatcacaggctcgggtcgctgcagacgctttcagtgggttgacggcagccgctggaactttgcatactgggctgctcaccagccctggtcccgcggtggtcactgcgtggccctgtgtacccgaggttcctccactttggcggtggccctctgctcgacggtgccttcgctggccctgacatccctgctgtgcctgggcttcgccctctgtgcctcagtccccatcctccctctccagtacctcaccttcatcctgcaagtgatcagccgctccttcctctatgggagcaacgcggccttcctcacccttgctttcccttcagagcactttggcaagctctttgggctggtgatggccttgtcggctgtggtgtctctgctccagttccccatcttcaccctcatcaaaggctcccttcagaatgacccattttacgtgaatgtgatgttcatgcttgccattcttctgacattcttccacccctttctggtatatcgggaatgccgtacttggaaagaaagtccctctgcaattgcatag

SEQ ID NO: 228 - DNA, 1744 bp, Homo sapiens
  SIMILAR (33)..(515): 771254mologous to Mus musculus selectively expressed in embryonic epithelia protein-1,accession number AF188622,Smith- Waterman Score=654.
aatattctgcttttcctgttatgtgtttcagatttttctacaccaccgccacactcatcatagccttcacctctgcaggctcagccgtgctgctcttcctggccatgccaatgctcaccattgggggaatcctgtttctcatcaccaacctgcagattgggaacctatttggccaacaccgttcgaccatcatcactctgtacaatggagcatttgactcttcctcggcagtcttccttattattaagcttctttatgaaaaaggcatcagcctcagggcctccttcatcttcatctctgtctgcagtacctggcatgtagcacgcactttcctcctgatgccccgggggcacatcccatacccactgccccccaactacagcataggcctgtgccctgggaatggcaccacaaaggaagagaaggaaacagctgagcatgaaaacagggagctacagtcaaaggagttcctttcagcgaaggaagagaccccaggggcagggcagaagcaggaactccgctccttctggagctacgctttctctcggcgctttagcctggcacctggagtggctgtctgtgatacaattgtggcactacctcttcattggcactctcaactccttgctgaccaacatggccggtggggacatggcacgagtcagcacctacacaaatgcctttgccttcactcagttcggagtgctgagtgccccctggaatggcctgctcatggaccggcttaaacagaagtaccagaaggaagcaagaaagacagggtcttttaacatccgaggaccacattctttatactttccaaatcatcacctgccccatgcaacttacagggataaagccaagatgaaactccccttacttctggctcttctatttggggcagtttctgctctagcatctaaggtctgagacttccacctttgagacccctttgggtgtctaagacgctgcctgaggatgaggagacaccagagcaggagatgggaggagaccccttgcaggggagctgggaggaagagggagggagtgggggctctgggaagttgaagatgcctcccaagaaagatgggggctgtttgagtctattcttcagtgcccagatatgggtgggacaaaaacctttacgtgttcctgagggaaggagggacaccagttaaaagtgggttggggcatccctgggggttgccccagacctgcccgctaccttcctgggtgagaaagtctttccagacgttttagttcaaagctttggttttactttgcccggagttgcttacagggggcaaacctgggttttccattccacaacttttcaatattaattatcggaatccaagtgttctgtcaagcgcgctcaacccagggtcaagtctggattgggaggcaggatccacaggctcgggtcgcttgcagacgctttcagtgggttgacggcagccgctgggaacttttgcgtactggggttgctcaccagccctgggtcccgcggtggtcactgcgtggccctgtgtaacccgagggaggctactgggcttcgagcccacttgccttcagaagaatttccctttcatctgtttcccattgagctggtcccagccagcagttcaagtagtgccctctcctgggcagctgcctcccctcctctgcttgccatccctccctccacctccctgcaataacaatgggttttactgaaaaaaaaaaaaaaaaaaaaaaccggaattcc

SEQ ID NO: 229 - DNA, 441 bp, Homo sapiens
  SIMILAR (97)..(441): 681254mologous to Mus musculus putative,accession number AK016414,Smith-Waterman Score=420.
tgtcgtaccggctcggaatttccggaacgacgatttcgtgtatggggcggcagtcgggggtggtgggagattgaggatgcgtccaatcacttataaatggcgccggaacaggacccgaagcctaaagtccaggagggtgagcgagtgctgtgctttcatgggcctcttctttatgaagcaaagagtgtaaaggttgccataaaggacaaacaagggaaatacttcatacattacagggggtggaataaaaattgggatgaatggcttccggagagcagagtactcaaatacttggacaccaatttgcagaaacagcgagaacttcaaaaagccaatcagaaaacgaaaaacaacaaacagaaaacacctggaaatggagatggtggcagtaccagagagacccctcaacctcctcggaagaaaagggcccgggtagatcct

SEQ ID NO: 230 - DNA, 435 bp, Homo sapiens
  SIMILAR (19)..(426): 981254mologous to Mus musculus histone acetylase complex subunit MRG15-2,accession number AF319621,Smith-Waterman Score=719.
  misc_feature (1)...(435): n = a,t,c or g
gcggcgaatcacttataaatggcgccgaagcaggacccgaagcctaaattccaggagggtgagcgagtgctgtgctttcatgggcctcttctttatgaagcaaagtgtgtaaaggttgccataaaggacaaacaagtgaaatacttcatacattacagtggttggaataaaaaaagtgctgtgaggcccaggcgctctgaaaaatctttgaagacacatgaggatattgtagccctttttcctgttcctgaaggagctccctcagtacaccaccccctcctgacctctagttgggatgaatgggttccggagagcagagtactcaaatacgtggacaccaatttgcagaaacagcgagaacttcaaaaagccaatcaggagcagtatgcagaggggaagatgagaggtgctgccccaggaaagagacatctgtcn

SEQ ID NO: 231 - DNA, 414 bp, Homo sapiens
  SIMILAR (168)..(254): 1001254mologous to Mus musculus putative,accession number AK016414,Smith-Waterman Score=145.
ccacgcgtccgcaaaaagctgaaattcttgccaggcgtgagccactatgcccggcctaaaatcatgtattttaaaggaattggtggtgtttgctcacataattaaaatacatggttgtagtgcccctgccttggatgtaactttggataaattctcttgtttaaacagtacgaattggagcaatgttggcttatacacctctggatgagaagagccttgctttattactcaattatcttcacgatttcctaaagtaagtctgtgcttgaaattataaacatggatttgaaaattagcgtgtaatgggagggattggcagtatagatgctaaaacattaaacattatattggtacaggcatagatagttggtaatggagcagtaaaagtaagtgcaaacacatgggagtctcaga

SEQ ID NO: 232 - DNA, 2033 bp, Homo sapiens
  SIMILAR (140)..(1132): 581254mologous to Mus musculus putative,accession number AK016414,Smith-Waterman Score=869.
ggcaaatccggcccaggatgtagagctggcagtgcctgaccggcgcgtctgacgcggagttgggtggggtagagagtagggggcggtagtcgggggtggtgggagaaggaggaggcggcgaatcacttataaatgtttgccgaagcttgacccgaagcctaaattccaggagggtgagcgagtgctgtgctttcatgggcctcttctttatgaagcaaagtgtgtaaaggttgccataaaggacaaacaagtgaaatacttcatacattacaggggttggaataaaaattgggatgaatgggttccggagagcagagtactcaaataccgtggacaccaatttgcagaaacagcgagaacttcaaaaagccaatcaggagcagtatgcagaggggaagatgagaaggggctgccccaggaaagaagacatctggtctgcaacagaaaaatgttgaagtgaaaacgaaaaagaacaaacagaaaacaccttggaaattggagatggtgggcagtaccagtgagacccctccagcctcctcggaagaaaagggcccgggtagattcctactgtttgaaaatgaggaaacattcatgaaacagagttgaagttaaggtaaagattcctgaagagctaaaaccgtggcttgttgatgacctgggactttaattaccagggcaaaaacagctcttttatcttcctgccaagaagaatgtggattccattcttgaggattatgcaaattacaagaaatctccgtgggaaacacagataataaggagtatgccggttaaatgaagttgtggcaggggattaaaagaatactttcaacgtaaatgttggggtacccagctactctataaatttgagagaccacagtatgctgaaattcttgcagatcatcccgatgcacccatgtccccaggtgtatggagcgcccaacatctcctggagattatttggtaccgaattggagcaatgttggcttatacacctctggatgaggaagaggccttgctttattactcaattatcttcacgatttcctaaagtacctggcaaagaattctgcaactttgttcagtgccagcgattatgaatgtggctcctcctgagtaccatcggaaagctgtgtggaaaagcactctcactcacttatgtttggatctccgtaaacacatttttgttcttagtctatctccttggtacaaaccgatgtgctttgaagatgttagtgtataacaattgatgtttggttttctgtttgattttaaacagagaaaaaataaaagggggtaatagctccttttttcttttctttcttttttttttttcatttcaaaattgctgcccagtgttttccaatggatggaccaaccagaggggatatgcctgtaagagggtttatggccctagttggaccaaagctgcttttggaatgctgggtggtcctattccctttgaccactacggcacttttaataataccatgttaatgcctatatgacaaaaatgctctgattcctagtgcccaaaggttcaattcagtgtatataactgaacacactcatccatttgtgcttttgtttttttttaatggcgcttaaaagtaaagagcccatcctttgcaagtcatcccaggttgttacttaggcattttatcttggctcgaaattgttgaagaatggtggcttgtttcgatggtttttgtatttgtgtctaatgcacgttttaacatgatagatgcaatcgcactcgtgtagctagttttctggaaaagtcaatcttttaggaattgtttttcagatcttcaataaattttttctttaaatttcaaagaaaaaaaaaagaaaaccagaaaacaacaacaacaacatgaaaaaaaaagaccccacaaaaacctcattcagaggtcagcaacctcaaagactgaagatagatagcccccaaagattgagaaagaatcaatacaaaagcactgaaaactcaaaaagtcagagttcctcttctctaaatggactgcaacacccctcca

SEQ ID NO: 233 - DNA, 2180 bp, Homo sapiens
  SIMILAR (8)..(265): 1001254mologous to Homo sapiens HSPC095,accession number AF161358,Smith-Waterman Score=434.
  misc_feature (1)...(2180): n = a,t,c or g
tttcgtcgggagcaagatggcgattccgggcaggcagtatgggcttattttgccaaagaaaacacagcagttgcaccctgttttgcaaaaaccatcagtgtttgggaatgattctgatgatgatgatgagacctctgtgagtgaaagccttcagagggaagctgctaagaagcaggccatgaaacagaccaagctggaaatccagaaggcccttgcagaagatgctactgtgtatgaatatgacagtatttatgatgaaatgcagaaaaaaaaggaggaaaataatcccaaattgcttttggggaaagacagaaagcccaagtatattcacaacttgctaaaagcagttgagatcagaaaaaaggaacaggaaaaaagaatggagaagaaaatacagagagaacgagaaatggaaaagggggagtttgatgataaagaagcatttgtgacatctgcatataagaaaaaactgcaagagagagctgaagaagaagaaagagaaaagagggctgctgcactggaagcatgtttggatgtaaccaagcagaaagatctcagtggattttataggcacctattaaatcaagcagttggtgaagaggaagtacctaaatgcagctttcgtgaagccagatctggtataaaggaagaaaaatcaaggggcttctccaatgaagtaagttcaaaaaaacagaataccacaagagaaatgcattctttcaaactgatgtgaaagtagagggaaaacccagatgcagacagttacttcgatgctaagagcagtccggatgatgaaatagaagaaactagagttaactgcagaagggaaaaggtcatagagacccctgagaatgacttcaagcaccacaggagtcaaaaccactctcggtcacctagtgaagaaagagggcacagtaccaggcaccacacgaaaggatcacgaacgtcgagaggacatgagaaaagggaagatcagcaccagcagaagcaatccagagaccaagagaaccattacactgaccgtgattaccggaaagaaagggattctcataggcacagagaggccagtcatagagattcccattggaagaggcatgaacaggaagataaaccaagggcgagggaccaaagagaaagaagtgacagagtatggaaaagggagaaagatagggagaaatattcccaaagagaacaagaaagagatagacaacaaaatgatcagaaccgacccagtgagaaaggagagaaggaagagaaaagccaagcaaaggaagagagcatatgaaagtaagggagggaaggtattgaaattattgataaatacagagatagagaaaaacgagaggtaggtgttcagtcttcagaaagaaatcaagaccagaaaggaaagcagcccaaatttcaagggcaaaggataaatttcttgaccaatttagatttcatacaaaatggagaaacatggcaaaggacaaaagaaagaaaccaagagaaaccctctaattctgaatcatcactgggagcaaaacacagactcacagaggaagggcaagagaagggtaaagaacaagagagaccacctgaggcagtgagcaagtttgcaaagcggaacaatgaagaaactgtaatgtcagctagagacaggtacttggccaggcagatggcgtcgggttaatgcaaagacctatattgagaaagaagattgattgatggctaccccaagagaaagatttaaggaagcacagaaaacttgtaattcctggaacctgcttgcgtaaaaccattaaagggagtgtgttaccagttagttttggagggccttttttaatttatttttccaaatttttaagtttaaagtccgtccttacagcttggatgttttggatggtggatgttttggctgaatttatatatagtgtgtactcatcaataccacattctttgttgtattcaagaaccgttaagagtgtgctaattccctgtaggtacataatgaggaaaatttgctccactacaaccattaaaaaataattttgggccaggatacggtagctcgtgcctgttaatacccaacattttggggagggccaagggcaggaagggatatttgagggctagggccatttcaaggacccagccttagggcaggggttaattaaggaccnttgttcttcttatttttt

SEQ ID NO: 234 - DNA, 1029 bp, Homo sapiens
  SIMILAR (445)..(951): 421254mologous to Homo sapiens preproapolipoprotein,accession number A14829,Smith-Waterman Score=236.
  misc_feature (1)...(1029): n = a,t,c or g
tttgagacccatcgtagaccctagtcagngtggtggaattcggaggtcccccacgggcccttcaggatgaaagctgcggtgctgacccttggcccgtgctcttctctgacgggtgagccaggcgtcggcatttctggcagggaggatgaagcccccccagagccgcctgggatcgagtagaaggaacctggccactcgtgtaccgtggactgtgctcaaagaacagcggacagagacttatgtgtcccagtttgaagggctccgccttggggaaaacagctaaaccttaaagctcctttgacaactggggacagcgttgaccttccacctttcagccaagctgcgcgaanacagtttcgggccctgttgacccagggatttcttggggattaacctggggaaaagggagacaagaggggccttgaggcaagggagattgaggcaaaggatctttggaaggaggttgaaaggcccaaggttgcagccttaacttggggacgattttcccagaaagaaattggccaggaaggagattggagctcttacccgccagaaaggttggagccgcttgcgcgcaagaacttccaagaagggcgcgcgcccagaaagcttgcacgagcttgcaagaagaagcttgagcccactgggcgaggcagtatcgcgaccgcgcgcgcgccccatgtgggacgcgctgcgcacgcatctggccccctacagcgacgagatgatgccagcgcttgggcgcgcgcccttggggctttaagggaaaacgggggggccagaatgggccagtaccacgccccaggccaccgagcaatctgagcacgctgagcgagaaggccaagcccgcgctcgaggaccatccgccaaggcctgctgcccgtgctggagagcttcaaggtcagcttcctgagcgctctcgaggagtacactaagaagctcaacacccagttgaggcgcccgccgccgcccccctacccggtgctcagaataaacgtttccaaagtgggaaaaaaaaaaaaaaaaaaa

SEQ ID NO: 235 - DNA, 552 bp, Homo sapiens
  SIMILAR (121)..(450): 1001254mologous to Homo sapiens alpha globin,accession number V00488,Smith-Waterman Score=567.
cacagactcagagagaacccaccatggtgctgtctcctgccgacaagaccaacgtcaaggccgcctggggtaaggtcggcgcgcacgctggcgagtatggtgcggaggccctggagagggatgttcctgtccttccccaccaccaagacctacttcccgcacttcgacctgagccacggctctgcccaggttaagggccacggcaagaaggtggccgacgcgctgaccaacgccgtggcgcacgtggacgacatgcccaacgcgctgtccgccctgagcgacctgcacgcgcacaagcttcgggtggacccggtcaacttcaagctcctaagccactgcctgctggtgaccctggccgcccacctccccgccgagttcacccctgcggtgcacgcctccctggacaagttcctggcttctgtgagcaccgtgctgacctccaaataccgttaagctggagcctcggtggccatgcttcttgccccttgggcctccccccagcccctcctccccttcctgcacccgtacccccgtggtctttgaataaagtct

SEQ ID NO: 236 - DNA, 705 bp, Homo sapiens
  SIMILAR (52)..(450): 411254mologous to Hylobates lar alpha2-globin,accession number M94634,Smith-Waterman Score=169.
  misc_feature (1)...(705): n = a,t,c or g
aggcctagaattcggcacgagccacagactcagagagaacccaccatggtgctcgtctcctgcccgacaagaccaacgtcaaggccggcttggggtaaggtcggcgcgcacgctggcgagtatggtgcggaggccctggagaggatgttcctgtccttccccaccaaccaagacctacttcccgcacttcgaccttgagccacggtttctgcccaaggttaaagggcccacggcaaagaaggtggccgaacgcgctgaccaaacgccgtggcgcaacgtggacggacatgccccaaacggcgctgtccgccctgagcggacctgcaacggcgcacaagctttcgggtggacccggttcaactttcaagctcctaaagccacttgccttgctggtggaccctgggccggcccacttccccgtccgagttcaacccctggcggttgcacgccttccctggaacaaagtttcctgggcttcttgttgaagcaccgttgcttgaaccttccaaattaccgttaaagcttggaagccttcgggttggccatgctttctttgcccctttggggcttccccccagggccctccttccctttcctggaacccgtaaccccgtgggtcttttgaataaaattttgaattgggggggcaaaaaaaaaaaaaaaaaaaagatctttnaatttaagggggcggaaagtttatttcaa

SEQ ID NO: 237 - DNA, 645 bp, Homo sapiens
  SIMILAR (108)..(299): 961254mologous to Mus musculus putative,accession number AK013432,Smith-Waterman Score=325.
aagatatttttgagcgactgcctggcatgtgacagctgtatgactgcagagaaaggagtccaactttcccagcaaaatgccaaggacttcttccgcgttctgaacctaacaagaaatgtgatacctcaaagcacaaagtgctggtagtgtctgtgtgtcctcaatctttgccttattttgctgctaaattcaacctcagtgtaactgatgcatccagaagactctgtggtttcctcaaaagtcttggggtgcactatgtatttgatacgacgatagctgcggattttagtatcctggaggatgcttaaatggcagaggccaagcccagactccagacggacatgcggataaggccctgctgcggcagatggaaggcatttacgctgacatccctgtgcggcgtccggagtccagtgcaaacgtgcaggagctgtaccaggagtggctggaggggatcaactcccccaaggcccgagaggtgctgcataccacgtaccagagccaggagcgtggcacacacagcctggacatcaagtggtgaagtcaggccagggccttccagctgctcttggggccagagccaagagcctctcagtagagggaggggctgccctgagtggagtattaaagacacttaagaaaacc

SEQ ID NO: 238 - DNA, 564 bp, Homo sapiens
  SIMILAR (277)..(546): 951254mologous to Homo sapiens nuclear prelamin A recognition factor,accession number AF128406,Smith-Waterman Score=440.
aaaaagaccataagcatctggagcacctgcaagagcctgtgcatgggctcggcgtgactgagagtcctccgccttgcccgagcatcaggcaggccctcccaagacccctcaagatgctagaatgggactttctgcaaagtttaaacatctgtacaggatttagcttctttggtggcgagacttggattgtgatgccctcaggaagtctggtttcactctttctgtcactgtacgtcagcattcatgaaggacttgtattttctctgccttgtgaggtttggagacttgaaggaggacaaagtgacgcgccatgatggagccagctcagacgggcacctggcacacatcttcagacatgcggccaaggagctgttcaacgaggatgtggaggaggtcacttaccgagccctgagaaacaaagacttccaagaggtcacccttgagaagaacggagaggtggtgttacgctttgctgcagcctatggctttcgaaacatccagaacatgatcctgaagcttaagaagggaagttccattcactttgtgaggtctcgctgtctggag

SEQ ID NO: 239 - DNA, 1842 bp, Homo sapiens
  SIMILAR (1092)..(1709): 551254mologous to Homo sapiens Similar to nuclear prelamin A recognition factor,accession number BC000438,Smith-Waterman Score= 400.
aatggcggcggacgagggctgtgctttcggctttccccgttaggagccgcgagtaaggcgagtgtccaacgttcgagctggctgacagagcccggccgcggcctccgcgggcccaggggcctccaggccccgtgaccaccggaccgagcaccctggaacggccccagcttggcctcgggacagtccgcgcgctcaccgactccctggtgaacgccgcttggtcgccgccgccgccgcaagacccacgataagcggaaaccggggcaaggacccggtccccccggcgccgaatgtagtaagaaaacaaaaggctgatgaccaagagaatgtgtcagccgatgcaccgagtccagcccaggaaaatggagagaagggagaattccacaagttggctgatgccaagatatttttgagcgactgcctggcatgtgacagctgtatgactgcagaggaaggagtccaactttcccagcaaaatgccaaggacttcttccgcgttctgaaccttaacaagaaatgtgatacctcaaagcacaaagtgctggtagtgtctgtgtgtcctcaatctttgccttatttttgctggctaaatttcaacctcagtgtaactgattgcatccagaagactctgtggtttcctcaaaagtcttgggggtgcactatgtatttgatacgacgatagctgcggattttagtatcctgggagagtcaaaaagaattcgtgcgtcgttattcgccagcacagtgagggagggaacgcaccctgccccatgctgacctctgcctgtcctgggctggggtccgatacgccggagcgggttgctggggtcgccccatcactggcccaccttcttggcaccgccaaagtccccccagcaggtcatgggttctttggtgaaggattatttcggccagacagcagaaccttgtctccagagaagatttttccacggtcattggtggccccttggttaatgacaagaagctgggaggctcttcagggaaagcccttccccctggctttgcatggcttcccgggggcgcttgacttgcgtgtttaacatcaggtgaaatttgcttcaaattaatgggagcaaggtgacctctcagtgagagatgctgccgtcgacactctgtttggagacttgaagaaggacaaagtgacgcgtcatgatggagccagctcaaacgggcacctggcacacatcttcagacatgcggcccaaggagctgttcaacggagggatgtggaggaggtcacttaccgaacccttagaaaccaaagatttccacagaaggtcacccttgaagaagaaccgaaaagatgggtgtaaacctttgtcttggaaccctatgcctttcgaaacatcccagaaacttgatccttgaaacctttaaagaagggcaaagttcccccattcccactttgtggaagggtcctccccttgtgcttggaggatgcttaaaatggcaagaggccaaagcccaagattcaagacggacatggggataaggcccctgctgcgggcagaatggaaggcatttacacttagacatccctgtgcggcgtccggagtccaggtgcacacgtgcaggaggctgtaccagggagtggctggaggggatcaaactcccccaaggcccgaaaggtgcttgcataccacgtaccagagccagggagcgtggcacacacagccttggacattcaagttggttgaagttcaggccagggccttccagctgctcttggggccagagccaagagcctctcagtagagggaggggactgccctgagtggagtattaaagacacttaagaaaaccgctcaaaaaaaaaaaaaa

SEQ ID NO: 240 - DNA, 388 bp, Homo sapiens
ggcacgaggcaactagcgtctggcagcaggaatccaaccagggccctgagttctgaggcagagaggaggacagaagaaacaagaggctggagattgtcaaattcagtatcccagttggctcttgattcttggggaaaccatccctcagctcctagagggagattgctagatcatgaaactaattaccatcctttttctctgatgcaggctgttactaagtttaacccaggaatcacaatccgcggaaattgatctgcttgacaatgatttatttctagctgaggaggcttggtttgtatagatatattatgcaaatccaaacaaatccccgtatttgatcttgatcccctatttgattcctttaatactatttgtttggccctcttct

SEQ ID NO: 241 - DNA, 611 bp, Homo sapiens
  SIMILAR (134)..(454): 961254mologous to Homo sapiens alpha globin,accession number V00488,Smith-Waterman Score=536.
cggccgcgtcgacctcaaagagaacccaccatggtgctgtctcctgccgacaagaccaacgtcaaggccgcctggggtaaggtcggcgcgcacgctggcgagtatggtgcggaggccctggaaagatgtttctgcctttcccaccaccaagacctactttccgcactttgacctgagccacgggtcttcccaggttaagggccacggcaagaaggtggccgacgcgcttaccaacgccgtggggcacgtggacgacatgcccaacgcgctgtccgccctgagcgacctgcacgcgcacaagcttcgggtggacccggtcaactttaagctcctaagccactgcctgctggtgaccctggccgcccacctccccgccgagttcacccctgcggtgcacgccttcctggacaagttcctggcttctgtgagcaccgtgctgacctccaaataccgttaagctggagcctcgggggccatgcttcttggcccttgggcctccccccagacccttctccctttctgacccgtaccccggggggtttgaataaaagatggcgacccggcgcaatttggaactcgaaagaatctttttttttgggttggggggggca

SEQ ID NO: 242 - DNA, 517 bp, Homo sapiens
  SIMILAR (88)..(234): 1001254mologous to Homo sapiens hemoglobin alpha 1 globin chain,accession number AF351127,Smith-Waterman Score=258.
acagactcagagagaacccaccatggtgctgtctcctgccgacaagaccaacgtcaaggccgcctggggtaaggtcggcgcgcacctggcgagtatggtgcggaggccctggagaggatgttcctgtccttccccaccaccaagacctacttcccgcacttcgacctgagccacggctctgcccaggttaagggccacggcaagaaggtggccgacgcgctgaccaacgccgtgggcacgtggacgacatgcccaacgcgctgtccgccctgagcgacctgcacgcgcacaagcttcgggtggacccggtcaactttcaagctcctaaagccactggcctgctggtggaccctgggccggcccacttccccggccgagtttcacccctgcggttgcaaggcttccttgggacaaagtttctgggtttctgttaagaaccgtgcttgaacttcaaaataacgttaaacttggaagcttcggttgggcaatgtttctttggccctttggggttccccca

SEQ ID NO: 243 - DNA, 702 bp, Homo sapiens
  SIMILAR (161)..(415): 351254mologous to Bos taurus hemoglobin alpha chain,accession number AJ242797,Smith-Waterman Score=78.
  misc_feature (1)...(702): n = a,t,c or g
aggcctagaattcggcacgagccacagactcagagagaacccaccatggtgctcgtctcctgcccgacaagaccaacgtcaaggccggcttggggtaaggtcggcgcgcacgctggcgagtatggtgcggaggccctggagaggatgttcctgtccttccccaccaccaaagacttacttcccgcacttcgaccttgagccacggtttctgcccaaggttaaagggcccacggcaaagaaggtggccgaacgcgctgaccaaacgccgtggcgcaacgtggacgacatgcccaaacggcgttgtccgccctgaagcgacctgcacggcgcacaagctttcgggtggacccggttcaactttcaagctcctaaagccacttgccttgctggtgacccctggcccgcccaccttccccggccgagttcaacccctggcggttgcacgccttccctgggacaaagtttcctgggcttcttgttgaagcaccgttgcttgaaccttccaaataaccgtttaagcttggaagccttcgggttggccatgctttctttgcccctttggggcttccccccagggccctccttccctttcctggaacccgtaaccccgtgggtcttttgaataaaattttgaattgggggggcaaaaaaaaaaaaaaaaaaaagatctttnaatttaagggggcggaaagtttatttcaa

SEQ ID NO: 244 - DNA, 654 bp, Homo sapiens
  SIMILAR (24)..(449): 1001254mologous to Homo sapiens alpha globin,accession number V00488,Smith-Waterman Score=733.
  misc_feature (1)...(654): n = a,t,c or g
cacagactcagagagaacccaccatggtgctgtctcctgccgacaagaccaacgtcaaggccgcctggggtaaggtcggcgcgcacgctggcgagtatggtgcggaggccctggagaggatgttcctgtccttccccaccaccaagacctacttcccgcacttcgacctgagccacggctctgcccaggttaagggccacggcaagaaggtggccgacgcgctgaccaacgccgtggcgcacgtggacgacatgcccaacgcgctgtccgccctgagcgacctgcacgcgcacaagcttcgggtggacccggtcaacttcaagctcctaagccactgcctgctggtgaccctggccgcccacctccccgccgagttcacccctgcggtgcacgcctccctggacaagttcctggcttctgtgagcaccgtgctgacctccaaataccgttaagctggagcctcggtggccatgcttcttgccccttgggcctccccccagcccctcctccccttcctgcacccgtacccncgtggtctttgaataaagtctgagtgggcggcnnnnnnnnnnnnnnnnnnnnnntnnnnnnnnnnnnnnnnnnnnnnnnnnnnnnnnnnnnnnnnnnnnnngggnnnnnnnnnnnngccgcgcg

SEQ ID NO: 245 - DNA, 665 bp, Homo sapiens
  SIMILAR (169)..(339): 561254mologous to Homo sapiens hemoglobin alpha 1 globin chain,accession number AF351127,Smith-Waterman Score=132.
  misc_feature (1)...(665): n = a,t,c or g
atcgagaccatattccatgtggnggaattccacagactcagagagaacccaccatggtgctcgtctcctgcccgacaagaccaacgtcaaggccggcttggggtaaggtcggcgcgcacgctggcgagtatggtgcggaggccctggagaggatgttcctgtccttccccaccaaccaagacctacttcccgcacttcgaccttgagccacggtttctgcccaggtttaagggccacgggcaagaaggtggccgacgcgctgaccaacgccgtggcgcacgtgggacgacatgcccaaacgcgctgtccgccctgagcgacctgcacgcgcacaagctttcgggtgggacccggttcaactttcaagctcctaaagccacttgccttgcttgggtgaaccttgggccgcccaccttccccggccgagtttcaaccccttggcggttgcaaggcttccctggggacaaagtttcttgggtttcttgttgaagcaccgttgcttgaaccttccaaattaccgttaaagcttggaagccttcggttggccatgctttctttgcccctttgggcctttcccccagcccctcctcccctttcctgcacccgtacccccgtggtctttgaaataaagtcttgagtgggcggcaaaaaaaaaaaaaaaaaaa

SEQ ID NO: 246 - DNA, 497 bp, Homo sapiens
  SIMILAR (140)..(30): 861254mologous to Homo sapiens Human ORFX ORF1870 polypeptide sequence SEQ ID NO:3740,accession number AAB42106,Smith-Waterman Score=181.
  misc_feature (1)...(497): n = a,t,c or g
ntttgactttcgataggcattcggcacgagggagcttcagtgctgtgtgttcttggcctccatgctgggggtgccaccaattcccactgtccagggcttccagtggactctccgaggtactgatgtagaaacttccccattcggtgcaccaagagcaacctcacacggtgtgggccaaatgaagagctgccagatcccacagcccttgaagataaggatggtcaaacaaaataatatcatacctggagaaactcagatcttgctaagatttactggttgggaatccaaagttaatgccaagaagcagccgccagttgggatcaaatgtgagcctatggatcaaggaaatgagcaaacaggtggccatgaaacagatggtcatagaattggttcagtggttgtgagtgcagcaacccaagagtgtcttatctgaaataccaccaggaatgtctggacacagtagacaaagttttttcaactggacgccttaggataca

SEQ ID NO: 247 - DNA, 433 bp, Homo sapiens
  SIMILAR (130)..(432): 831254mologous to Homo sapiens dJ1182A14.5.1 (novel gene (isoform 1)),accession number AL137798,Smith-Waterman Score=432.
  misc_feature (1)...(433): n = a,t,c or g
tcaactctcattggctcatcctctcatgttgaatgggaggatgctgtacacattatcccanaaaatgaaagtgatgatgaggaagaggaagaaaaagggccagtgtctcccaggaatctgcaggagtctgaagaggaggaagtcccccaggagtcctgggatgaaggacatcggtgggatcaagtgaaaaaggaggaccaagaggcaacaggtcccaggctcagcagggagctgctggatgagaaagagcctgaagtcttgcaggactcactggatagatgttattcaactccttcagtttatcttggactgactgactcatgccagccctacagaagtgccttttacgtattggagcaacagcgtattggcttggctgttgacatggatgaaattgaaaagtgccaagaagtggaagaagaccaagacccat

SEQ ID NO: 248 - DNA, 516 bp, Homo sapiens
  SIMILAR (504)..(250): 851254mologous to Homo sapiens HSPC308,accession number AF161426,Smith-Waterman Score=372.
  misc_feature (1)...(516): n = a,t,c or g
ccccgtacccactgctcgggccagtagagctgcccaactgcncagcgagcagaggtgnacgaaggtcnngcggnanaangcnncaanaannttttcgctacacagaccgcaattaattggggtcccccggggttttccccttcccccgttgttaacacccggcccgtggattttaatttggggcccctataaaaaaacttttcctctgccaggccgcggttcttaactttggttctttaaaacgggccccccnnnnnnnnnnnnnncaatttctcccacgtcaagagaaaagccaacatgtttttcctccaatgcataaaaggaacttccatagggctggcaggagtcaggctgttcaagacaactggaaggagttgaataacatctatccagtgagtcctgcaagacttcaggctctactacctccagcagctccctgctgagcctggggcatggtgggccttggtcttcttcctcttcttggtcctttttaattctgtccacgtcaagagccaa

SEQ ID NO: 249 - DNA, 351 bp, Homo sapiens
  SIMILAR (176)..(349): 981254mologous to Homo sapiens beta-amyloid binding protein precursor,accession number AF353990,Smith-Waterman Score=313.
  misc_feature (1)...(351): n = a,t,c or g
ccgtctgctccggaggccgtgacggcagactcgttggtgtcctgtggttcgtctcagtcactacaggaccctggggggctgttgccacctccgccgggggcgaggagtcgcttaagtgcgaggacctcaaagtgggacaatatcctctgtggagaacacccccccatggaggcgagtttcctgttttccagcacccaacataacttgtaaggattccagtggcaatgaaacacattttactgggaacgaagttggttttttcaagcccatatcttgccgaaatgtaaatggctattcctacaaantggcagtcgcattgtctctttttcttggatggttgggagcagatcg

SEQ ID NO: 250 - DNA, 406 bp, Homo sapiens
  SIMILAR (1)..(165): 561254mologous to Homo sapiens HSPC308,accession number AF161426,Smith-Waterman Score=142.
ctgatggaagtggaagagcctgaagtcttgcaggactcactggatatatgttattcgactccgtcaatgtactttgaactacctgacaattgttaacccgctaggctcctttggttagagaagccacagtccttcagcctccaattggtgtcagtacttaggaagaccacagctagatggacaaacagcattgggaggccttagccctgctcctctcaattccatcctgtagagaacaggagtcaggagccgctggcaggagacagcatgtcacccaggactctgccggtgcagaatatgagcaatgccatgttcttgcagaaaacgcttaacctgagtttcataggaggtaatcaccagacaactgcagaatgtggaacactcagctgtctggctcggtggtctt

SEQ ID NO: 251 - DNA, 439 bp, Homo sapiens
  misc_feature (1)...(439): n = a,t,c or g
ggaccttctctgcccgcagatgggctgaggttggaaactcacagcattgtctctgcagtgttctctacaggatggaattgagaggagcagggctaaggcctcccaatgctgtttgtccatctagctgtggtcttcctaagtactgacaccaattggaggctgaaggactgtggcttctctaaccaaaggagcctagcgggttaacaattgtcaagagcagttggtggttctgaaatacaatcctcagccaaggatccctcctgtgttacagatggatcagctaaaacaagccaacactgaagacacaaagaatgaggttaggttcattgaaaccagggtaacacctttggatgagctaaacacaaagatgacaatgaccttgagcaggtatagaagctccggacgcgtggactcttccnnnttttccggagcggttcct

SEQ ID NO: 252 - DNA, 495 bp, Homo sapiens
cggtgacaagtctccacctggtcttccagatgggagtcatattcccacaataagcagcccttactaagccgagaggtgtcattcctgcaggcaggacctataggcacctgaagatttgaatgaaactatagttccatttggaagcccagacataggatgggtcagtgggcatggctctattcttatttcaaaagcatgccagtgccaacctgtgctcagtctgaagacaatggacccacgttaggtgtgacacattcacataactgtgcagcacatgccgggagtgatcagccggacattttaatttgaaccatgtatctctgggtagctacaaaattcctcagggatttcattttgcaggcatgtctctgagcttctatacctactcaagtgtctgctgttgcaaaaagaagaaaacattctctgcctgagttttaatttttgtccaaagttaattttaatctatacaattaaaaccttttgcctatcaaaaaa

SEQ ID NO: 253 - DNA, 2679 bp, Homo sapiens
  SIMILAR (1150)..(2631): 931254mologous to Homo sapiens dJ1182A14.5.1 (novel gene (isoform 1)),accession number AL137798,Smith-Waterman Score=2390.
agtgctgtggggagtgatcacatttttcacaacatccctgactccacctcttctgccacaaacgtcagcatggtggtatcagccggcccttggtccagcgagaaggcagagatgaacattctagaaatcaacgagaaattgcgcccccagttggcagagaacaaacagcagttcagaaacctcaaagagagatgttttctaactcaactggccggcttcctggccaaccgacagaagaaatacaagtatgaagagtgtaaagacctcataaaatttatgctgaggaatgagcgacagttcaaggaggagaagcttgcagagcagctgaaacaagctgaggagctcaggcaatataaagtcctggttcactctcaggaacgagagctgacccagttaagggagaagttacgggaagggagagatgcctcccgctcattgaatgagcatctccaggccctcctcactccggatgagccggacaagtcccaggggcaggacctccaagaacagctggctgaggggtgtagactggcacagcaacttgtccaaaagctcagcccagaaaatgatgaagatgaggatgaagatgttcaagttgaggaggatgagaaagtactggaatcatctgcccccagggaggtgcagaaggctgaagagagcaaagtccctgaggactcactggaggaatgtgccatcacttgttcaaatagccacggcccttgtgactccaaccagcctcacaagaacatcaaaatcacatttgaggaagacaaagtcaactcaactgtggttgtagacagaaaatcctctcatgatgaatgtcaggatgctctaaacattctcccagtccctggccccacctcttctgccacaaacgtcagcatggtggtatcagccggccctttgtccagcgagaaggcagagatgaacattctagaaatcaatgagaagttgcgcccccagctggcagagaagaaacagcagttcagaagcctcaaagagaaatgttttgtaactcaactggccggcttcctggccaagcagcagaacaaatacaaatatgaagagtgcaaagacctcataaaatctatgctgaggaatgagctacagttcaaggaggagaagcttgcagagcagctgaagcaagctgaggagctcaggcaatataaagtcctggttcactctcaggaacgagagctgacccagttaagggagaagttacgggaagggagagatgcctcccgctcattgaatgagcatctccaggccctcctcactccggatgagccggacaagtcccaggggcaggacctccaagaacagctggctgaggggtgtagactggcacagcaccttgtccaaaagctcagcccagaaaatgatgaagatgaggatgaagatgttcaagttgaggaggatgagaaagtgctggaatcatcttcccccagggagatgcagaaggctgaagaaagcaaagtccctgaggactcactggaggaatgtgccatcacttgttcaaatagccacggcccttgtgactccaaccagcctcacaagaacatcaaaatcacatttgaggaagacaaagtcaactcatctctggttgtagacagagaatcctctcatgatgaatgtcaggatgctctaaacattctcccagtccctggccccacctcttctgccacaaacgtcagcatggtggtatcagccggccctttgtccagcgagaaggcagagatgaacattctagaaatcaatgagaagttgcgcccccagctggcagagaagaaacagcagttcagaagcctcaaagagaaatgttttgtaactcaagtggcctgcttcctggccaagcagcagaacaaatacaaatatgaagagtgcaaagacctcataaaatctatgctgaggaatgagctacagttcaaggaggagaagcttgcagagcagctgaagcaagctgaggagctcaggcaatataaagtcctggttcactctcaggaacgagagctgacccagttaagggagaagttacgggaagggagagatgcctcccgctcattgaatgagcatctccaggccctcctcactccggatgagccggacaagtcccaggggcaggacctccaagaacagctggctgaggggtgtagactggcacaacaccttgtccaaaagctcagcccagaaaatgataacgatgacgatgaagatgttcaagttgaggtggctgagaaagtgcagaaatcgtcttcccccagggagatgcagaaggctgaagaaaaggaagtccctgaggactcactggaggagtgtgccatcacttgttcaaatagccatggcccttatgactccaaccagccacataggaaaaccaaaatcacatttgaggaagacaaagtcgactcaactctcattggctcatcctctcatgttgaatgggaggatgctgtacacattatcccagaaaatgaaagtgatgatgaggaagaggaagaaaaagggccagtgtctcccaggaatctgcaggagtctgaagaggaggaagtcccccaggagtcctgggatgaaggttattcgactctctcaattcctcctgaaaggacatcggtgggatcaagtgaaaaaggaggaccaagaggcaacaggtcccaggctcagcagggagctgctggctga

SEQ ID NO: 254 - DNA, 2996 bp, Homo sapiens
  SIMILAR (3)..(812): 981254mologous to Homo sapiens dJ1182A14.5.1 (novel gene (isoform 1)),accession number AL137798,Smith-Waterman Score=1371.
aatatgaagagtgcaaagatctcataaaatctatgctgaggaatgagcgacagttcaaggaggagaagcttgcagagcagctcaagcaagctgaggagctcaggcaatataaagtcctggttcacgctcaggaacgagagctgacccagttaagggagaagttgcgggaagggagagatgcctcccgctcattgaatgagcatctccaggccctcctcactccggatgagccggacaagtcccaggggcaggacctccaagaacagctggctgaggggtgtagactggcacagcaccttgtccaaaagctcagcccagaaaatgacaacgatgacgatgaagatgttcaagttgaggtggctgagaaagtgcagaaatcgtctgcccccagggagatgcagaaggctgaagaaaaggaagtccctgaggactcactggaggaatgtgccatcacttgttcaaatagccatggcccttatgactccaaccagccacataggaaaaccaaaatcacatttgaggaagacaaagtcgactcaactctcattggctcatcctctcatgttgaatgggaggatgctgtacacattattccagaaaatgaaagtgatgatgaggaagaggaagaaaaaggaccagtgtctcccaggaatctgcaggagtctgaagaggaggaagtcccccaggagtcctgggatgaaggttattcgactctctcaattcctcctgaaatgttggcctcgtacaagtcttacagcagcacatttcactcattagaggaacagcaagtctgcatggctgttgacataggcagtgagtactccattgtgaaggtgataaagctccagttcatggcccagtctcaggccatgcccgtgccaacctggactgactgtcacgacattgaactcaaggcaggacatcggtgggatcaagtgaaaaaggaggaccacgaggcaacaggtcccaggctcagcagagagctgctggatgagaaagggcctgaagtcttgcaggactcactggatagatgttattcaactccttcaggttgtcttgaactgactgactcatgccagccctacagaagtgccttttacgtattggagcaacagcgtgttggcttggctgttaacatggatgaaattgaaaagtaccaagaagtggaagaagaccaagacccatcatgccccaggctcagcagggagctgctggatgagaaagagcctgaagtcttgcaggactcactgggtagatgttattcgactccttcaggttatcttgaactgcctgacttaggccagccctacagcagtgctgtttactcattggaggaacagtaccttggcttggctcttgacgtggacagaattaaaaaggaccaagaagaggaagaagaccaaggcccaccatgccccaggctcagcagggagctgctggaggtagtagagcctgaagtcttgcaggactcactggatagatgttattcaactccttccagttgtcttgaacagcctgactcctgccagccctatggaagttccttttatgcattggaggaaaagcatgttggcttttctcttgacgtgggagaaattgaaaagaaggggaaggggaagaaaagaaggggaagaagatcaaagaaggaaagaagaaggggaagaaaagaaggggaagaagatcaaaacccaccatgccccaggctcagcagggagctgctggatgagaaagggcctgaagtcttgcaggactcactggatagatgttattcaactccttcaggttgtcttgaactgactgactcatgccagccctacagaagtgccttttacatattggagcaacagcgtgttggcttggctgttgacatggatgaaattgaaaagtaccaagaagtggaagaagaccaagacccatcatgccccaggctcagcggggagctgttggatgagaaagagcctgaagtcttgcaggagtcactggatagatgctattcaactccttcaggttgtcttgaactgactgactcatgccagccctacagaagtgccttttacatattggagcaacagcgtgttggcttggctgttgacatggatgaaattgaaaagtaccaagaagtggaagaagaccaagacccatcatgccccaggctcagcagggagctgctggatgagaaagagcctgaagtcttgcaggactcactgggtagatgttattcgactccttcaggttatcttgaactgcctgacttaggccagccctacagcagtgctgtttactcattggaggaacagtaccttggcttggctcttgacgtggacagaattaaaaaggaccaagaagaggaagaagaccaaggcccaccatgccccaggctcagcagggagctgctggaggtagtagagcctgaagtcttgcaggactcactggatagatgttattcaactccttccagttgtcttgaacagcctgactcctgccagccctatggaagttccttttatgcattggaggaaaaacatgttggcttttctcttgacgtgggagagaacaggagtcaggagccgctggcaggagacagcatgtcacccaggactctgccggtgcagaatatgagcaatgccatgttcttgcagaaaacgcttaacctgagtttcataggagtatttgaacctaaacatataccggtgacattctgtgattatcatcttgcccctaccttggttttggtttttggtgcagttccaggctcttggtgtctttgtttgggacaccaagagcctggaactgcacggcaccagctggaagggcgcacgcacgaaacttcctccgtcccttgcatcctcagggcccgcccggcaggacgactgagcaaggccttggaagaccggagagattggagtgtcgcttttggggccgctgcggagcttccgctgccatcttcggatcctgtgttccgcacgggggctccaccagagcagggatcgtggtga

SEQ ID NO: 255 - DNA, 1041 bp, Homo sapiens
  SIMILAR (369)..(422): 941254mologous to Homo sapiens dJ1182A14.5.1 (novel gene (isoform 1)),accession number AL137798,Smith-Waterman Score=94.
cccttgaagataaggatggtcaaacaaaataatatcatacctggagaaactcagatcttggtaagatttactggttgggaatccaaagttaatgccaagaagcagccgccagttgggatcaaatgtgagcctatggatcaagaatatgaagagtgcaaagacctcataaaatctatgctgaggaatgagcgacagttcaaggaggagaagcttgcagagcagctcaagcaagctgaggagctcagcatggtggtatcagccggcccttggtccagcgagaaggcagagatgaacattctagaaatcaacgagaaattgcgcccccagttggcagagaacaaacagcagttcggaaacctcaaagagagatgttttgtaactcaactggccggcttcctggccaaccagcagaagaaatacaactatgaagagtgtaaagacctcataaaatttatgctgaggaatgagcgacagttcaaggaggagaagcttgcagagcagctcaagcaagctgaggagctcaggcaatataaagtcctggttcactctcaggaacgagagctgacccagttaagggagaagttacgggaagggagagatgcctcccgctcattgaatgagcatctccaggccctcctcactctggatgagccggacaagtcccaggggcaggacctccaagaacagctggctgaggggtgtagactggcacagcaccttgtccaaaagctcagcccagaaaatgacgaagatgaggatgaagatgttcaagttgaggaggctgagaaagtgcagaaatcatctgcccccagggaggtgcagaagactgaagagagcaaagtccctgaggactcactggaggaatgtgccatcacttgttcaaatagccacggcccttgtgactccaaccagcctcacaagaacatcaaaatcacatttgaggaagacgaagtcaactcaactctggttgtagacagagaatcctctcatgatgaatgtcaggatgctctaaacattctcccagcctgcatgacagagtga

SEQ ID NO: 256 - DNA, 3615 bp, Homo sapiens
  SIMILAR (2824)..(3603): 851254mologous to Homo sapiens dJ1182A14.5.1 (novel gene (isoform 1)),accession number AL137798,Smith-Waterman Score=1106.
atgagtcagtcagtccaagataacctgaaggagttgaataacatctatccagatcacagctcctcgccagcaatggaacaaagcaggatggagaatgactttgatgagctgacagaagtaggcttcagaaagttggtaataacaaacttctctgagctaaaggaggatgtgcgaactcatcgcaaggaagctaaaaaccttgaaaaaagattagacgaatggccaaccagaatgaacagcgtagagaagaccttaaatgacctgatggagctgaaaaccatggcacgagaactacgtgatgcatgcacaagcttcagtagtcaattcgatcaagtgcaagaaacgcccttgaagataaggatggtcaaacaaaataatattatatctgcagaaagtcagatcttggtaagatttactagttgggaatccaatgttaatgccaagaagcagctgccagttgggatcaaatgtgagcctatggatcaagaatgcatccctggctcccgtgcgtgcacacttctagttaggtttagcaatggagggcccccgatggatcctggaagtgagaggaaggacctgctgcagctgggaggggagctggcccggacatcacgagctgtccaggaggcgggcctgggactgagcacgggcctgtggctggcagagagccgggccaaggcagccctggagaagcaggccctgctgcaggcccagctggaggagcagctgcgggacaagaaggacctggcccagcagcagatgcaaagtgacctggacaaggctgacctcagtgccagagtgacagagctgggcctggcagtgaagcgtcttcagaagcagaatccggagaaggatcaggtcaacacggacctcactgagaagcttgaggccctggtccagatgctgcctctggaatcccagctgcccatccccactagtgggacactcactcccccagggtacagcctggtttggtcacccctctgtgtggggcctggcctgggttctaggtccggctctcctccaatcgactgtgtgacctggggcaagaccgacagcaccatgcaggcccacgaggacgcccagcgcgaggtgcagcggctgcggagcgccaaagagctcctgagaaggctcagcggcatgctgatggaagtggaagagcctgaagtcttgcaggactcactggatagatgttattcgactccgtcaatgtactttgaactacctgactcattccagcactacagaagtgtgttttactcatttgaggaacagcacatcagcttcgcccttgacgtggacaataggtttcttactttgatgggaacaagtctccacctggtcttccagatgggagtcatattcccacacctcgcaccgccgggcaagctaggctcctcctgcacgcacgaaggaggattccacaggaacgaaccacgacccccaaggtttcgcagttggcatcttgggtctcccttggtgacagtacctgcaccctgcgggcagcctgcgctggctgtgaaccacactgccgcctacttcctcttctatgttcccgctctgtccacagtcccctctgaagactcccgtgaagcaggaattaaaaaggaccaagaagaggaagaagaccaaggcccaccatgccccaggctcagcagggagctgctggaggcagtagagcctgaagtcttgcaggactcactggatagatgttattcaactccttccagttgtcttgaacagcctgactcctgcctgccctatggaagttccttttatgcattggaggaaaaacatgttggcttttctcttgacgtgggaggttatcttgaactgactgactcatgccagccctacagaagtgccttttacatattggagcaacagcgtgttggctgggctcttgacatggatgaaattgaaaagtaccaagaagtggaagaagaccaagacccatcatgccccaggctcagcagggagctgctggatgagaaagagcctgaagtcttgcaggactcactggatagatgttattcgactccttcaggttatcttgaactgcctgacttaggccagccctacagaagtgctgtttactcattggaggaacagtaccttggcttggctcttgacgtggacagtgagtaccttactatgaagatgaggaaactgaagctcagagaagtgaagacactggtgcagggtcacacagctggtgaggggctgcccccaccccagagcctggagttgcagaggcagctacaggaggagcaggcctcctaccagcgcaagctgcaggcctacctggagggccagcagcggcaggcccagctttacaagaagaggtactcggagctggagcagcagctgctggagagatccggagagctggagcagcagcggctaagggacgcagagcacagccaagacctgcagagtgccctcatccggctggaggaggagccgcagaggtgggggcacaacagggagggccagggctggcagcatggccccctgggcgagcgcctactgatcccctttgccctattcaggagtgccagcctggcccaggtgaaagccatgctccgagaacatctggaccaggcaggctcggccaaccaggctctgagtgaggacatacaaaaggtgaccaatgactggacacgcagccgcaaggagctggagcaccgggaggcggcatggaggcgcgaggaggagtctttcaatgcctacttcagcaagaagcacaatcacctgctcctgctatggaggcaggtggtggggttccggcggctggtcagcgaggtgaagatgttcaccgagagcatggtggtatcagctggcccttggtccagcgagaaggcagagacgaacattttagaaatcaacgagaaattgcgcccccagctggcagagaacaaacagcagttcagaaacctcaaagagaaatgttttgtaactcaactggccggcttcctggccaaccgacagaagaaatacaagtatgaagagtgtaaagacctcataaaatttatgctgaggaatgagcgacagttcaaggaggagaagcttgcagagcagctcaagcaagctgaggagctcaggcaatataaagtcctggttcactctcaggaacgggagctgacccagttaagggagaagttacgggaagggagagatgcctcccgctcattgaatcagcatctccaggccctcctcactccggataagccagacaagtcccaggggcaggacctccaagaacagctggctgaggggtgtagactggcacagcaacttttccaaaagctcagcccagaaaatgacgaagatgaggatgaagatgttcaagttgaggaggctgagaaagtactggaatcatctgcccccagggaggtgcagaaggctgaagaaagcaaagtccctgaggactcactggaggaatgtgccatcacttgttcaaatagccacggcccttgtgactccaaccagcctcacaagaacatcaacatcacctttgaggaagacaaagtcaactcagctctggttgtagacagagaatcctctcatgatgaatgtcaggatgctgtaaacattctcccagtcagaaactag

SEQ ID NO: 257 - DNA, 1271 bp, Homo sapiens
  SIMILAR (51)..(464): 561254mologous to Homo sapiens dJ1182A14.5.1 (novel gene (isoform 1)),accession number AL137798,Smith-Waterman Score=365.
gtagaactagagtttcattcaacctacatgtgcctataggtcctccctgtggcaatgacatctctcagctcagtaatggccacttggagcaggaatatgatctttatatggaagactcagtggatccttatcaccttcatagaaagaaattgaaaagtaccaagaagtggaagaagaccaagacccatcatgccccaggtaactttgagcaattatggatgcttaattctgtgttgacacctggagatgccagggaggtgcagaaggctgaagagagcaaagtccctgaggactcactggaggaatgtgccatcacttgttcaaatagccacggcccttgtgactccaaccagcctcacaagaacatcaaaatcacatttgaggaagacgaagtcaactcaactctggttgtagacagagaatcctctcatgatgaatgtcaggatgctctaaacattctcccagaaattgaaaagtaccaagaagtggaagaagaccaagacccatcatgccccagggaggtgcagaaggctgaagagagcaaagtccctgaggactcactggaggaatgtgccatcacttgttcaaatagccacggcccttgtgactccaaccagcctcacaagaacatcaaaatcacatttgaggggtaccgagctcgaattcgtatcatgggagccttgggaggaccccgaatcactgatggaattgcgcagtgcatggagatggctcagcaggatgagggtcctgcctgcggcaatgacgtctctcgggtcagtaaggggcacttggaacaggaatatcacccctatctggaagaccaggtggaggcttatcaccttcacagtaaggtactcactgtccacgtcaagagccaagccaaggtaccttccatgggccctgacccctccttttcagaggctccaaagctcagcagggagctgctggatgagaaagggcctgaagtcttgcaggactcactggatagatgttattcaactccttcaggttgtcttgaactgactgactcatgccagccctacagaagtgccttttatgtattggagcaacagcatgttggcttggctgttgacatggatgatccccgacagtaccttggcttggctcttgacgtggacagtgagtaccttactgtgaaggtgataagcctccacgtggtcttccagataggggtgatattcctgttccaagtgccccttactgacccgagagacgtcattgccgcaggcaggacctatgggcgcatatag

SEQ ID NO: 258 - DNA, 493 bp, Homo sapiens
  SIMILAR (144)..(1): 871254mologous to Homo sapiens dJ1182A14.5.1 (novel gene (isoform 1)),accession number AL137798,Smith-Waterman Score=214.
  misc_feature (1)...(493): n = a,t,c or g
ttcaagncaccttgaagagttcgaatacantctatccagtgagtcctgcaagacttcaggccctttctcatccagcagctctctgctgagcctgggacctgttgcctcgtggtcctcctttttcacttgatcccaccgatgtcctgcaaataaattcagatgggccctcttacattaagcagttcttccttgcacacagaaacattcctctgtccaatcctaacacagggacatcagtcttgtcagtgtgagaacaggagactttgagagaaatattccagtaggcctgaggtcaagtcttgagaaaactggcttgggttctttcatgagccttgggcaaaattcccctgtgttggaatgttatcttccctatgtgctctgtcctaggtttatgtacacaaatgagcaattttttccccaataaattgtaggcaaatagttctaccccctcataggagagatacttcaatattaggcttttctcactcgtgcc

SEQ ID NO: 259 - DNA, 1236 bp, Homo sapiens
  SIMILAR (1)..(444): 981254mologous to Bacillus amyloliquefaciens precursor (AA - 29 to 443),accession number X52988,Smith-Waterman Score=786.
atgctgcagatccctaaacagcagcaaaacgaaaaataccaagtgcctcaattcgatcaatcaacgattaaaaatattgagtctgcaaaaggacttgatgtgtgggacagctggccgctgcaaaacgctgacggaacagtagctgaatacaacggctatcacgttgtgtttgctcttgcgggaagcccgaaagacgctgatgacacatcaatctacatgttttatcaaaaggtcggcgacaactcaatcgacagctggaaaaacgcgggccgtgtctttaaagacagcgataagttcgacgccaacgatccgatcctgaaagatcagacgcaagaatggtccggttctgcaacctttacatctgacggaaaaatccgtttattctacactgactattccggtaaacattacggcaaacaaagcctgacaacagcgcagatccactttccactcatttccatcctgtcttacgccacttggggcttgtcccttctagaatgcatccctggctcccctgtgtgcacacttctagttaggtttagcaatgtgggcacccgatggagcctggaagtgagaggaagggattttgccgatttcggaaccaccatcaaacaggattttcgcctgctggggcaaaccagcgtggaccgcttgctgcaactctctcagggccaggcggtgaagggcaatcagctgttgcccgtctcactggtgaaaagaaaaaccaccctggcgcccaatacgcaaaccgcctctccccgcgcgttggccgattcattaatgcagctggcacgacaggtttcccgactggaaagcgggcattgtcttgaacagcctgactcctgccagccctacggaagttccttttatgcattggaggaaaaacatgttggcttttctcttgacgtgggagggaaaaccttcctcaacatcacgccagctgaggttggtgtcctggttggcaaagactggtcaagctttgtcatgaatgggctgacactggggggccagaaatatactgtggtcctggactcactgctgcaggatggggaattgaccacggatctttgtatgaagagcatcggtggagcccccaccttcaacgtcattgtcaccatgactgccaagacgctaggcctgctgatgggcaaagaaggtatttgttttcagtccatcttcacctcccaccacagtgaatttactgtccgtgaaagggactgggtagctctcccctga

SEQ ID NO: 260 - DNA, 393 bp, Homo sapiens
  misc_feature (1)...(393): n = a,t,c or g
aagccttaaaactccggaggggggttggcccaatatgtcccccccccaaaataagggtccttttccaaaatccccaggttggttttaatagggccccctaaaaggaaaaaaatatttagttgcctgcccggggtaactttgggccccccaggggttctttaaaacggcccccccnnnnnnnnnnnnnngtgaataagttatacttctatttttcagaaacaaaaatgacaagtggcaacttgcctttgtaaaagattaaagagtatcagagtaataagctatctctcatagagacagaagcccgagaaccactattatacagctttcaaaggaagtcctattaaataaatctcacaataatatactttaactcaacaaaaccggacgcgtggg

SEQ ID NO: 261 - DNA, 2584 bp, Homo sapiens
  SIMILAR (434)..(1459): 981254mologous to Homo sapiens dJ1182A14.5.1 (novel gene (isoform 1)),accession number AL137798,Smith-Waterman Score=1745.
ctcgagatcgctaggccgtgtggaggaattccccacagaaatgtgattgataacagtaaagccacactactcaagtgcctgaaatacccctcattgtcttcttcaggtggcaagggctctggaacagccacataaagcccttgaagataaggatggtcaaacaaaataatatcatacctggagaaactcagatcttggtaagatttactggttgggaatccaaagttaatgccaagaagcagccgccagttgggatcaaatgtgagcctatggatcaagacggttacctggcacgctggccacaatctacctcactcttatcagagtctgcgctactgacagtgctttcagctctgagttgaggcacctcgaaccttgtttttgtggtgaaggatcctaaagtgctgtggggagtgatcacatttttgacaacatccctgactccacctcttctgccacaaacgtcagcatggtggtatcagccggccctttgtccagcgagaaggcagagatgaacattctagaaatcaacgagaaattgcatccccagctggcagagaagaaacagcagttcagaaacctcaaagagaaatgttttgtaactcaactggcctgcttcctggccaaccagcagaacaaatacaaaaatgaagagtgcaaagacctcataaaatctatgctgaggaatgagcgacagttcaaggaggagaagcttgcagagcagctcaagcaagctgaggagctcaggcaatataaagtcctggttcactctcaggaacgagagctgacccagttaagggagaagttacgggaagggagagatgcctcctgctcattgaatcagcatctccaggccctcctcactccggatgagccagacaagtcccaggggcaggacctccaagaacagctggctgaggggtgtagactggcacagcaccttgtccaaaagctcagcccagaaaatgacaacgatgacgatgaagatgttcaagttgaggtggctgagaaagtgcagaaatcgtctgcccccagggagatgccgaaggctgaagaaaaggaagtccctgaggactcactggaggaatgtgccatcacttgttcaaatagccatggcccttatgactccaaccagccacataggaaaaccaaaatcacatttgaggaagacaaagtcgactcaactctcattggctcatcctctcatgttgaatgggaggatgctgtacacattatcccagaaaatgaaagtgatgatgaggaagaggaagaaaaagggccagtgtctcccaggaatctgcaggagtctgaagaggaggaagtcccccaggagtcctgggatgaaggttattcgactctctcaattcctcctgaaatgttggcctcgtacaagtcttacagcggcacatttcactcattagaggaacagcaagtctgcatggctgttgacataggcggtgagtactccattgtgaaggtgataaagctccagttcatggcccagtctcaggccatgcccgtgccaacctggactgactgtcacgacattgaactcaaggcaggacatcggtgggatcaagtgaaaaaggaggaccaagaggcaacaggtcccaggctcagcagggagctgctggatgagaaagggcctgaagtcttgcaggactcactggatagatgttattcaactccttcaggttatcttgaactgactgactcatgccagccctacagaagtgccttttacatattggagcaacagcgtgttggctgggctcttgacatggatggatataggaggacgtgcccccgaagctgctccgtccctccaccccctgggatgccacagaacacccgccagcgagtttcttccccagcgcccacgagagttgggctgcgggcggcagcggcaggcgaagaatccagcgcggggaactcaggccccggcggtgcacgaccccccacagcccccacccgcccccgcgctcgcgcaacaaaacttgccacggccgcgcctcgacccagctgtgcgcccgcgggtcccggattcaccgcccgcccagcctggcgcggcgccctcacctcagaaacgctgggtggacttcgcgtaacttcccattcacagggcagccggcagccgcgccgccgcgcctcggcccagctcctggcgccgcagatcgcccgtcccgcgttcccaaaagcaccgcgctcgctcagaagctcgggcagcctcgcgaccctcacctacgcctcccagtaccgccgctgtctcaaccgccacccagcccctcgcctgcgcctgcgcctgcagcccactggctcctcaggatcccgatgggcgtgtcaggataacccaaggcgcaggcgcggcggggccttaaagggacccggcggcctcttctgcacaacgggttcgagcaggttaggggccgcgcaggcggaggaaaggagtaacccaggggaaggaccgagtgcagcggggacggggaaatccctctctcccctccgcctgtctttcaaagcaccagccctcgaccctccaaatcgctggtttccccggccacttgaacagcccctgccaggttga

SEQ ID NO: 262 - DNA, 2562 bp, Homo sapiens
  SIMILAR (2258)..(2539): 921254mologous to Homo sapiens HSPC308,accession number AF161426,Smith-Waterman Score=448.
agaaatcctctggggcattttctttgaactgatgggaacaataaggcataactgtttgcacaaacttgggataaatgattttgggataacgatctaccagaatagggatatttcacccttggttctgagatgcaaaccaaagaatatcatgaccagctttcaggcctcctgaagtatatccctcaaattgtcctgttctcatgctgaggagcctgagatccctgtgtggggattagacagtggactgttatgggtgtaggtgaattggcttattttgtctgtccctgcctgaatgtattgcaggaattaaaaaggaccaagaagaggaagaagaccaaggcccaccatgccccaggtaactgagcaattgtgaacagctacttctgtgttgacatctggagactcctggttcagggaaaacagagcgggctgacattatcgattacatcttttcaaccaagcctgaattattcctactaacattgctgttggttttcattgcagtagatatttaggtttccatttcttcctccccttatcatttactaacctactgtaggtggaccagacttcaaaaactgtattctcatggcgactgcatggaaacttgagcacattttatggaaaattattgagcacagtcttttcatgatccctgtatgctgtgtgtcctgagggcactaactcagagtgtcctgttactccctcatcagtgtgtcacctggacaattcactgagctcgttctctctctctgtgtgtgtgtgtgtgtgtgtgtgtgtgtgtgtgtctatctgtctttctctttcattcttttccatttggccctgttctgtcccaacatgaaggcaataatttgttacctcattaatggatctatccttttagttttttaaccacttccctatgctacccatgaaacctagttggggctctgttgtgtctgatttcccctggcttattctttactttttcctccttttccaggctcagcagggagctgctggaggtagtagagcctgaagtcttgcaggactcactggatagatgttattcaactccttccagttgtcttgaacagcctgactcctgccagccctatggaagttccttttatgcattggaggaaaaacatgttggcttttctcttgatgtgggagaaattgaaaagaaggggaaggggaagaaaagaaggggaagaagatcaacgaagaaaagaaggagaaggggaagaaaagaaggggaagaagatcaaaacccaccatgccccaggctcagcagggagctgctggatgagaaagggcctgaagtcttgcaggactcactggatagatgttattcaactccttcaggttatcttgaactgactgactcatgccagccctacagaagtgccttttacatattggagcaacagcgtgttggctgggctcttgacatggatgaaattgaaaagtaccaagaagtggaagaagaccaagacccatcatgccccaggtaactttgagcaattacggatgcttaattctgtgttgacacctggagatgccaggtccagggaaaacaagagtgtgttcaatttcatgttttcaacgaaggttgaattactcctactgacattgctgttggttttcattgcagtagatgtttaggtttccatttcttcctccccttatcatttactcacttactataggttgaccatacctcaaaggctgtatggcaactgcatggaatcttgagcaagtttatggaaaattattgagcccactcttttcatgatcactgttcgctgtgtgtcccgagggcactaactcagagtgtcctttgaccccttcatcagtgtgtcacccggccaattcgctgagctcactttctcctctctctctctctccctctccctgtctttctctttcattcttttctacctggccctggtctatcccaacataaaggcaataattcattacctcattaatggatctgtcctttttctttttgaacagttccttatgttagccatgaaatctagctggggctgtgtggtttctgattccccctggcttattctttactttttcctacttttccaggctcagcagggagctgctggatgagaaagagcctgaagtcttgcaggactcactggatagatgttattcgactccttcaggttatcttgaactgcctgacttaggccagccctacagcagtgctgtttactcattggaggaacagtaccttggcttggctcttgacgtggacagaattaaaaaggaccaagaagaggaagaagaccaaggcccaccatgccccaggctcagcagggagctcctggaggtagtagagcctgaagtcttgcaggactcactggatagatgttattcaactccttccagttgtcttgaacagcctgactcctgccagccctatggaagttccttttatgcattggaggaaaaacatgttggcttttctcttgacgtgggagaaattgaaaagaaggggaaggggaagaaaagaaggggaagaagatcaaaaaaaaaaaaaaaagggcggccgct

SEQ ID NO: 263 - DNA, 5261 bp, Homo sapiens
  SIMILAR (4167)..(4364): 931254mologous to Homo sapiens dJ1182A14.5.1 (novel gene (isoform 1)),accession number AL137798,Smith-Waterman Score=336.
ggatgagacagcggcggtactgggaggcgtaggtgagggtcgcgaggctgtccgagcttctgagcgagcgcggtgcttttgggaacgcgggacgggcgatctgcggcgccaggagctgggccgaggcgcggcggcgcggctgccggctgccctgtgaatgggaagttacgcgaagtccacccagcgtttctgaggcaatctgaaggcaaatcctgtttagacccaggcgaaggttcccggtgacccgggctctcaccagccaattgtcccttgccgtcctcctgagggtgcctggagcttaagcactgtgtgctcttggcctccacactggggatgccgctgactcccactgtccagggcttccagtggattctccgaggccctgatgtagaaacttccccattgggtgcaccaagagcaggctcacatggtgtgggctgacatcaagagctgccagatccaacaggaccttgtggtggacgccttctttcactgaccattcatggggtgactattaggtaccatgccctgctctgggctagaggccccataatgagtaaatctcaggtcctgggggagtgggagccagtgcaaggagggaagtccagtgagaatgacaaatggacgatgtcagacccaggggctgaggcccccacctgcagccgggcagcttctggagtggacaaggagcagcagggaaggtggcaagggctctggaacagccacataaagcccttgaagataaggatggtcaaacaaaataatatcatacctggagaaactcagatcttgctaagatttactggttgggaatccaaagttaatgccaagaagcagctgccagttgggatcaaatgtgagcctatggatcaagaaaatgagcaaacaggtggccatgaaacagatggtcatagaattgtttcagtgcttatccactttccactcatttccatcctgtcttacgccacttggggcttgtcccttctagaatgcatccctggctcccctgtgtgcacacttctagttaggtttagcaatgtgggcacccgatggagcctggaagtgagaggaagcccatgtggttttggcagcaataaggtgtgtggggtaatgactcctgaaattaaaatggtgtgtgtatgtgaaggaaaggcgggcaaagctgtggggagcggtggagtggaaggaacaaaggaggtcagtactgggaacgctgaaggtcccgtccgccacgaggctgtagatggaggtgtccacctggcctttgcgttgctgcaggggctcctctggtcgctgctgctggggccgcctgggctggcgggttggggaggcggagagctcgatgcagtccctgactccacctcttctgccacaaacgtcagcatggtggtatcagccggcccttggtccagcgagaaggcagagatgaacattctagaaatcaacgagaaattgcgcccccagttggcagagaacaaacagcagttcagaaacctcaaagagagatgttttctaactcaactggccggcttcctggccaaccgacagaagaaatacaagtatgaagagtgtaaagacctcataaaatttatgctgaggaatgagcgacagttcaaggaggagaagcttgcagagcagctgaagcaagctgaggagctcaggcaatataaagtcctggttcactctcaggaacgagagctgacccagttaagggagaagttacgggaagggagagatgcctcccgctcattgaatgagcatctccaggccctcctcactccggatgagccggacaagtcccaggggcaggacctccaagaacagctggctgaggggtgtagactggcacagcaccttgtccaaaagctcagcccagaaaatgacgaagatgaggatgaagatgttcaagttgaggaggatgagaaagtactggaatcatctgcccccagggaggtgcagaaggctgaagagagcaaagtccctgaggactcactggaggaatgtgccatcacttgttcaaatagccacggcccttgtgactccatccagcctcacaagaacatcaaaatcacatttgaggaagacaaagtcaactcatctctggttgtagacagagaatcctctcatgatggatgtcaggatgctctaaacattctcccagtccctggccccacctcttctgccacaaacgtcagcatggtggtatcagccggccctttgtccagcgagaaggcagagatgaacattctagaaatcaatgagaaattgtgcccccagctggcagagaagaaacagcagttcagaagcctcaaagagaaatgttttgtaactcaagtggcctgcttcctggccaagcagcagaacaaatacaaatatgaagagtgcaaagacctcataaaatctatgctgaggaatgagcgacagttcaaggaggagaagcttgcagagcagctgaagcaagctgaggagctcaggcaatataaagtcctggttcactctcaggaacgagagctgacccagttaagggagaagttacgggaagggagagatgcctcccgctcattgaatgagcatctccaggccctcctcactccggatgagccggacaagtcccaggggcaggacctccaagaacagctggctgaggggtgtagactggcacagcaccttgtccaaaagctcagcccagaaaatgataacgatgacgatgaagatgttcaagttgaggtggctgagaaagtgcagaaatcatctgcccccagggagatgcagaaggctgaagaaaaggaagtccctgaggactcactggaggaatgtgccatcacttattcaaatagccatggctcttatgactccaaccagccacataggaaaaccaaaatcacatttgaggaagacaaagtcgactcaactctcattggctcatcctctcatgttgaatgggaggatgctgtacacattattccagaaaatgaaagtgatgatgaggaagaggaagaaaaagggccagtgtctcccaggaatctgcaggagtctgaagaggaggaagtcccccaggagtcctgggatgaaggttattcgactctctcaattcctcctgaaatgttggcctcgtaccagtcttacagcagcacatttcactcattagaggaacagcaagtctgcatggctgttgacataggcagtgagtactccattgtgaaggtgataaagctccagttcatggcccaggccagtgtcacccttgtctacctctcagtgaaagatgtgacccaggtttcactgaatttattcccattttctgtgtcttctaagttcgcttgttttagctcatctgtccgtcatgttcctggacatcggtgggatcaagtgaaaaaggaggaccaagaggcaacaggtcccagcagggagctgctggatgagaaagggcctgaagtcttgcaggactcacaggatagatgttattcaactccttcaggttgtcttgaactgactgactcatgccagccctacagaagtgccttttacatattggagcaacagcgtgttggcttggctattgacatggatgaaattgaaaagtaccaagaagtggaagaagaccaagacccatcatgccccaggctcagcagggagctgctggatgagaaagagcctgaagtcttgcaggactcactggatagatgttattcgactccttcaggttatcttgaactgcctgacttaggccagccctacagcagtgctgtttactcattggaggaacagtaccttggcttggctcttgacgtggacagaattaaaaaggaccaagaagaggaagaagacgaagaccaagacccactcatgccccaggctcagcagggagctgctggaggtagtagagcctgaagtcttgcaggactcactggatagatgttattcaactccttccagttgtcttgaacagcctgactcctgccagccctatggaagttccttttatgcattggaggaaaaacatgttggcttttctcttgacgtgggagaaattgaaaagaaggggaaggggaagaaaagaaggggaagaagatcaatgaagaaaagaaggagaaggggaagaaaagaaggggaagaagatcaaaacccaccatgccccaggctcagcagggagctgctggatgagaaaagggcctgaagtcttgcaggactcactggatagatgttattcaactccttcaggttgtcttgaactgactgactcatgccagccctacagaagtgccttttatgtattggagcaacagcgtgttggcttcgcttttgacatggatgaaattgaaaagtaccaagaagtggaagaagaccaagacccatcatgccccaggctcagcagggagctgctggcgtgagaaagagcctgaagtcttgcaggactcactggatagatgttattcgattccttcaggttatcttgagctgcctgacttaggccagccctacagcagtgctgtttactcattggaggaacagtaccttggcttggctcttgacgtggacagaattaaaaaggacgaagaagaggaagaagaccaagacccaccatgccccaggctcagcagggagctgctggaggtagtagagcctgaagtcttgcaggactcactggatagatgttattcaactccttccagttgtcttgaacagcctgactcctgccagccctatggaagttcctttttatgcattggaggaaaaacatgttggcttttctcttgacgtgggagaaattgaaaagaaggggaaggggaagaaaagaaggggaagaagatcaaagaaggaaagaagagggggacgaaaagaaggggaagaagaggaaaacccaccatgccccaggctcagcagggagctgctggatgagaaagggcctgaagtcttgcaggactcactggatagatgatattccactccttcagggtggcttgaactgactgactcatgccagccctacagaagtgccttttatgtattggagcaacagcatgttggcttggctcttgacgtggacagtgagtaccttactgtgaaggtgataagcctacacctggtcttacagataggggtgatattcctgttccaagtgccccttactgacccgagagacgtcattgccgcaggcaggacctatgggcgcatataggttgtaatgaaactgtagtctcagttggaagcctatacatgaaatgggtcagtgagcaagggtctattcctagtctccagcc

SEQ ID NO: 264 - DNA, 4805 bp, Homo sapiens
  SIMILAR (532)..(1521): 911254mologous to Homo sapiens dJ1182A14.5.1 (novel gene (isoform 1)),accession number AL137798,Smith-Waterman Score=1549.
atggataagcctcgcccagggaaaaccaccttcgtgatcatggtatctcccctgccagccccatatacctcaccctttacacacatggtcacttgccccgcgcacccccgagccttcctagccctgacacacagctgggaccctcaggtccgaccagcggtcctgaacccgctcccacggcacgggagctccttcgtggtgaaacagccagtggcgaagcagcagcccctgcgctgcctcatctacatagaagtcgccctatccgtgatgtcaccgacagcgccttcctcgtcccgaagcccctggaaacgccccggtctgcgacccgggttcgagcagccagggggctcaagggaagctgaacgcctggtgggctcccgggatggctcttcccgttctttgcacagccttcacccagtgagggagcctgtgccctccctgctcagtcgcattcggggcgctgcggagcttccgctgccttcttcggatcctgcgttcggcaccggggctccaccagggcagggatcgtggcaatataaagtcctggttcacgctcaggaacgagagctgacccagttaagggagaagttgcgggaagggagagatgcctcccgctcattgaatgagcatctccaggccctcctcactccggatgagccggacaagtcccaggggcaggacctccaagaacagctggctgaggggtgtagactggcacagcaccttgtccaaaagctcagcccagaaaatgacaacgatgacgatgaagatgtttcaaagttgaggtggctgagaaagtgccaaaaatcgtctgcccccagggagatgcagaaggctgaagaaaaggaagtccctgaggactcactggaggaatgtgccatcacttgttcaaatagccatggcccttatgactccaaccagccacataagaaaaccaaaatcacatttgaggaagacaaagtcgactcaactctcattggctcatcctctcatgttgaatgggaggatgctgtacacattattccagaaaatgaaagtgatgatgaggaagaggaagaaaaagggccagtgtctcccaggaatctgcaggagtctgaagaggaggaagtcccccaggagtcctgggatgaaggttattcgactctctcaattcctcctgaaatgttggcctcgtacaagtcttacagcagcacatttcactcattagaggaacagcaagtctgcatggctgttgacataggcagacatcggtgggatcaagtgaaaaaggaggaccaagaggcaacaggtcacaggctcagcagagagctgctggatgagaaagggcctgaagtcttgcaggactcactggatagatggtattcaactccttcagggtgcccttgactgactgattattgccaaccctacagaagtgcctttttacattattggagccaacagcgtattggcttggctgttgacatggatgaaattgaaaagtaccaagaagtggaagaagaccaagacccatcatgccccaggctcagcagggagctgctggatgagaaagagcctgaagtcttgcaggactcactggatagatgttattcgactccttcaggttatcttgaactgcctgacttaggccagccctacagcagtgctgtttactcattggaggaacagtaccttggcttggctcttgacgtggacagaactaaaaaggaccaagaagaggaagaagaccaaggcccaccatgccccaggctcagcagggagctgctggaggtagtagagcctgaagtcttgcaggactcactggatagatgttattcaactccttccagttgtcttgaacagcctgactcctgccagccctatggaagttccttttatgcattggaggaaaaacatgttggcttttctcttgacgtgggagaaattgaaaagaaggggaaggggaagaaaagaaggggaagaagatcaaagaagaaaagaagaaggggaagaaaagaaggggaagaagatcaaaacccaccatgccccaggctcagcagggagctgctggctgagaaagagcctgaagtcttgcaggactcactggatagatggtattcgactccttcagtttatcttggactgactgacccatgccagccctacagaagtgccttttacgtattggagcaacagcgtgttggcttggctgttgacatggatgaaattgaaaagtaccaagaagtggaagaagaccaagacccatcatgccccaggctcagcagggagctgctggctgagaaagagcctgaagtcttgcaggactcactggatagatggtattcgactccttcagtttatcttggactgactgacccatgccagccctacagaagtgccttttacgtattggagcaacagcgtgttggcttggctgttgacatggatgaaattgaaaagtaccaagaagtggaagaagaccaagacccatcatgccccaggctcagcagggagctgctggatgagaaagagcctgaaagtcttgcaggactcactgggtagatgttattcgactccttcaggttatcttgaactgcctgacttaggccagccctacagcagtgctgtttactcattggaggaacagtaccttggcttggctcttgacgtggacagaattaaaaaggaccaagaagaggaaagcaagaccaaggcccaccgtgccccagggctcagcagggagctgctggaggtagtagagcctgaagtcttgcagggactcactggatagatgttattcaactccttccagttgtcttgaacagcctgactcctgccagccctacggaagttccttttatgcattggaggtaaaaacatgttgggcttttctcttgacgtgggaggaaattgaaaagaaggggaaggggaagaaaagaaggggaagaagatcaacgaagaaaagaaggagaaggggaagaaaagaaggggaagaagatcaaaacccaccatgccccaggctcagcggtgtgctgatggaagtggaagagcctgaaatcttgcaggactcactgggatagatattattcgactccatcaatgtactttgaactacctgactcattccagcactagagaagtgtgttttactcatttgaggaacagcacatcagctttgcccttgacatggacaataggttttttactttgacggtgacaagtctccacctggtcttccagatgggagtcatattcccacaataagcagcccgtactaagccgagaggtgtcattcctgcaggcaggacctataggcacctgaagattttgaatgaaactatagttccatttggaagcccagacataggatgggtcagtgggcatggctctattcctattctcagagcatgtccagtggcaacctgtgctcagtctgaagacaatggacccacgttaggtgtgacacgttcacataactgtgtcagcacatgccgggagtgyatcagtcggtacattttaatttgaaccacgtatctctgggtagctacaaaattcctcagggatttcattttgcaggcatgtctctgagcttctatacctgctcaaggtcagtgtcatctttgtgtttagctcatccaaaggtgttaccctgggtttcaatgaacctaacctcattctttgtgtctttcagtgttgggcttgttttaggctgatccatctgttaacacagggaggggatccttgggctgagggattgtatttcaggaaccaccaactgctctttggacaattgtttaacccgctagggctcctttgggttagaggaaggccacagtccttcagcctccaattggtgtcagtacttaggaagaccacagctagatggacaaacagcattgggaggccttagccctgctcctctcaattccatcctgtagagaacaggagtcaggagccgctggcaggagacagcatgtcacccaggactctgccggtgcagaatatgaacaatgccatgttcttgcagaaaacgcttagcctgagtttcataggaggtaatcaccagacaactgcagaatgtagaacactgagcaggacaactgacctgtctccttcacatagtccatatcaccacaaatcacacaacaaaaaggagaaagagatattttggggttcaaaaaaaagtaaaaagataatatagctgcatttctttagttattttgaaccccaaatatttcctcatctttttgttgttgtcatggatggtggtgacatggacttgtttatagaagacaggtcagctgtctggctcaatgatctacatttctgaagttgtctgaaaatgtcttcatgattaaattcagcctaaacgttttgccaggaacactgcagagacaatgctgtgagtttccaacctcagcccatctgcgggcagagaaggtctagtttgtccatcaccgttatgatatcaggactggttacttggttaaggaggggtctaggagatctgtcccttttagagacaccttacttacaatgaagtacttgggaaagcggttttcaagagtataaatatcctgtattctaatgatcatcctctaaacattttatcatttattaatcctccctgcctgtgtctattattatatacatatctctacgctgcaaattttgggtctcaatttttactgtgcctttgtttttactagtgtctgctgttgcaaaaagaagaaaacattctctgcctgagttttaatttttgtccaaagttaattttaatctatacaattaaaaccttttgcctatcaaaaaaaaaaaaaaaaaaa

SEQ ID NO: 265 - DNA, 458 bp, Homo sapiens
ataatttgctcaggagtcaaagtgataaactagtttaatgaattaaagcatggttttccatgacaatttttaattacatcctttgccaagacctctagaaaattacacctgctgagcagatatcccaaggagcatgtgctattttaagatccccttggttttctttgacagaagagaaatcagcaggaggacgactgatgagcgtgctggaactggagaagaggaggccccgccccaccgctccgggagctgctcatcagccgcaacttcctgccgaccctgatgcgggtgggccgagcagtgtggacatcagccgctttttatattcatgtacattcacctggggaaaaaaacggagggactttgctacttgtaaaaataacataataaatagatcttaaacataggaaaaccatactgttctgataataaaatgctttctatgaaataaaaaaaaa

SEQ ID NO: 266 - DNA, 2663 bp, Homo sapiens
  SIMILAR (1336)..(1686): 761254mologous to Homo sapiens HT-1080 protein,accession number U27112,Smith-Waterman Score=437.
tttctgttctgtgcttttattttacgaaaaagctaatggcaaatctaccattaaactaagttgaataccaaagtcttagtgaagaagggcctggtggtctcgtttacaaaaaatggccagtgtcatatttgggcttaaaatttcaagaagggcacttcaaatggctttgcatttgcatgtttcaagcgctagagcgtaggaatagaccctggcgtccactgtgagatgttcttcagctaccagagcatcaagtctctgcagcaggtcattcttgggtaaagaaatgacttccacaaactctccatcccctggctttggcttcggccttgcgttttcggcatcatctccgttaatggtgactgtcacgatgtgtatagtacagtttgacaagcctgggtccataccagaccgctggagaacattcggcaaatgtcccctttgtagccaagtttcttcttcaagctcccggagagcagctgctttctggggttttaaccaatcatctatgagaccctgcagggaactctatgcaagtagcccccccattggtgggtcgggaacttttttcaccagaaaggttaccactcatagtgaaagtgttcttctgcagcacggggattgaccgcgacaccattcggcagtctgctctttcctggttgtacgtttcactgattcccaagttctagttttaccagtaggatccatgtacggttgttttttcaagcttgacccattttccttcatgaaattaactcctctgaaatgatatactgtttgccattctgagaagattccgttggttcttggctctccattttcaaacggagtctttacagccctcaggtgagaagttcacctccaaggtgtaggggtgaagaacggaagaggacgaaatatctagctggaggcagcagtgtcagccgatgccggtgccgcggctcgaaacaccggcgcctctcgcggtgctaaaaggatgggcgcgcaccctccttccggcatccgtagaacccccgcctttgacctagcttcaggagattactttccgggtcagcgtgcgtttagggcgaagacggagttgtaaacttcttaaaattcctctctcgacacttcggtaattcctctttcgagactaaagctctttttgtatgcgtgtgtgtcaagcgtatgccccgggattctcctccgcttccttttctcggtcttccttcttgctttagggaccggaagagtccttgaaccaaaatagctcggcgggcacttccggggccggcgcccagagttccgggagggtgcaggcaggagagggaaaggcagcagcggcggcagctgtgacggatgaagaaggagcatgtgcttcactgccagttctccgcgtggtacccgttcttccgaggcgttaccatcaagagtgtcattcttccacttcctcagaatgtgaaggattatttactcgatgatggaactctggtggtttcaggaagggatgatccaccaacacattctcagccagacagtgatgatgaagcagaagaaatacagtggtctgatgatgagaacacaagccacgcttaccggcaccagaatttccctgaagtttgccacttaaagtccagggaagctatcaaattcccctcggggggcaagtgtcttttcctaaggtttaatttgggagttgccccaagggattgcgtattggatagcaatgaatagttctctgaaatgtaaaaccctcagcgacatctttctgcttttcaagagttccgatttcatcactcgtgacttcactcagccgtttattcattgtactgatgattctccagatcccatgtatagaatatgagctcgttctcgaaaaatggtgtgaaatgattcctgggggttgagtttcgatgttttgtcaaggaaaacaagcttattggtatttctcaaagagactacacacaatactatgatcatatttctaaacaaaaaggaagaaattcgcagatgcatacaagactttttcaaagaaacacataccagtacaaattctttagatgaaagatttggtgttcgatatatacagaggacagtaggggggaaggtgtggctcattgacttttaatccatttggtgaagtcacagattcactgctgttcacctgggaagaactgataatctgagaacaactttaaacggcgatttttagtgaaagttgacgctcaagagcaggattcccccagcttttccgttgcacaaaccagtgaagtgacagtccagccccagcccctaatttgcagttaccggcttacccaaggactttgtagacctctcctactggggaggacgctcacaagctaatagacttccttaagctgaagagaaatcagccggagggccgctgattgagcgtgctggagctggagaagaggaggccccgcccctaccgctccgggagctgctcatcagccgcaacttcctgctgaccctgatgcgggtgggccgagcagtgtggacatcagccactttttatattcatgtacattcaccctggggaaaaaaaacggagggactttgctacttgtaaaaataacataataaatagatcttaaacataggaaaaccatactgttctgataataaaaagctttctatgaaataaaaaaaaaaaaaaaaaaaaacgt

SEQ ID NO: 267 - DNA, 1209 bp, Homo sapiens
  SIMILAR (155)..(652): 401254mologous to Homo sapiens Sequence encoded by clone 34,accession number AAR05882,Smith-Waterman Score=180.
cccccccgagcgccgctccggctgcaccgcgctcgctccgagtttcagggctcgtgctaagctagcgccgtcgtcgtctcccttcagtcgccatcatgattatcctaccgggaccctcatcaagccacgatgagatgtttctccgacatctacaaagatccggggagatcgcggacggggtttgtgcctggaaggtggaaggggaagatgggtcagtaggacagaaaggtaccattgattgactcgctcattggtggcaaatgccctccgctgaaagcccccgaggggcgaagggtaccgaaaggcacaagtaatccactggtgttcgatattgtcatgaaccatcacctgccaggaaacaagttttcacaaaaggaggcctccaagaaggtacatcaaaggattaccatgaaatcaatccaaagggaaaccttgaaagaacaggagaccaagaaagagtaaaacctttttatgacagggcgctgcagaacaaatcaagcacatccttgctaatttcaaaaaactacagttttctttattggtgaaaacatgaatcccagatgggcatgggtgcttctattggactacgtgaagggatggtgtgccccccatatatgattttctttaaagaatggttttagaaatggaaaaaatgttaacaaatgtggcaattattttggatctatcaccctgtcatccataactgggcttctgccttgtcatcccacacaaccacccgggacttaggaccaaatgggactgatgtcatcttggagctcttcatttattttgactgtggatttatttgggagtggaggcattgtttttaaggaaaaacatgtccatgtaaggttgtctaaaaataaaatgcatttaaactcatttgagagaatgccttttagtttaatgcatatttaaactaaattgatcctgtagtgttcctggagaagctagagcctgattgtagggttctacttcaccaattaacttctacagtggagactacttctgggactggaatataaaaaagaatcaaaggttctgattttgagttgcaataaagggaaagaccatgctcatagcagtgccaacatctgaagtgtggagccttacccatttcatcacctacaacggaagtagttaactggaagtgattaccaagagaataaaaagagactcattcagtggaagcaaaaaaaaaaaaaaaaa

SEQ ID NO: 268 - DNA, 636 bp, Homo sapiens
  SIMILAR (124)..(534): 341254mologous to Homo sapiens nuclear autoantigen,accession number M60618,Smith-Waterman Score=162.
atgaaaaatagaagcagaaacaaaggaaatgtggaatggcaagcagaagggataagaagtaaaagaagcgtgggaaagcaaaggccaagcaaggcaaagattccctctggggacaagaatggagtatcactaacccacaatgaagtgatcaataatgacaaccctttagaatcaaatgatgaaaaggagggccaagaagccacttgctcacgaccccagattgtaccaggtttcagcagtagtgacttttcagacctgagtaatggagaagagcttcaggaaacctgcagctcatccctaagaagagggtcagtgcctagggaactcgaggctctccaagtaaaaaaggagagagggtcagaagagatgcccagcagactgccacatggtagacaaggagcccagcctctggttgctttcaaatttgtgaaggaaacaagcaggatgaggcatgtgatgtgcgcgggctgcaacactgtgagaggcactcactggcaggaccccgagagtacatgccctaagtcttccaggcaggagagaaaggagaggcgaacgcctccctggagcatggcaccctgggtggagaagctgaggagcgcgagtatagaagaggtggatgattgggccatggaatag

SEQ ID NO: 269 - DNA, 683 bp, Homo sapiens
  misc_feature (1)...(683): n = a,t,c or g
tattatgtaaacatttaggtgggattccagattcagatttgaaacttaaaacctgaaaggcccattgagaaggccagtatctggcattatcattcatgtaatctctctaccattataccagaagtgctccaagaatgagaaaaaaataccatggaggcaaatggaaatggttaaaatgtaccatctgccaataaccctccattgggactcttaaaaaatattgtgttttaacggtattccttctttcctgttttagggatttgagcctccttgattttaatagagaacttctagtgtatggatttaaagatttctctttttcattcatataccattttatgagttctgtataattttttgtggtttttgttttgttgagttaaagtatattattgtgagatttatttaataggacttcctttgaaagctgtataatagtgtttctcgggcttctgtctctatgagagatagcttattactctgatactctttaatcttttacaacaggcaagttgccacttgtcatttttgtttctgaaaaataaaagtataacttattcacnnnnnnnnnnnnnnnnggggcgcccgttttaaaggatccttgggggggcccaagtttacccgggcttgcaaggaaatatttttttccttatagggggccgaattataccctacctggggat

SEQ ID NO: 270 - DNA, 168 bp, Homo sapiens
  SIMILAR (3)..(98): 871254mologous to Homo sapiens nuclear autoantigen,accession number M60618,Smith-Waterman Score=153.
agtcctgcgaacaaattgctgtccaagtgaataatggggatgctggaagggagatgccctgcccgttgccctgtgatgaagaaatcatcagcagtgaggactctgaaggatccactgacgttgatgagcccttagaagtcttcatctcagcaccgagaagtgagcctg

SEQ ID NO: 271 - DNA, 249 bp, Homo sapiens
  SIMILAR (69)..(164): 1001254mologous to Homo sapiens nuclear autoantigen,accession number M60618,Smith-Waterman Score=161.
aatattattctgacttggttcccttatcatacattgagagctccaaaggacatttgctcctttctgcagtgataggacaagaccacgacttttcagaatccagtgaggaggaggcgcccgcagaagcctcgagcggggcactgagaagcaagcatggtgagaagggtttcagcagtagtgacttttcagacctgagtaatggagaagagcttcaggaaacctgcagctcatccctaagaagagggtcag

SEQ ID NO: 272 - DNA, 2671 bp, Homo sapiens
  SIMILAR (32)..(2668): 1001254mologous to Homo sapiens SP100-HMG nuclear autoantigen,accession number AF056322,Smith-Waterman Score=4639.
ctgaggcccacgcagggcctagggtgggaagatggcaggtgggggcggcgacctgagcaccaggaggctgaatgaatgtatttcaccagtagcaaatgagatgaaccatcttcctgcacacagccacgatttgcaaaggatgttcacggaagaccagggtgtagatgacaggctgctctatgacattgtattcaagcacttcaaaagaaataaggtggagatttcaaatgcaataaaaaagacatttccattcctcgagggcctccgtgatcgtgatctcatcacaaataaaatgtttgaagattctcaagattcttgtagaaacctggtccctgtacagagagtggtgtacaatgttcttagtgaactggagaagacatttaacctgccagttctggaagcactgttcagcgatgtcaacatgcaggaataccccgatttaattcacatttataaaggctttgaaaatgtaatccatgacaaattgcctctccaagaaagtgaagaagaagagagggaggagaggtctggcctccaactaagtcttgaacaaggaactggtgaaaactcttttcgaagcctgacttggccaccttcgggttccccatctcatgctggtacaaccccacctgaaaatggactctcagagcacccctgtgaaacagaacagataaatgcaaagagaaaagatacaaccagtgacaaagatgattcgctaggaagccaacaaacaaatgaacaatgtgctcaaaaggctgagccaacagagtcctgcgaacaaattgctgtccaagtgaataatggggatgctggaagggagatgccctgcccgttgccctgtgatgaagaaagcccagaggcagagctacacaaccatggaatccaaattaattcctgttctgtgcgactggtggatataaaaaaggaaaagccattttctaattcaaaagttgagtgccaagcccaagcaagaactcatcataaccaggcatctgacataatagtcatcagcagtgaggactctgaaggatccactgacgttgatgagcccttagaagtcttcatctcagcaccgagaagtgagcctgtgatcaataatgacaaccctttagaatcaaatgatgaaaaggagggccaagaagccacttgctcacgaccccagattgtaccagagcccatggatttcagaaaattatctacattcagagaaagttttaagaaaagagtgataggacaagaccacgacttttcagaatccagtgaggaggaggcgcccgcagaagcctcaagcggggcactgagaagcaagcatggtgagaaggctcctatgacttctagaagtacatctacttggagaatacccagcaggaagagacgtttcagcagtagtgacttttcagacctgagtaatggagaagagcttcaggaaacctgcagctcatccctaagaagagggtcaggatcacagccacaagaacctgaaaataagaagtgctcctgtgtcatgtgttttccaaaaggtgtgccaagaagccaagaagcaaggactgaaagtagtcaagcatctgacatgatggataccatggatgttgaaaacaattctactttggaaaaacacagtgggaaaagaagaaaaaagagaaggcatagatctaaagtaaatggtctccaaagagggagaaagaaagacagacctagaaaacatttaactctgaataacaaagtccaaaagaaaagatggcaacaaagaggaagaaaagccaacactagacctttgaaaagaagaagaaaaagaggtccaagaattcccaaagatgaaaatattaattttaaacaatctgaacttcctgtgacctgtggtgaggtgaagggcactctatataaggagcgattcaaacaaggaacctcaaagaagtgtatacagagtgaggataaaaagtggttcactcccagggaatttgaaattgaaggagaccgcggagcatccaagaactggaagctaagtatacgctgcggtggatataccctgaaagtcctgatggagaacaaatttctgccagaaccaccaagcacaagaaaaaagagaatactggaatctcacaacaataccttagttgacccttgtgaggagcataagaagaagaacccagatgcttcagtcaagttctcagagtttttaaagaagtgctcagagacatggaagaccatttttgctaaagagaaaggaaaatttgaagatatggcaaaggcggacaaggcccattatgaaagagaaatgaaaacctatatccctcctaaaggggagaaaaaaaagaagttcaaggatcccaatgcacccaagaggcctcctttggcctttttcctgttctgctctgagtatcgcccaaaaatcaaaggagaacatcctggcctgtccattgatgatgttgtgaagaaactggcagggatgtggaataacaccgctgcagctgacaagcagttttatgaaaagaaggctgcaaagctgaaggaaaaatacaaaaaggatattgctgcatatcgagctaaaggaaagcctaattcagcaaaaaagagagttgtcaaggctgaaaaaagcaagaaaaagaaggaagaggaagaagatgaagaggatgaacaagaggaggaaaatgaagaagatgatgataaataa

SEQ ID NO: 273 - DNA, 2066 bp, Homo sapiens
  SIMILAR (432)..(1418): 471254mologous to Homo sapiens SP100-B,accession number U36501,Smith-Waterman Score=519.
  misc_feature (1)...(2066): n = a,t,c or g
cgacttcctgcttggggcctgggcagccacactgcacgcaggctgggccgactgaggggctcagaggccaggctctgaggcccacgcagggcctagggtgggaagatggcaggtgggggcggcgacctgagcaccaggaggctgaatgaatgtatttcaccagtagcaaatgagatgaaccatcttcctgcacacagccacgatttgcaaaggatgttcacggaagaccagggtgtagatgacaggctgctctatgacattgtattcaagcactttcaaaggaaataaggtggagatttcaaatgcaataaaaaagacatttccattcctcgagggcctccgtgatcgtgatctcatcacaaataaaatgtttgaagattctcaagattcttgtagaaacctggtccctgtacagagagtggtgtacaattgttcttagtgaactggagaagacatttaacctgccagttctggaagcactgttcagcgatgtcaacatgcaggaataccccgattttaaattccacatttataaaggctttgaaaaatgtaatcccatgacaaattgccctctccaaggaaagtggaagaagaagagaagggaaggagaggtctgggcctcccaactaagtctttgaacaagggaactggtgaaaactcttttcgaaagcctgactttgggccaccttccgggtttccccatcctccatgcctgggtacaaccccacctgaaaaatgggactctcagagcacccctgtgaaacagaacagataaatgcaaagagaaaagatacaaccagtgacaaagatgattcgctaggaagccaacaaacaaatgaacaatgtgctcaaaaggctgagccaacagagtcctgcgaacaaattgctggtccaagtgaatattgggggatgctggaagggagatgccctgcccggttgccctgtgatgaaggaaagccccagaggcaagagcttacacaaccattggaatcccaaatttaattccctggttctgtgcgaactggtggatataaaaaaggaaaagccattttctaattcaaaagttgagtggccaagcccaagcaagaactcatcataaccaggcatctgacataatagtcatcagcagtgaggactctgaaggatccactgacgttgatgagcccttagaagtcttcatctcagcaccgagaagtgagcctgtgatcaataatgacaaccctttaagaatcaaatgatgaaaaggagggcccaagaagccacttgctcacgaccccagattgtaccagagctcattgattttcagaaaattatttaccattcagagaaagttttagaaaaagagtgataggaaaaagacccacgacttttcagaatcccagtgaggaggaggcgccccgcaggaagcctcgagcgggggcactgaggaagcaaggcatggtgagaaggctcctattgacttctaggaagtacatcttacttgggaggaataccccagcagggaaggagacgtttccagcagtaagtgacttttcagaccctgagtaaatgggagaaagagctttcnaggaaacctgccagctcatcccctaagaagggggctcggttaaagaagattaggattgccaagaacttgggcctgccagaatgttcagggaatgtggaattaaaaagctgcctgtttcccgaccgctttttattctgagcaacgttacactaccttgtatccagtccaatctgggaactcctttttgcattttagaaaatggaaagaggcaggaaattatggataaacctcatgtttaacagaaagagtttcactgacctaaatgtatgtaattatattttgttgttgtagaagaaataaatagcaaatttgtggtattcttttttttaaacctcgctctcattgcctattaaccctatagatcttagattctttatagtgataaatggggttgacatccaattgtcatttgtgaatgtgtaaaagcctcaaaaagacaacatgtttcctactagtgtaaattatagacagaaataaaaacttcagatcaaacactctc

SEQ ID NO: 274 - DNA, 417 bp, Homo sapiens
  SIMILAR (3)..(245): 691254mologous to Homo sapiens hqp0376 protein,accession number AF078844,Smith-Waterman Score=288.
  misc_feature (1)...(417): n = a,t,c or g
gcttcttcgcttctctcttggaaagtccagtctctcctcggcttgcaatggaccccaactgctcctgcgccgctggtgtctcctgcacctgcgctggttcctgcaagtgcaaagagtgcaaatgcacctcctgcaagaagagtgagtgtgaggccatctccatggtctggggctgtggctaaggctgctgctcctgctgccccgtgntgctagcaagtgtgcccagggctgtgtttgcaaaggggcgtcagagaagtgcagctgctgcgactgatgccacggacaacctttctcccagactgtaaacagagagacatgtacaaacctggattttttttttataccaccttgacccatttgctacattccttttcctgtgaaatatgtgagtgataattaaacactttagacctgatt

SEQ ID NO: 275 - DNA, 1173 bp, Homo sapiens
  SIMILAR (336)..(4): 1001254mologous to Homo sapiens membrane-type-5 matrix metalloproteinase,accession number AB021227,Smith-Waterman Score= 606.
tcacacccattcctggactggccgcttatagtaggtgacaggctgagggcctgtcttgttcttgaactggaagatggtgtagaccagcaccaggatgcagagggacaggatgcaggggatgaccacggccacggcgttcacggagcccggcacatcgttgatggtcaccatgatgtccacgtcgtcctggggcagccgccgctccttccgccgctccacctccttctggttgcagcccatccagtcacgcaggatgttgcgcgggtagcctggctccacgctcagtttctggttgtcaaacttccagtagtcccggcccttgtagaaataggtgtaatctgcagaaatacagcccagcatcaccactcccagacacttccggcacctgctctggggcagtgtgaaaaggagggcacaggcagtacatccttccttgctgatgaaggctccttggggagcctgtgggatgcccttccacacggtgatgggcttagggtagccagggtccgtggcccgccgctcctcgctgtagcgccagtaccgctcgcctttgaaaaagtaggtcttgcccacaggttcccagcgcagagctgtgtcaatgccttcacggggcaaacagctgcccagctcccccaggctgtgggggtacccaggctccaccgtcacctccttaaacacccaatacttgtcacctttgaagaagacaaatctcccatcggccctttcataggctgcgtcgatgcgggcaggcaggcccttccagaactgctcgatctgcatggggtagccctcctgcactcggttattgcgcagacgccagaaccagcgatccttaaagacaaacatctcgccccggaagagggccactgtgttgaagttgccgtcacagatgttgggtttggtgcctggtgtggatggccggtccccgaggggcggccgagggggcctgggctggcgctcgtgtttcctctccgatggtgagtggatcctgcggacggggagtgtagggagtggccttgtgggctccagaggctcggctgggggtccgcggcttgaaatggaccccaactgctcctgcaccactggtggctcctgcacgtgcgccggctcctgcaagtgcaaagagtgcaaatgcacctcctgcaagaagagctgctgctcctgctgccccat

SEQ ID NO: 276 - DNA, 696 bp, Homo sapiens
  SIMILAR (359)..(400): 1001254mologous to Canis familiaris metallothionein- 1,accession number D84397,Smith-Waterman Score=86.
ctgaaggaaaaggccaaggcaccttgtcggtggtgacaatgtaccatgctaaggccaaagatcaactcacctgtaataaattcgacctctgcctcccaggttcaagacagaaagtcgaagtcttcctgggccatgtctgcagcctgggactttcctttggagtagaaataggagggtgcttggttttcccagcatgaatggagaggacatggggcttctcttcctctgctctgagtgggaaaggagctctgagggctggctctgcacagagaagggggaagtggacactcaattgaaccccactgctgtaccttcctgcatctcactcactgcccactgcgttttcctcttccttgtaggtggctcctgcacgtgcgccggctcctgcaagtgcaaagaagtgcaaatgcacctcctgcaagaagagtgagtgcggggccatctccaggaatctggggctgtggctaaggttgggagggaacccaaggctgtccctgagtgcgtgcttctggggaaccggccttcctttgtccctgtaggttgtcactgcctgtctagtcttctgcactttccagggcttatgtgaggtggggcagctttctcaaaggaagacccaccccagatatttcccagttgtctcctgacaaagccataccctcctgaactgagggtcctttgtggctggaggctctgttg

SEQ ID NO: 277 - DNA, 477 bp, Homo sapiens
ttttttttttttttttcaagtctaaagtgtttaaattatcaactcaacatatttccacaggaaaaaggaatgtaagcaaaatgggtccaaggtggtataaaaaaaaaaaatccaggtttgtaacatgtctctctgtttacatctgggagaaaggttgtccctggcatcagttcgcagcagctgcactttctctgacgcccctttgcaaacacaacccctggggcacacttgctaacaacccacggggaggcagggagcaggcagctctttcttgcaggagggtgcatttgcactcatttgcacttgcagggaaccagcgcagggtgcagggaggacacccagcgggcgcagggagcagttggggggtccatttgcaagcccgagggagagactgggacttttcccaaggagaggaagcgaagaagcatgtggggcaggtggaaggcgtggtggacccaaacagccggccgctgcttt

SEQ ID NO: 278 - DNA, 654 bp, Homo sapiens; identical to SEQ ID NO: 244
  SIMILAR (24)..(449): 1001254mologous to Homo sapiens alpha globin,accession number V00488,Smith-Waterman Score=733.
  misc_feature (1)...(654): n = a,t,c or g

SEQ ID NO: 279 - DNA, 703 bp, Homo sapiens
  SIMILAR (161)..(436): 441254mologous to Papio cynocephalus anubis alpha-1 globin,accession number X05289,Smith-Waterman Score=95.
  misc_feature (1)...(703): n = a,t,c or g
aggcctagaattcggcacgagccacagactcagagagaacccaccatggtgcttgtctcctgcccgacaagaccaacgtcaaggccggcttggggtaaggtcggcgcgcacgctggcgagtatggtgcggaggccctggagaggatgttcctgtccttccccaccaccaaagacttacttcccgcacttcgaccttgagccacggtttctgcccaaggttaaagggcccacggcaaagaaggtggccgaacgcgctgaccaaacgccgtggcgcaacgtgggacgacatgcccaaacggcgctgtccgccctgagcgacctgcacggcgcacaagctttcgggtgggacccggttcaactttcaagctcctaaagccaattgccttgcttgggtgaaccttgggccgcccacctccccgcccgagtttcaacccctggcggttgcacgccttccctggaacaaagtttcctggggtttttgttgaagcaaccttgttgaactttcaaataacctttaaaggttggaagccttcgggttggccatgcttctttgcccctttgggcctttcccccagggccctccttccctttcctggaacccgtaacccccgtgggtcttttgaataaaattttgaattgggggggcaaaaaaaaaaaaaaaaaaaagatctttnaatttaagggggcggaaagtttatttcaa

SEQ ID NO: 280 - DNA, 1373 bp, Homo sapiens
  SIMILAR (1092)..(526): 581254mologous to Homo sapiens Human beta-amyloid peptide- binding protein (BBP),accession number AAW94291,Smith-Waterman Score=461.
  misc_feature (1)...(1373): n = a,t,c or g
gcaaaactctggaggggaggtggccaatatgtccccccccaaaaaaaaggttctttccaaaaattcccaaggaggcttttattcgcccccccataaagaaaaaaataaaaccttcccagcccgcgttaaattgggcccccccaaggatcccttaaaacggccccccccnnnnnnnnnnnnnnngtgaataagttatacttttatttttcagaaacaaaaatcgacaagtggcaacttgccgtttgtaaaagattaaagagtatcagagtaataagctatctctcatagagacagaagcccgagaaacactattatacagctttcaaaggaagtcctattaaataaatctcacaataatatactttaactcaacaaaacaaaaaccacaaaaaattatacaggaacttcattaaatgggtatatggaatggattagggggaaatcttttaaatccatacactaggaagttctcctattaaaatccaaggaggctccaaatctcgttccttttaaaaaattatttatgggatataattgccgtttttcctaaatggtttccattagtaataccccagtcctggtaagtcctgggttccatagtaatctataatgtaacctaccttccatctgaaggtccaacaatctgcattggaaatcaagaatgaaatcaattaggctcccaattccacaaaaccctacagtgcaaaaactttaacaaaccccaaaccaggggtatccccaaggtaaaaatcgaatctgctccccaacccatcccaagaaaaagagacaaatgccgactgcccactttggtagggaattagcccattttacattttcgggcaagatatggggcttgaaaaaaacccaacttcgttccccagtaaaatgtgtttccattgcccactggaatccttaccaagttatgttgggtgctggaaaacaggaaacatgagctgtgtagtttgtacagttaactggttcttgcgtagcgtcatttatttttggatctttacaaatatattgtcccactttgaggtcctcgcacttaagcgactcctcgcccccggcggaggtggcaacatgccccccagggtcctgtagtgactgcagacgaaccacaggacaccaacgagtctggccgtcacggcctccggagcagacggaccagacggccaggcggccgccatcttggagaccgacactttctcgccacttccgcttccgcctccgcccaggagcgggagggagaagggcaacagggcgaggttcttaaagggacctcgcataggatagaggccagttccgtctcttcgcgtgttcttctgcccgtgagcccgtggaatcacattgggagacccttttaaaatatgcat

SEQ ID NO: 281 - DNA, 697 bp, Homo sapiens
  SIMILAR (48)..(353): 571254mologous to Homo sapiens Protein sequence of the di- alpha haemoglobin gene contained in pSS1,accession number AAW54282,Smith-Waterman Score=238.
  misc_feature (1)...(697): n = a,t,c or g
ccccgactcttctggtccccacagactcagagagaacccacccatggttgctgtctcctgccgacaaagaccaacgtcaaggcccgcctgggggtaaggtcggcgcgcacgctggcgagtatggtgcggaggccctggagaggatgttcctgtccttccccaccaccaagacctacttcccgcacttcgaacctgagccacggtttctgcccaggtttaagggccacgggcaaggaaggtggccgacgcgcttgaccaacgccgtggcgcaacgtgggacggacattgcccaacgcgcttgtccgcccttgagcgacctgcacggcgcacaagctttcgggtgggacccggttcaactttcaagctcctaaaggccacttgccttgcttgggtgaaccttgggccgcccacctccccggccgagtttcaacccctggcggttgcaaggcttccttggggacaaagtttcctgggtttcttgttgaagcaacgttgttgaacttccaaataacgtttaaagttgggagccttcggtgggccattgtttttttgcccctttgggcctccccccagccccttcctccctttcctgaaccgtaacccccgtggtcttttgaataaaattttgaattgggggggcaaaaaaaaaaaaaaaaaaaagatctttnaatttaagggggcggaaagtttatttcaa

SEQ ID NO: 282 - DNA, 1404 bp, Homo sapiens
  SIMILAR (382)..(1077): 1001254mologous to Homo sapiens dJ863G3.2 (major histocompatibility complex, class II, DR beta 1),accession number AL137064,Smith-Waterman Score=1247.
  misc_feature (1)...(1404): n = a,t,c or g
atgctgagtggagtcgggggcttcgtgctgggcctgctcttccttggggccgggctgttcatctacttcaggaatcagaaagctgaggagtcttttgtatcggctctctccatagacttatctggaggaggaaatatggctttgctgagcatggtgtgtctgaagttccctggagggctcctgcatggcagctctgacagtgacactgatggtgctgagctccccactggctttggctgggggacacccgacacccccgtccgcctcagaaagacagaggatgagcccctgggctgcgtgttgtcggggttgcgggtggggccagatagtgtcttccccggaggccgcttctgtaaccggatcgttcttgtccccccagcacgtttcttggagcaggttaaacatgagtgtcatttcttcaacgggacggagcgggtgcggttcctggacagatacttctatcaccaagaggagtacgtgcgcttcgacagcgacgtgggggagtaccgggcggtgacggagctggggcggcctgatgccgagtactggaacagccagaaggacctcctggagcagaagcgggccgcggtggacacctactgcagacacaactacggggttggtgagagcttcacagtgcagcggcgagtctatcctgaggtgactgtgtatcctgcaaagacccagcccctgcagcaccacaacctcctggtctgctctgtgaatggtttctatccaggcagcattgaagtcaggtggttccggaacggccaggaagagaagactggggtggtgtccacaggcctgatccagaatggagactggaccttccagaccctggtgatgctggaaacagttcctcggagtggagaggtttacacctgccaagtggagcacccaagcctgacgagccctctcacagtggaatggagagcacggtctgaatctgcacagagcaagatgctgagtggagtcgggggcttcgtgctgggcctgctcttccttggggccgggctgttcatctacttcaggaatcagaaaggacactctggacttcagccaacaggattcctgagctgaagtgcagatgaccacattcaaggaagaaccttctgccccagctttgcaagatgaaaagctttcccacttggctcttattcttccacaagagagacctttctccggacctggttgctactggttcagcagctctgcagaaaatgtcctcccttgtggctgcctcagctcgtacctttggcctgaagtcccagcattaatggcagcccctcatcttccaagttttgtgctcccctttacctaatgcttcctgcctcccatgcatctgtactcctgctgtgccacaaacanattacattattaaatgtttctcaaacatggagttaa

SEQ ID NO: 283 - DNA, 1156 bp, Homo sapiens
  SIMILAR (15)..(317): 751254mologous to Homo sapiens DRw53 beta-chain glycoprotein,accession number M16942,Smith-Waterman Score=389.
tcctcttctccagcatggtgtgtctgaagctccctggaggctccagcttggcagcgttgacagtgacactgatggtgctgagctcccgactggctttcgctggggacacccgaccacgtttcttggagctgcgtaagtctgagtgtcatttcttcaatgggacggagcgggtgcggtacctggacagatacttccataaccaggaggagttcctgcgcttcgacagcgacgtgggggagtaccgggcggtgacggagctggggcggcctgtcgccgagtcctggaacagccagaaggacctcctggagcagaagcggggccgcggtggacaattactgcagacacaactacggggttggtgagagcttcacagtgcagcggcgagtccatcctcaggtgactgtgtatcctgcaaagacccagcccctgcagcaccacaacctcctggtctgctctgtgagtggtttctatccaggcagcattgaagtcaggtggttccggaacggccaggaagagaaggctggggtggtgtccacaaggcctgatccacaatggagactggaccttcccacaccctggtgatgctggaaacagttcctcggaagtgaagaggtttacacctgcccaagtggaagcacccagggcgtgacaagcccctctcacagtggaattggagagcacggtctgaatctgcacagagcaagatgctgagtggagtcgggggctttgtgctgggcctgctcttccttggggccgggctgttcatctacttcaggaatcagaaaggacactctggacttcagccaacaggattcctgagctgaagtgcagatgacacattcaaagaagaactttctgccccagctttgcaggatgaaaagcttttcctcctggctgttattcttccacaagagagggctttctcaggacctggttgctactggttcagcaactgcagaaaatgtcctcccttgtggcttcctcagctcctgcccttggcctgaagccccacagctttgatggcagcgcctcatcttcaacttttgtgctcccctttgcctaaaccctatggcctcctgtgcatctgtactcaccctgtaccacaaacacattacattattaaatgtttctcaaagatggagttaaaaaaaaaaaa

SEQ ID NO: 284 - DNA, 2036 bp, Homo sapiens
  SIMILAR (647)..(865): 611254mologous to Homo sapiens MHC class II DR-beta,accession number M28583,Smith-Waterman Score=177.
  misc_feature (1)...(2036): n = a,t,c or g
ccctgagngagacttgcctgcttctctggcccctggtcctgtcctgttctccagcatggtgtgtttgaagctccctggaggctcctgcatgacagcgctgacagtgacactgatggtgactgagctccccactggctttggctggggacacccgaccacgtttcctgtggcagcctaagagggagtgtcatttcttcaatgggacggagcgggtgcggttcctggacagatacttctataaccaggaggagtccgtgcgcttcgacagcgacgtgggggagtaccgggcggtgacggagctggggcggcctgacgctgagtactggaacagccagaaggacttcctggaagacaggcggggccgcggtggacacctactgcagacacaactacggggttggtgagagcttcacagtgcagcggcgagtccaacctaaggtgactgtatatccttcaaagacccagcccctgcagcaccacaacctcctgggttctgctctgtgagtggtttctatccaggcagcattgaagtcaggtggttcctgaacggccaggaagagaaggctgggatggtgtccacagggcctgatcccaaaatgaagatggccccttcccagaccctggtgatgctggaaaccagtttcttcggagtggagagggttaacaccttcccaagtggagcacccaaaatgtgcgaggccttctcacagtggaatgaagagcacggtctgaatctgcacagagcaagatgctgagtgaagtcgggggccttcgtgctgggccctgctccttcccttggggcccgggcttttcaatctacttcaggaatcagaaaggacactctggacttcagccaacaggattccctgagctgaaatgcagatgaaccacattcaaggaagaaccttctgtcccagctttgcagaatgaaaagctttcctgcttggcagttattcttccacaagagagggctttctcagggcccgggttgctactggttcagcaactctgcagaaaatgttcctcccttgtggcttcctcagctcctgcccttggcctgaagtcccagcattgatgacagcgcctcatcttcagcttttgtgctcccctttgcctaaaccgtatggcctcccgtgcatctgtacctcaccctgtacgacaaacacattacattattaaatgtttctcaaagatggagttaaatatcatctggtccatttggctccaaagacagaaaatgaaaagaaaaagggaagattattttccaatagaataatgattttcatgtatatgtcatgagtgtgcgagggaatgcgtatgttaaatagctggatttagacattccacactataggcatataacaaaacttcatgcttccacataaatatgcnnnnnnnnnnnnnnnnnnnnnnnnaaaaagtaatcctaatgtttaaaaaggcaatgcataaaaactgagaacagactataacaactgaaacaaacttggcaaccatgagatgagaaaccagctagcaagtcaatcagaactctttcttcatctcgtctacaatattttgtatttataactgtaaattagtgtatagtgtttcactccagagacttcaataatacagtgttatcaaaaggacttgtacagatttcagagaaagacacatttagaagacggagaatggagtctccattatgttctatctgagagtcagtatgaaatgtcaaatataaaagtacataattcagaggtctatttcaaattaataatcatttgagcataatttctccactgtcagagacgactgttattttattttcaatcaaattaaaagttgtttttatgcatatcttatttttagttttatgttacttgtacatacgtagcagtacaagtgcatataaatcctgtaagagtataaatcctatagaaatatattaagctgataattatgtctgttctgtttgatcacagagttgcaacaaataggcctcatttcctaagttgaggaaatgattttctcattttatatgagacttgtgg

SEQ ID NO: 285 - DNA, 670 bp, Homo sapiens
  misc_feature (1)...(670): n = a,t,c or g
atcgagaccatattccatgtggnggaattccacagactcagagagaacccaccatggtgcttgtctcctgccgacaagaccaacgtcaagggcccgcctggggtaaggtcggcgcgcacgctggcgagtatggcttcggaggccctggagaggaatggtcctgttccctccccccacacccaagccttacttcccgcacttcgaacctgagccacggtttctgcccaggtttaagggccacgggcaaggaaggtggccgacgcgcttgaccaacgccgtggcgcaacgtgggacggacattgcccaacgcgctgttccgcccttgagcgacctgcacggcgcacaagctttcgggtgggacccggttcaactttcaagctcctaaaggccacttgccttgcttgggtgaaccttgggccgcccacctccccggccgagtttcaacccctggcggttgcaacgtcttccctggggacaaagtttcctgggtttcttgttgaagcaccgttgctgaccttccaaataacctttaaaggttggaagctttggttggccattgtttttttgccctttgggcttccccccagcccctcctcccctttcctgcacccgtacccccgtggtctttgaaataaagtcttgagtgggcggcaaaaaaaaaaaaaaaaaa

SEQ ID NO: 286 - DNA, 681 bp, Homo sapiens
  SIMILAR (290)..(622): 991254mologous to Homo sapiens ribosomal protein L3,accession number M90054,Smith-Waterman Score=566.
tgcaagttcatccgtgtcatggcccacaccagattgcgcctgcttcctctgcgcagaaagaaggcccacctaatggagatccaggtgaacgaaggcactgtggccgagaagctggactgggcccgcgagaggcttgagcagcaggtacctgtgaaccaagtgtttgggcaggatgagatgatcgacgtcatcggggtgaccaagggcaaaggctacaaaggggtcaccagtcgttggcacaccaagaagctgccccgcaagacccaccgaggcctgcgcaaggtggcctgtcaaggacggcaagctgatcaagaacaatgcctccactgactatgacctatctgacaagagcatcaaccctctgggtggctttgtccactatggtgaagtgaccaatgactttgtcatgctgaaaggctgtgtggtgggaaccaagaagcgggtgctcaccctccgcaagtctttgctggtgcagacgaagcggcgggctctggagaagattgaccttaagttcattgacaccacctccaagtttggccatggccgcttccagaccatggaggagaagaaagcattcatgggaccactgaagaaagaccgaattgcaaaggaagaaggagcttaatgccaggaacagattttgcagttggtggggtctcaataaaagttattttccactga

SEQ ID NO: 287 - DNA, 1254 bp, Homo sapiens
  SIMILAR (616)..(1122): 831254mologous to Homo sapiens ribosomal protein L3,accession number M90054,Smith-Waterman Score=741.
atggcctccaaattgcgactgtctgacatgactggagagaaagggctcaaccttgcaccaattaagatcattctgaactcactttttgaggatggcagttctattggactccagggagctcagggggctgtggacaagccctgtgggcttgagcagccagtggtagtgcccacaaaatgtgactgttacacagccagcccaaagtgcagcagtgggcattgtgggaaggtgaagagcctccctaaggatgacccttccaagccagtctgcctcacaggcttcctgggatacaaggctggcatgactcacatcgtgcaggaagttgacaggccaggatccaaggtgaataagaaggaggtggtagaggctgtgaccattgtagagacactgcccatgatggttgtgggcattgtgggctatgtggaaacccctcaaggcctccggaccttcaagactgtcttcgctgagcacatcagtgatgagtgcaagaggcgcttctataagaactggcataaatctaagaagaaggcctttaccaagtaccgcaagaaatggcaggatgagaatggcaagaagcagctggagaaggacttcagcagcatgaagaagtactgccaaaagaaggcccacctgatggagatccaggtgaatggagacaccatggccaagaagctggactgggcccgcgagaggtttgagcagcagttacctgtgaaccatgtgtttgggcaggatgagatgattgacatcatcagaatgacaaagggcaaaggctacaaaggggtcaccagtcattggcacgccaagaagctgccccgcaagacccaccaaggcccacgcaaggtgtcctgtattggggcatggcatcttgtccatgtggccttctctgtggcacgcacttggcagaaaggctactgtcaccacactgagatcaataagaagatccataagattggccagggctaccttatcaaggatgacaaactgatcaagaacaatgcctccactgactatgacctgtctgacaagagcatcaaccctctgggtgtctttggccactatggtgaagtgaccaatgactttgtcatgctgaagggctgtgtgaccaaacagcgggctctgcagaagactgaccttaagttcactgacaccacctccaagtttggccatggccgcttgcagaccatggaggagaagaaagcatccatgggacgactcaagaaagaccaaattgcaaaggaagaaagagcttaa

SEQ ID NO: 288 - DNA, 903 bp, Homo sapiens
  SIMILAR (415)..(903): 841254mologous to Homo sapiens ribosomal protein L3,accession number M90054,Smith-Waterman Score=732.
aagtgcagcagtgggcattgtgggaaggtgaagagcctccctaaggatgacccttccaagccagtctgcctcacaggcttcctgggatacaaggctggcatgactcacatcgtgcaggaagttgacaggccaggatccaaggtgaataagaaggaggtggtagaggctgtgaccattgtagagacactgcccatgatggttgtgggcattgtgggctatgtggaaacccctcaaggcctccggaccttcaagactgtcttcgctgagcacatcagtgatgagtgcaagaggcgcttctataagaactggcataaatctaagaagaaggcctttaccaagtaccgcaagaaatggcaggatgagaatggcaagaagcagctggagaaggacttcagcagcatgaagaagtactgccaaaagaaggcccacctgatggagatccaggtgaatggagacaccatggccaagaagctggactgggcccgcgagaggtttgagcagcagttacctgtgaaccatgtgtttgggcaggatgagatgattgacatcatcagaatgacaaagggcaaaggctacaaaggggtcaccagtcattggcacgccaagaagctgccccgcaagacccaccaaggcccacgcaaggtgtcctgtattggggcatggcatcttgtccatgtggccttctctgtggcacgcacttggcagaaaggctactgtcaccacactgagatcaataagaagatccataagattggccagggctaccttatcaaggatgacaaactgatcaagaacaatgcctccactgactatgacctgtctgacaagagcatcaaccctctgggtgtctttggccactatggtgaagtgaccaatgactttgtcatgctgaagggctgtgtg

SEQ ID NO: 289 - DNA, 1134 bp, Homo sapiens
  SIMILAR (1)..(789): 911254mologous to Homo sapiens ribosomal protein L3,accession number X73460,Smith-Waterman Score=1269.
atgtctcacagaaagttctccactcccagacatgggtccctcggcttcctgccttggaagcgcagcagcaggcattgtgggaaggtgaagagcttccctaaggatgacccgtccaagccggtccacctcacagccttcctgggatacaaggctggcatgacccacatcgtgcgggaagtcgacaggccaggatccaaggtgaacaagaaggaggtggtggaggctgtgaccattgtggagaggccaccagtgggcattgtgggctgcgtggaaacccctcaaggcttccggacttgcaagactgtcttcgctgagcacatcagtgatgaatgcaagagacgtttctataagaactggcataaatctaagaagaaggcctttaccaagtactgcaagaaatggcaggatgaggatggcaagaagcagctggagaaggacttcagcagcatgaagaagtactgccaagtcatctgcgtcattgcccacacccagatgcaactgcttcctctgtgccagaagaaggcccacctgatggagatccaggtgaatggaggcactgtggctgagaagctggactgggctggcgagaggctcaagcaccaggtacctgtgaaccaagtgtttgggcaggatgagatgatcgacgtcatcagggtgaccaagggcaaaggctacaaaagggtcaccagtcgttggcacaccaagaagctgccccgcaagacccaccaaggcctgtgcaaggtggcctgtattggggcatggcatcctgctcgtgtgggcttctctgtgggctaccttatcaaggatggcaagctgatcaagaacaatgcctccactgactatgacctgtctgacaagagcatcaaccctttgggtggcttcgtccactatggtgaagtgaccaatgactttgtcatgctgaaaggctgtgtggtgggaaccaagaagtgggtgctcaccctccgcaagtccttgctggtgcagacaaagcagcgggctctggagaagattgaccttaagttcattgacaccccctccaagtttggccatggccacttccagaccatggaggagaagaaagcattcatgggaccactcaagaaagaccgaattgcaaaggaagaaggagcttaa

SEQ ID NO: 290 - DNA, 1363 bp, Homo sapiens
  SIMILAR (31)..(1281): 661254mologous to Homo sapiens ribosomal protein L3,accession number X73460,Smith-Waterman Score=1217.
tgggctctaccggcgggatttgatggcgtgatgtctcacagaaagttctccgctcccagacatgggtccctcggcttcctgcctcggaagcgcagcagcaggcatcgtgggaaggtgaagagcttccctaaggatgacccatccaagccggtccacctcacagccttcctgggatacaaggctggcatgactcacatcgtgcgggaagtcgacaggccgggatccaaggtgaacaagaaggaggtggtggaggctgtgaccattgtagagacaccacccatggtgtttgtgggcattgtgggctacgtggaaacccctcgaggcctccggaccttcaagactgtctttgctgagcacatgagtgatgaatgcaagaggcgtttctataagaattggcataaatctaagaagaaggcctttaccaagtactgcaagaaatggcaggatgaggatggcaagaagcagctggagaaggacttcagcagcatgaagaagtactgccaagtcatccgtgtcattgcccacacccagatgcgcctgcttcctctgcgccagaagaagggcccacttgatgggagatccaggtggaacgaggggcacctgtgcccgagaaagctgggactggggcccgcgagagggcttgaagcagcaggtacctgtgaaaccaagtgttttgggcagggatgagaatgatcgaacttcatcgggggtgacccaagggccaaaaggcttacaaagggggtcacccagttgtttggcacacccaagaaagctgcccccgcaaagaccccacccgagggcctgcgcaaaggtggcttgtattggggcattgccatcctgctcgtgtaagccttctctgtggcacgcgctgggcaagaaaggctaccatccccgcacatgagatcaacaagaagattttataagattggccaggggctaccttatcaagggcgggcaagctgatcaagaacaatgcctccactgactatgacctatctgacaagagcatcaaaccctctgggtggctttgtccactatggtgaaagtgacaaatgactttgtcatgctgaaaggcctgtgtggtgggaaccaagaaagcgggtgctcacccctccgcaaagtctttgctggtgcagacgaaagcggcggggctctggagaagaattacccttaagttccattgacaccacctccaagtttggccatggccgcttccagaccatggaggagaagaaagcattcatgggaccactgaagaaagaccgaattgcaaaggaagaaaggagcttaatgccaggaacagattttgcagtcggtggggtctcaataaaagttattttccactgaaaaaaaaaaaaaaaaa

SEQ ID NO: 291 - DNA, 482 bp, Homo sapiens
  SIMILAR (481)..(389): 671254mologous to Homo sapiens Human secreted protein, SEQ ID NO: 7870,accession number AAG03789,Smith-Waterman Score=108.
atttatatgaatctttgctagttttgcatgtttaaaattatttcaacataaaaaaattatatgggtcatgtagttttttgtgcagtttaattctaggcaccatagtttctgttttaatgggtgtattttcttctttcatggaattgggatagtctgttgtattaaaaacctattcatttttgtacattaagattcttctggccaggtgcaatggctcaagcctataatcccagtacttgggaacctgaggcaggcagatcacctgaggtcaggagttcaagaccagcatgtccaacatggtgaaaccccatctctactaaaaatacaaaaaaaattagccaggcatggtggcgcatgcctgtaatcccagctacttgggaggctgaggaggagactcactagaactcaggaagcagaggttgcagtgagccaagactgcgccactgcactctggcctaagcaacagagggagactccatctc

SEQ ID NO: 292 - DNA, 608 bp, Homo sapiens
  SIMILAR (24)..(449): 1001254mologous to Homo sapiens alpha globin,accession number V00488,Smith-Waterman Score=733.
cacagactcagagagaacccaccatggtgctgtctcctgccgacaagaccaacgtcaaggccgcctggggtaaggtcggcgcgcacgctggcgagtatggtgcggaggccctggagaggatgttcctgtccttccccaccaccaagacctacttcccgcacttcgacctgagccacggctctgcccaggttaagggccacggcaagaaggtggccgacgcgctgaccaacgccgtggcgcacgtggacgacatgcccaacgcgctgtccgccctgagcgacctgcacgcgcacaagcttcgggtggacccggtcaacttcaagctcctaagccactgcctgctggtgaccctggccgcccacctccccgccgagttcacccctgcggtgcacgcctccctggacaagttcctggcttctgtgagcaccgtgctgacctccaaataccgttaagctggagcctcggtggccatgcttcttgccccttgggcctccccccagcccctcctccccttcctgcacccgtaccccggggggtttgaataaaagatggcgacccggcgcaatttggaactcgaaagaatctttttttttgggttggggggggca

SEQ ID NO: 293 - DNA, 707 bp, Homo sapiens
  SIMILAR (82)..(183): 761254mologous to Papio cynocephalus anubis alpha-1 globin,accession number X05289,Smith-Waterman Score=142.
  misc_feature (1)...(707): n = a,t,c or g
aggcctagaattcggcacgagccacagactcagagagaacccaccatggtgctcgtctcctgcccgacaagaccaacgtcaaggccggcttggggtaaggtcggcgcgcacgctggcgagtatggtgcggaggccctggagaggatgttcctgtccttccccaccaaccaagacctacttcccgcacttcgaccttgagccacggtttctgcccaaggttaaagggcccacggcaaagaaggtggcccgacgcgctgaccaaacgccgtggcgcaacgtggacggacatgcccaaacggcgctgtccggccctgaagcgaccctgcacggcgcacaaagcttcggggtggacccggttcaactttcaagctccttaagccacttgcctgcttggttgaccctgggccgcccaccttccccggccgagttcaacccctggcgggtggaacgccttccctggaacaaagtttccttgggtttcttgttgaagaaccgttgcttgaaccttccaaaatacccgttaaagcttggaagccttcgggttggccatgctttctttgcccctttggggcttccccccagcccctcctcccctttcctgcacccgtacccccgtgggtcttttgaataaaattttgaattgggggggcaaaaaaaaaaaaaaaaaaaagatctttnaatttaagggggcggaaagtttatttcaa

SEQ ID NO: 294 - DNA, 964 bp, Homo sapiens
  SIMILAR (209)..(820): 391254mologous to Mus musculus putative,accession number AK012331,Smith-Waterman Score=166.
cagacgttctttctttgctgcgtctactgcgaggctgggacacactggggcccgctgtcggtctcccgtcctccgacatcttgtctggaacttccgcctggcagtctccagtaggagtggagctctgtgcggcgtagtttggtggaaaaacgggccttgcgtcggcctcacccccagtgtttgtgtttcagaatgaagactttttcacagcaatcagactgtcgaccattcccagaaaaatgtcgacattactctgaaagggacgccccagtaatcgtgtaagggccccaaagggaaccctgcggaagggacttcaatccacatcaaatgtagaactcagcccttcttgggaaagaacaacaaagaggcttccgggttgaccaaatggtgggggtaccagaaagggaactggcctacccgttcgggactatttggtagtcatgtacaggaccatgatcaaagggtggttaccactggggcttccggttacaaagatgagggtctgtgtatgctcacttcccccatccaacgttgttatccagggagaatggggtctctttgttgaaatcccgaaatttccttgggtgaaaaatacatcccgcagggtttccggatgaagaccagggtgttgctttgtcagtatctcaaagcccagaaaagatgaaattaatccttggaaggaaatgacacttgggcttgtttccaaatttcagccggcttttgattccagcaagccccaccaggttaaaaacaaagggtatcaggaaaatttttggatggtatcttttgtctcttggaaaagggactgttccgccaggcttgattgaataagatctaagaagttacctgggctacagaaaaaaagatgccacgatgacacttcacgacctacttgtgatatattaaaagatgcaaaaaaaaacacatattagatttggaaaaaaaaaaaaaaaaaaagtcgagc

SEQ ID NO: 295 - DNA, 488 bp, Homo sapiens
  SIMILAR (286)..(197): 801254mologous to Sus scrofa hyaluronidase,accession number U14751,Smith-Waterman Score=153.
  misc_feature (1)...(488): n = a,t,c or g
ggaggtgggncaggcagactcatgtcagaaggcccctcagtgagaagcgaagaagcaatctgtctttattatgaggaactaggaggtggggccaggcagactcatgtcagaaggcccctcagtgagtgcagcccaggagactggtcacattctggggttgcggaagggccttgntgcattcagtttctccacatcacttctcatggggccaaggaagctctgtccacgtggcttgggctcctgacttcaggtccagccaccacagccgccgtcctgccatgatatgggagccgagaagacccagggcagataaaggccgcatccacagagtccagggntaatcccatgaggggtcccgactttccttcttccagccgntttcggataaccgtttactagggtatagcctnccttttttcaggaagacattttacctggggtgccttgggaccagatagantttttttttncccggggaaaaggcagca

SEQ ID NO: 296 - DNA, 2052 bp, Homo sapiens
  SIMILAR (62)..(664): 451254mologous to Homo sapiens hemopexin precursor,accession number J03048,Smith-Waterman Score=316.
  misc_feature (1)...(2052): n = a,t,c or g
attgaaaccctatcgagaccatagtcagtgtggtggaattcgcagctcagcatggctaggggtacttgggagcacccgttgcacttggggttgtggagncctatgctggtctctggccattgccacccctcttcctccgactagtgcccatgggaatgttgctgaaggcgagaccaagccagacccagacgtgactgaacgctgctcagatggctggagctttgatgctaccaccctgggatgacaatggaaccatgctgttttttaaaggggagtttgtgtgggaagagtcacaaatggggaccgggagtttaatcttcagagagatgggaaggattttcccccagcccttgtgggatgcttgcatttccgttcaaggttcacaacagtgttctttcttgatccaaggggggggacaaagtcttggggtattaaccttccttgaaaaagaaagggagaaaaggattacccaaagtttgttccaagattgattttcctgggattccccattccccaattggattgcagctgtggaatgtcaccgtggaagaatgtcaagctgaagcgcgttcctcttcttccaaggtgaccgcgaagtggttctgggactttgcctaccgggaaccatggaagggagcgttcctgggccagctgtttggggaacttgctcctcttgccctgagatgggctgggccgcttacttactggctttccaggggtaaccaatttcctgcgctttcgaccctgtcaaggggaagaagtgcctcccaggtgacccgcgggatgtccgagaataatttcatgccctgccctgggaaaggccattgggacacaggaatggggattgggccatgggaacagtaaccaccatggcccttgaatatatgcggcttgtagcccaacatcttagtctttgtcttgcactgacgtctgacaaccattggtgccaacttttgcctttcagttgggacccactactggcgttttggacaccagcccgggatggctggcatagcttggccccattgcttatcaagtggccccagggtccttcagcagtggatgctgccttttcctggggaagaaaaactctatctggtccaggggcacccagggtattatgtcttcctgacaaagggaggctattacccttagttaaggcggttatccgaagcggctgggagaaagggaagttcggggacccttcatggggatttatcctgggactctgtggatgcggcctttatcttgccctggggtctttcttcggctccattattcatgggcaggacggcggctgtgggtgggctgggaccctgaaagtcaggaagcccaaagcccacgtggaacagagctttcctttggcccccatgaagaaggtagacggagccttgtgtatggaaaaaagtccctttggccctaaattcatgtttccgccaaatggtcccggccttgtaccctcatccatggtcccaattttacactctaacagtgttgtggagaaaactgaatgccagccaaggcccttccgcaaccccagaatgtgacccagtctcctggggcttgcactcactgaggggccttcttgacatgaagtctgccctgggccccacctcctagttcctcataataaagacagattgcttcttcgcttctcactgaggggccttctgacatgaagtcttgcctggccccacctccccagtttctcataataaagacagattgcttcttcacttgnnnnnnnnnnnnnnnnncgggggggccgttttaaagaacccgtagggggcccaacgttaacccggggaggcaacgaaaaaattgtttccttatagcgagtgggattagaccccacctggggattttgacaacggaaccttacttggggggggtgactaacttggacaaccgccctacgaaacctaagctcttaagggaacaaatgaaaatctaacgtgcatgaggagggaaactgacagcaaaacccggctggttgcaagttcggcttctggaggtgctttaaagaacaatgttaacacggggagtcgtgtt

SEQ ID NO: 297 - DNA, 3433 bp, Homo sapiens
  SIMILAR (1841)..(3166): 971254mologous to Homo sapiens R561E human plasminogen variant,accession number AAR12406,Smith-Waterman Score=2526.
atgctccctcatgagagaggactggagaccacccctagaggagaatgtatccctgtacggattgacaccaaattgtttgaaatgcttgttccccagtgccataaagaaatagcacttgaacataaatttatttactccttcttagtgacactgaacacgaagccccctgggtattcacatagtcatccagaggctctccttgacccagaggtgggagatccaaatggaacaaatgctcagttaatcaaatgttttcttcttcctctctgtccttccttcccactctgtccagaggaatgtatgcattgcagtggagaaaactatgacggcaaaatttccaagaccatgtctggactggaatgccaggcctgggactctcagagcccacacgctcatggatacattccttccaaatttccaaacaagaacctgaagaagaattactgtcgtaaccccgatagggagctgcggccttggtgtttcaccaccgaccccaacaagcgctgggaactttgtgacatcccccgctgcacaacacctccaccatcttctggtcccacctaccagtgtctgaagggaacaggtgaaaactatcgcgggaatgtggctgttaccgtgtccgggcacacctgtcagcactggagtgcacagacccctcacacacataacaggacaccagaaaacttcccctgcaaaaatttggatgaaaactactgccgcaatcctgacggaaaaagggccccatggtgccatacaaccaacagccaagtgcggtgggagtactgtaagataccgtcctgtgactcctccccagtatccacggaacaattggctcccacagcaccacctgagctaacccctgtggtccaggactgctaccatggtgatggacagagctaccgaggcacatcctccaccaccaccacaggaaagaagtgtcagtcttggtcatctatgacaccacaccggcaccagaagaccccagaaaactacccaaatgctggcctgacaatgaactactgcaggaatccagatgccgataaaggcccctggtgttttaccacagaccccagcgtcaggtgggagtactgcaacctgaaaaaatgctcaggaacagaagcgagtgttgtagcacctccgcctgttgtcctgcttccagatgtagagactccttccgaagaagactgtatgtttgggaatgggaaaggataccgaggcaagagggcgaccactgttactgggacgccatgccaggactgggctgcccaggagccccatagacacagcattttcactccagagacaaatccacgggcgggtctggaaaaaaatgctacagagtgcggtggcgccagcacagagctctgctcaacgtccctctgtgctttcacgatgctgatggattatgaaggtcaaggagagcctctggatgactatgtgaatacccagggggcttcactgttcagtgtcactaagaagcagctgggagcaggaagtatagaagaatgtgcagcaaaatgtgaggaggacgaagaattcacctgcagggcattccaatatcacagtaaagagcaacaatgtgtgataatggctgaaaacaggaagtcctccataatcattaggatgagagatgtagttttatttgaaaagaaagtgtatctctcagagtgcaagactgggaatggaaagaactacagagggacgatgtccaaaacaaaaaatggcatcacctgtcaaaaatggagttccacttctccccacagacctagattctcacctgctacacacccctcagagggactggaggagaactactgcaggaatccagacaacgatccgcaggggccctggtgctatactactgattccagaacagagatatgactactgcgacattcctgagtgtgaagaggaatgtatgcattgcagtggagaaaactatgacggcaaaatttccaagaccatgtctggactggaatgccaggcctgggactctcagagcccacacgctcatggatacattccttccaaatttccaaacaagaacctgaagaagaattactgtcgtaaccccgatagggagctgcggccttggtgtttcaccaccgaccccaacaagcgctgggaactttgtgacatcccccgctgcacaacacctccaccatcttctggtcccacctaccagtgtctgaagggaacaggtgaaaactatcgcgggaatgtggctgttaccgtgtccgggcacacctgtcagcactggagtgcacagacccctcacacacataacaggacaccagaaaacttcccctgcaaaaatttggatgaaaactactgccgcaatcctgacggaaaaagggccccatggtgccatacaaccaacagccaagtgcggtgggagtactgtaagataccgtcctgtgactcctccccagtatccacggaacaattggctcccacagcaccacctgagctaacccctgtggtccaggactgctaccatggtgatggacagagctaccgaggcacatcctccaccaccaccacaggaaagaagtgtcagtcttggtcatctatgacaccacaccggcaccagaagaccccagaaaactacccaaatgctggcctgacaatgaactactgcaggaatccagatgccgataaaggcccctggtgttttaccacagaccccagcgtcaggtgggagtactgcaacctgaaaaaatgctcaggaacagaagcgagtgttgtagcacctccgcctgttgtcctgcttccagatgtagagactccttccgaagaagactgtatgtttgggaatgggaaaggataccgaggcaagagggcgaccactgttactgggacgccatgccaggactgggctgcccaggagccccatagacacagcattttcactccagagacaaatccacgggcgggtctggaaaaaaattactgccgtaaccctgatggtgatgtaggtggtccctggtgctacacgacaaatccaagaaaactttacgactactgtgatgtccctcagtgtgcggccccttcatttgattgtgggaagcctcaagtggagccgaagaaatgtcctggaagggttgtaggggggtgtgtggcccacccacattcctggccctggcaagtcagtcttagaacaaggtccccaaggccttcatcctacaaggtcatcctgggtgcacaccaagaagtgaatctcgaaccgcatgttcaggaaatagaagtgtctaggctgttcttggagcccacacgaaaagatattgccttgctaaagctaagcagtcctgccgtcatcactgacaaagtaatcccagcttgtctgccatccccaaattatgtggtcgctgaccggaccgaatgtttcatcactggctggggagaaacccaagaacatttttatttcaattaa

SEQ ID NO: 298 - DNA, 3804 bp, Homo sapiens
  SIMILAR (802)..(2217): 361254mologous to Homo sapiens plasminogen,accession number M74220,Smith-Waterman Score=448.
  misc_feature (1)...(3804): n = a,t,c or g
ctatattcaaggtaatgtttgaaccctgctgagccagtggcatgggtctctgagagaatcattaacttaatttgactatctggtttgtgggtgcgtttactctcatgtaagtcaacaatgtcctgggattgggacacactttctgggcactgctggccagtcccaaaatggaacataaggaagtggttcttctacttcttttatttctgaaatcaggtcaaggagagcctctggatgactatgtgaatacccagggggcttcactgttcagtgtcactaagaagcagctgggagcaggaagtatagaagaatgtgcagcaaaatgtgaggagggccgaagaattcacctgcagggcattcccaatatcacagtaaagagcaacaatgtgtgataatggctgaaaaacaggaagtcctcccataatcattaggatgagagatgtagttttatttttgaaaaagaaagtgtattctcttcagagtgccaagacttgggaatggaaagaactacagagggacgatgtccaaaacaaaaaatggcatcaccttgtcaaaaatgggagttccacttctcccccgcagacctagattctcacctgctacacacccctcagagggacttggaggagaactactgcaggaatccagacaacgatccgcaggggccctgggtgctatactactgatccagaaaagagatatgactactgcgacattcttgagtgtgaagaggaatgtatgcattgcagtgggagaaaactattgacggcaaaatttccaaggaccatgtcttgggactgggaatgccagggcttggggacttttcaggagccccacacggttcatgggatactttccttcccaaattttcccaaacaagaacctgaaggaaggaattactgttcgtaaccccgatagggggcttgcggccttgggtgttttcaccacccgaccccaacaagcgctggggaacttttttgacatcccccgctggcacaacaccttccaccatcttctggtcccacctaccagtgtcttgaaggggaacaggtgaaaattttcgcgggaatgtggctgtttaaccgtgttcggggaaaactgttcagcactgggagtgcacaggaccccttcacacacataacagggacaccaggaaaattttccctggcaaaatttgggatggaaaactacttgccgcaatcctggacgggaaaaaggggcccctggggtgccattacaaccaacaggccaagttgcgggtggggagttattgttaaggttaccgttcctgttgactcctccccagtatccacggaacaattggctcccacagcaccacctgagctaacccctgtggtccagggacttgctacccatgggtgatgggacagagcttaccgaggcaacatccctcccacccacccacccacagggaaagaaagtgtcaagtcttggtccatcctatgacacccacaccggcacccagaagacccccagaaaactaccccaaatgctggcctggacaatggaactactgtcagggattccagatggccgattaaaggccccctggtgtttttaccacaggaccccagcgttcaggtgggagtactgcaacctgaaaaaatgcttcaggaacagaagcgagtgttgttagcacctccgcctgttgtcctgcttccagatgtatatgactccttccgaagaagactgtatgtttgggaatgggaaaggataccgaggcaagagggcgaccacttgttactgggacgccatgccaggactgggctgcccaggagccccatagacacagcattttcactccagagacaaactccacgggcgggtctggaaaaaaattactgccgtaaccctgatggtgagtgtatgtggtccctggtgctacacgacaaatccaagaaaactttacgactactgtgatgtccctcagtgtgcggccccttcatttgattgtgggaagcctcaagtggagccgaagaaatgtcctgggaagggttgtaggggggtgtgtggcccaccccacattcctgggccctggcaagttcagtctttagaacaaggttttggattgcacttctgtggaggcaccttgatatccccagagtgggtcgttgactgctgcccactgcttggagaagtccccaaggccttcatcctacaaggtcatcctggggtgcacaccaagaagtgaatctcggaaccgcatgttcaggaaatagaaagtgtcttaggctgttcttgggagcccacacggaaaagatatttgccttgctaaagctaaggcagtcctgccgttcattcacttgacaaagttaatcccagctttgtctggccattccccaaatttttgtggttcggttgaccgggaccgaatgtttcatcactgggctgggggagaaacccaaggtacttttgggagctgggccttcttcaagggaagcccagctcccctgttgatttgagaataaagtgtgcaaatccgccctatgaagtttccctgaaaatggaaagaagtcccaatcccacccgaaactcctgtgcctgggccattttggcccggaaggccacctgaacaagttgccccccagggtgaacagtggaagggcccctctggtttgccctcnaaaaagggaccaaaataccattttaccaaggaagtccacctccttggggggtcttggcctgtgcacgccccccaataacccccggtgtcctatgttccgtgtttccaaggtttgtttacttgggattgaaggggagttgatggagaaattaattaattgggacgggagacagagtgacgcactgactcacctaggaggctgggaacgtggggtaggggatttagcatgcctggaaataactggcagtaatcaaacgaagacactgtccccagctaccagctacgccaaacctcgggcattttttgtgttattttctgactgctggattctgtagtaatggtgacatagctatgacatttgttaaaaataaactctgtacttaactttgatttgagtaaattttggttttggtcttcaacattttcatgctctttgttcaccccaccaatttttaaatgggcagatggggggatttagctgcttttgataaggaacagctgcacaaaggactgagcaggctgcaaggtcacagaggggagagccaagaagttgtccacgcatttacctcatcagctaacgagggcttgacatggcattttttactgtctttatttcctgacactgagatgaatggttttcaaagctgcaacatgcatggggagtcatgcgaaccgattctgttattgggaatgaaatctgtcaccgactgccttgacttgtgcccaggggacaccggagcagagagctgtatatggatggagtggaaccggttccatgggatgtgttaacacaagaccaactgagagtctgaatgttattctgggggcacacgtgagtctaggattggtgccaagaagcatgtaaatgaacaacaagcaaatattgaaggtggaccacttatttcccattgctaattgcctgcccggttttgaaacagtctgcagtacacacggtgacaggagaatgacctgtgggagagatacatgtttagaaggaagagaaaggacaaaggcacacgttttaccatttaaaatattgttaccaaacaaaaatatccattcaaaatacaatttaacaatgcaacagtcatcttacagcagagaaatgcagagaaaagcaaaactgcaagtgactgtgaataaagggtgaatgtagtctc

SEQ ID NO: 299 - DNA, 454 bp, Homo sapiens
  SIMILAR (230)..(454): 971254mologous to Homo sapiens alpha-2-HS- glycoprotein,accession number M16961,Smith-Waterman Score=399.
  misc_feature (1)...(454): n = a,t,c or g
nattggagtccgctaggccagtgcggnggaattccagttttccgtggtatacgcaaaatgtgattccagtccagactcagccgaggacgtgcgcaaggtgtgccaagactgccccctgctggccccgctgaacgacaccagggtggtgcacgccgcgaaagctgccctggccgccttcaacgctcagaacaacggctccaattttcagctggaggaaatttcccgggctcagcttgtgcccgtgacctcacagccccaaccagaaggtgccaatgaagcagtccccacccccgtggtggacccagatgcacctccgtcccctccacttggcgcacctggactccctccagctggctcacccccagactcccatgtgttactggcagctcctccaggacaccagttgcaccgggcgcactacgacctgcgccacaccttcatgggtgtggtctca

SEQ ID NO: 300 - DNA, 1371 bp, Homo sapiens
  SIMILAR (853)..(1368): 1001254mologous to Homo sapiens gammaS-crystallin,accession number AF161703,Smith-Waterman Score=962.
atgaagtccctcgtcctgctcctttgtcttgctcagctctggggctgccactcagccccacatggcccagggctgatttatagacaaccgaactgcgatgatccagaaactgaggaagcagctctggtggctatagactacatcaatcaaaaccttccttggggatacaaacacaccttgaaccagattgatgaagtaaaggtgtggcctcaggctgtcgaaggagactgtgatttccagctgttgaaactagatggcaagttttccgtggtatacgcaaaatgtgattccagtccagactcagccgaggacgtgcgcaaggtgtgccaagactgccccctgctggccccgctgaacgacaccagggtggtgcacgccgcgaaagctgccctggccgccttcaacgctcagaacaacggctccaattttcagctggaggaaatttcccgggctcagcttgtggtaaagactgagattcttttgacaggtgagcctcacgtggatggggagcctggagatttacggttccgaatcaaagttgtcaagcacccaatatttgaaaggagaggagatgatttgtacacaaatgtgacaatctcattagttgagtcactggttggctttgagatggatattactcacttggatggtcacaaggtacatatttcccgggataagatcaccaggccaggagcgaagctatggaagaaaggggaagggctccccaactttgacaacaacaatatcaagggctctttgataatcacttttgatgtggattttccaaaagaacagttaacagaggaagcgagagaaggtatcaaacagctactgaaacaagggtcagtgcagaagattactttctatgaagacaaaaattttcaaggccgtcgctatgactgtgattgcgactgtgcagatttccacacatacctaagtcgctgcaactccattaaagtggaaggaggcacctgggctgtttatgaaaggcccaactttgctgggtacatgtacatcttaccacagggagagtaccctgaataccagcgttggatgggcctcaacgaccgcctcagctcctgcagagctgttcatctgcctagtggaggccagtataagattcagatctttgagaaaggggattttagtggtcagatgtatgaaaccaccgaagattgcccttccatcatggagcaatttcacatgcgagagatccactcctgtaaggtgctggagggtgtctggattttctatgagctacccaactaccgtggcaggcagtacctcctggacaagaaggagtaccggaagcccatcgattggggtgcagcctccccagctgtccagtctttccgccgcattgtggagtaa

SEQ ID NO: 301 - DNA, 1687 bp, Homo sapiens
  SIMILAR (486)..(1265): 371254mologous to Pan troglodytes alpha2-HS glycoprotein,accession number AB038690,Smith-Waterman Score=257.
  misc_feature (1)...(1687): n = a,t,c or g
ccacccacgcgtccgcccacgcgtccggcacctgggttggtcccgaagccttcaaccacctgcacgcctgcctgccagggcctctctggggcagccatgaagtccctcgtcctgctcctttgtcttgctcagctctggggctgccactcagccccacatggcccagggctgatttatagacaaccgaactgcgatgatccagaaactgaggaagcagctctggtggctatagactacatcaatcaaaaccttccttggggatacaaacacaccttgaaccagattgattgaagtaaaggtgtggcctcagcagccctccgggagagctgttttgagatttgaaattaggacaccctggggaaccaccttgccatgttgttgggaccccacccttgttggccaagatgccagccttgagggcagcttgaaggagcatgctgtcgaaggagactgtgatttccagctgttgaaactagatggcaagtttttccgtggtatacgcaaaatgtgatttccagtcaagactcagccgaggacgttgcgcaaggtgtgccaacacttgccccctgctggccccgctggaacgacaccagggtggtgcacgccgcgaaaagctgccctgggccgcctttcaacgctcagaacaacgggttccaatttttcagcttggaggaaatttcccggcgctcagcttgtgcccctcccaccttctaacctatgtgggagtttacagtgtctgggcactgacttgttgtttgcttaaaagaaggccacagaggcagccaagtgtaacctgtctgggcagaaaagcaatatgggcttttgtaaaggcaacactcagtgagaagcttgggtnggggcagaggttgcagttgacctgcacggtgtttccaaacacagcccgtgaccttcacagcccaacccagaaggtgccaatgaagcagtccccacccccgttggtggacccaagatgcacctccgtcccctccacttggcgcacctggactccttccaagttggctcacccccaagactaccatggtgttactgggcagctcctccaggacaccagttgcaccggggcgcactacgacctgtgccacaccttcatgggtgtggtctcgattggggtcacccttcaggagaaagtgttcgcacccccggaaaaacacggcacagtggttgaagcctagtggttgggtgctgctgctggggccantgggttccttccattgttccggggaggaatcagacacttcaaggtctgaggcttagacatgggcagagatgaggaggtttggcaccagaaaacatagcccaccattttgttcccaancctggggcatggggtggggggcttgtctgctgggccacgcaagtgtcacatgcggttttacatttatatcaagtcttgactccctacttcccgtcattcctcacaggacagaagcagagtgggtggtggttatgtttgacagaaggcattaggttgacaacttgtcatgcattttgacggtaagccaccgatgattgttttctctggcctctgggttgaccttacaaaaacccatttggaactgtgacttttgaaaggtgctcttggctaagcttatatgtgcctgttaatgaaaattgcctgaaagaccttcctttaataaaaaaaggttctaagctgaaaaaaaaaaaa

SEQ ID NO: 302 - DNA, 1778 bp, Homo sapiens
  SIMILAR (1686)..(1525): 611254mologous to Homo sapiens PRO0898,accession number AF130051,Smith-Waterman Score=169.
tggcggtaactcaagcttgacacccgcttgtacagccctcgaaaccgccgctcgacccacgcgtccagcacacgtccggtcagaggagttgtatgaccattactagtagataatcgaacacggataccactactggagaggacgccacagatcctgagcactttctaagtacctggcaatacactaagcgcgctcaccttttcctctggcaaaacatgatcgaaagcagaatgttttgatcatgagaaaattgcatttaatttgaatacaatttatttaccacatataggataatgtatatatcaccaccattactggtatttgctggttatgctagatgtcattttaaaaaataacaatctgatatttaaaaattaaatcttattttgaaaatttccaaagtaatacatgccatgcatagaccatttctggaagataccacaagaaacatgtaatgatgattgcctctgaaggtctattttcctcctctgacctgtgtgtgggttttgtttttgttttactgtgggcataaattaatttttcagttaagttttggaagcttaaataactctccaaaagtcataaagccagtaactggttgagcccaaattcaaacccagcctgtctgatacttgtcctcttcttagaaaagattacagtgatgctctcacaaaatcttgccgccttccctcaaacagagagttccaggcaggatgaatctgtgctctgatccctgaggcatttaatatgttcttattattagaagctcagatgcaaagagctctcttagcttttaatgttatgaaaaaaatcaggtcttcattagattccccaatccacctcttgatggggctagtagcctttccttaatgatagggtgtttctagagagatatatctggtcaaggtggcctggtactcctccttctccccacagcctcccagacaaggaggagtagctgccttttagtgatcatgtaccctgaatataagtgtatttaaaagaattttatacacatatatttagtgtcaatctgtatatttagtagcactaacacttctcttcattttcaatgaaaaatatagagtttataatattttcttcccacttccccatggatggtctagtcatgcctctcattttggaaagtactgtttctgaaacattaggcaatatattcccaacctggctagtttacagcaatcacctgtggatgctaattaaaacgcaaatcccactgtcacatgcattactccatttgatcataatggaaagtatgttctgtcccatttgccatagtcctcacctatccctgttgtattttatcgggtccaactcaacccatttaaggtatttgccagctcttgtatgcatttaggttttgtttctttgttttttagctcatgaaattaggtacaaagtcagagaggggtctggcatataaaacctcagcagaaataaagaggttttgttgtttggtaagaacataccttgggttggttgggcacggtggctcgtgcctggtaatcccaacactttgggaggccaaggcagggctgatcacttgaagttgggagttcaagaccagcctggccaacatggtgaaatcccgtctctactgaaaatacaaaaattaaccaggcatggtggtgtgtgcctgtagtcccaggaatcacttgaacccaggaggcggaggttgcagtgagctgagatctcaccactgcacactgcactccagcctgggcaatggaatgagattccatcccaaaaaataaaaa

SEQ ID NO: 303 - DNA, 1257 bp, Homo sapiens
  SIMILAR (430)..(1254): 991254mologous to Oryctolagus cuniculus elongation factor 1 alpha,accession number U09823,Smith-Waterman Score=1427.
atgggaaaggaaaagactcatatcaacattgtcgtcattggacacgtagattcaggcaagtccaccactactggccatctgatctataaatgcggtggcatcgacaaaagaaccattgaaaaatttgagaaggaggctgctgagatgggaaagggctccttcaagtatgcctgggtcttggataaactgaaagctgagcgtgaacgtggtatcaccattgatatctccttgtggaaatttgagaccagcaagtactatgtgactatcattgatgccccaggacacagggacttcatcaaaaacatgattacagggacatctcaggctgactgtgctgtcctgattgttgctgctggtgttggtgaatttgaagctggtatctccaagaatgggcagacccgagagcatgcccttctggcttacacactggtagcatttgtgccaatttctggttggaatggtgacaacatgctggagccaagtgctaacatgccttggttcaagggatggaaagtcacccgtaaggatggcaatgccagtggaaccacgctgcttgaggctctggactgcatcctaccaccaactcatccaactgacaagcccttgcgcctgcctctccaggatgtctacaaaattggtggtattggtactgttcctgttggccgagtggagactggtgttctcaaacccggtatggtggtcacctttgctccagtcaacgttacaacggaagtaaaatctgtcgaaatgcaccatgaagctttgagtgaagctcttcctggggacaatgtgggcttcaatgtcaagaatgtgtctgtcaaggatgttcgtcgtggcaacgtcgctggtgacagcaaaaatgacccaccaatggaagcagcgggcttcactgctcaggtgattatcctgaaccatccaggccaaataagcaccggctatgcccctgtattggattgccacacggctcacattgcatgcaagtttgctgagctgaaggaaaagattgatcgccgttctggtaaaaagctggaagatggccctaaattcttgaagtctggtgatgctgccattgttgatatggttcctggcaagcccatgtgtgttgagagcttctcagactatccacctttgggtcgctttgctgttcgtgatatgagacagacagttgcggtgggtgtcatcaaagcagtggacaagaaggctgctggagctggcaaggtcaccaagtctgcccagaaagctcagaaggctaaatga

SEQ ID NO: 304 - DNA, 924 bp, Homo sapiens
  SIMILAR (277)..(882): 821254mologous to Oryctolagus cuniculus elongation factor 1 alpha,accession number U09823,Smith-Waterman Score=824.
aaatttgagaccagtaagtactacgtgagtatcattgatgccccaggacacagagacttcatcaaaaacatgattacagggacatctcaggctgactgtgctgtcctgattgttgctgctggtgttggtgaatttgaagctggtatctccaagaatggacagacccatgagcatgcccttctggcttacacactaggtgtgaaacaactaattgttggtgttaacaaaatggattccactgagcaaccctacagccagaagacatatgaggaaatcgttaaagaagtcaacacttacattatgaaaattggctgcaaccttgacacagcagcatttgtgcttatttctgtcaatgttacaactgaagtaaagtctgttgaaatacaccatgaagctttgagtgaagctcttcctggggacaatgtgggcttcaatgtcaagaacgtgtctgtcaaggatgttcgtcatggcaacaatgctggtgacagcaaaaacgacccaccaatggaagcagctggcttcactgctcaggtgattatcctgaaccatccaggccaaataagtgctggctatgcccttgtactggattgtcacacggctcacactgcatgcaagtttgctgagctgaaggaaaagattgatcgctgttctggtaaaaagctggaagacggccctaaattcttgaagtctggtgatgctgccatcatttatatggttcctggcaagcccatgtgtgtagagagcttctcagactatccacctctgggtcactttgctgttggtcatatgagacagacagttgccatgggtatcatcaaagcagaggacaggaaggctgctggagttggcaaggtcactaagtctgcccagaaagctccaaagcctagtgaatattatcccttgtacctgccaccccagtcttaa

SEQ ID NO: 305 - DNA, 913 bp, Homo sapiens
  SIMILAR (70)..(378): 1001254mologous to Oryctolagus cuniculus elongation factor 1 alpha,accession number U09823,Smith-Waterman Score=543.
  misc_feature (1)...(913): n = a,t,c or g
ggaattctggcacgagcngggtttgccgccagaacacaggtgtcgtgaaaactacccctaaaagccaaaatgggaaaggaaaagactcatatcaacattgtcgtcattggacacgtagattcgggcaagtccaccactactggccatctgatctataaatgcggtggcatcgacaaaagaaccattgaaaaatttgagaaggaggctgctgagatgggaaagggctccttcaagtatgcctgggtcttggataaactgaaagctgagcgtgaacgtggtatcaccattgatatctccttgtggaaatttgagaccagcaagtactatgtgactatcattgatgccccaggacacagagactttatcaaaaacatgattatcctgaaccatccaggccaaataagcgccggctatgcccctgtattggattgccacacggctcacattgcatgcaagtttgctgagctgaaggaaaagattgatcgccgttctggtaaaaagctggaagatggccctaaattcttgaagtctggtgatgctgccattgttgatatggttcctggcaagcccatgtgtgttgagagcntctcagactatccacctttgggncgctttgctgttcgtgatatgngacagacagttgcngtgggnggcatcaaagcagtggncaaaaaaggctgctggagctggaaaggcaccaaagnctgccanaaagcncagaaggngaaatgatattatccccaaaacctngcnaccccctnttaatcagtggtgganaccgggcncagaactgttngtnanntggcncttnaggttngnggnaaancntggtaatggnncaatngnncgaaaaccctcnaaagngatgggnatgtttttggcnnccttgggntcctttttgcggggggggtta

SEQ ID NO: 306 - DNA, 1413 bp, Homo sapiens
  SIMILAR (316)..(1410): 961254mologous to Homo sapiens dJ321O10.1 (similar to EEF1A1 (eukaryotic translation elongation factor 1 alpha 1)),accession number AL109752,Smith-Waterman Score=1858.
atgacttcaccaaatgaactaaataaggcaccatggaccaattgtggagaaacaggatggattaaagacttaaatggaaaacccaaaactattaaaatcctggaagacaacctagtcaataccatcctggacataggaacgggcaaagatttcatgacaaagacaccaaaggcaatcgcaacaaaagcaaaaattgacaagtggaatctaattaaatttaagagcttctgcacagcaaaagaaactatcaacagcataaacagacaacctacagaatgggagaaaatattcacaaactatgcatttgataaaggttttgatctgctaacacctgtaatgactactgtatccattaagaacgtgattacagggacatctcaggttgactgtgctgtcctgattgttgctgctggtgttggtgaatttgaagctggtatctccaagaatgggcagaccagtgagcatgcccttctggcttacacactggatgtgaaacaactaattgttggtgttaacaaaatggattccactgagccaccctgcagccagaagagatatgaggaaatcgttaaggaagtcagcacttacattaagaaaattggctacaaccccaacacagtagcatttgtgccaatttctggttggaatgatgacaacatgctggaggcaactgctaacgtgccttcgttcaagggatggaaagtcacctgtaaagatggcaatgccagtggaaccacgctgcttgaggctctggactacatcctaccaccatctggtccaactgacaagcccttgcgcctgcctctccaggatgtccacaaaattggtggcattggtactgtacttggtggtcaagtgaagactggtgttctcaaacccggtatggtggtctcctttgctgcagtcgatgttacaactgaaataaactttattcctgggaacaatgagggcttcaatatcaagaatgtgtctgtcaaggatgttcgttgtggcaacattgctggtgacagcaaaaatggcccaccaatgaaagcagccggcatcactgctcaggtgatcatcctgaaccatccaggccaaatcagtgctggctatactcctgtactggattgccacatggctcacactgcatgcaagtttgctgtactgaaggaaaagattgatcaccgttctggtaagaagctggaagatggctctaaattcttgaagtccggtgatgctgccatcattgatatggttcctggcaacctcatgtgtattgagagcttctcagactatcctcctctgggtcactttggtgtttgtgatatgagacagacagttgctgtgggtgtcatcaaggcagtggatcagaaggctgctggagctggcaaggtcaccaagtctgcccagaaagctcagaaggctaaatga

SEQ ID NO: 307 - DNA, 1389 bp, Homo sapiens
  SIMILAR (76)..(855): 941254mologous to Oryctolagus cuniculus elongation factor 1 alpha,accession number U09823,Smith-Waterman Score=1290.
atggacataaagaagggaataacagacatcagcgcctctttgagagtggagagtggatgggaagccagaacgagaaaggaaaagactcatatcaacactgtgatcatcggacacgtagattcgggcaagtccaccactactggccatctgatctacaaatgcggtggcgtcgacaaaagaaccatcgaaaaatttgagaaggaggctgctgagatgggaaagtgctccttcaagtatgcctgggtcttggataaactgaaagctgagcgtgaacatggtatcaccattgatatctctttgtggaaatttgagaccagcaagtactatgtgactatcattgatgccccaggacacagagacctcatcaaaaacatgattacagggacatctcaggctgactgtgctgtcttgattgttgctgctggttttggtgaatttgaagctggtatctccaagaatgggcagacccgagagcacgcccttctggcttacacactgggtgtgaaacaactaattgttggtgttaacaaaatggattccactgagccaccctacagccataagagatatgaggaaattgttaaggaagtcagcacttacattaagaaaattggccacaacaccgacacagtagcatttgtgccagtttctggttggaatggtgacaacacgctggagccaagtgctaacatgccttggttcaagggatggaaagtcacccgtaaggatggcaatgccagtggaaccacgctgcttgaggctcttgactgcatcctaccaccaactcgtccaactgacaagcccttgtgcctgcctctccaggatgtctacaaaattggtggtattgtcaacgttgcaacagaagtaaaatctgttgaaatgcaccatgaagctttgagtgaagttcttcctggggacaatgtgggcttcaatgtcaagaatgtgtctgtcaaggatgttcgtcgtggcaacgttgctggtgacagcaaaaaggacccaccaatggaagcagctggcttcactgctcaggtgattatcctgaaccatccaggccaaataagtgctggctatgcccctgtattggattgccacacggctcacattgcatgcaagtttgctgagctgaaggaaaagactgatcgccattctggtaaaaagctggaagatggccctaaattcttgaagtctggtgatgctgccattgttgatatggttcctggcaagcccgtgtatgttgagagcttctcagactatccacctttgggtcgctttgctgttcatgatatcagacagacagttgcggtgggtgtcatcaaagcagtggacaagaaggctgctggagctggcaaggtcaccaagtctgcccagaaagctcagaaggctaaataa

SEQ ID NO: 308 - DNA, 2034 bp, Homo sapiens
  SIMILAR (361)..(1299): 301254mologous to Neurospora crassa elongation factor 1- alpha,accession number D45837,Smith-Waterman Score=185.
gcttttttttttttttcgcaacgggtttgccgccagaacacacggtgtctgtgaaaaactaacccctaaaagccaaaatgggaaaggaaaagactcatattcaacattgtcgtcattggacacgtagattcgggcaagtccaccactacttggccatctgatctataaatgcggtggcatcgacaaaagaaccattgaaaaatttgagaaggaggctgctgagatgggaaaggactcattcaagttgtgcctgggtcttggataaactgaaagctgagcgtgaacgtggtatcaccattgatatctccttgtggaaatttgagaccagcaagtactatgtgactatcattgatgccccagggccacagagacttttatcaaaaacatggattacaggggacatctcaaggcttgactgtgctgtcctggatttgtttgcctgctggtgttggtgaattttgaagcttggtatctcccaagaatgggcagaacccgagagcatgcccttctggcttacacactggggtgtggaacaactaattgtcggtgttaacaaaatgggattccactgagccaccctacagccagaagagatatgaggaaatgtggttaagggaagtcagcactttccattaagaaaatttggctacaacccccgacacagtagcattttgtgccaatttcttggtttggaattggtgacaacatgcctggagccaagtgcctaacatgccttggttcaagggatgggaaagtcacccgtaaggatggcaatgccagtggaaccacgctgcttgaggctctggactgcatcctaccaccaactcgtccaactgacaagcccttgcgccctgcctctccagggagtccaccaaattgggtggtattggtactgtctcttctgccccgatggaaacctggtttctccaaccccggtatggtggtcacctttgctcccagtccacggtaacaacggaaagtaaaatcctgtcgaaaatgcacccatgaagctttgaagtgaagctccttcctggggaccaatgtgggccttcaattgtcaggaattgtgtcttgtcaaggaatgtttcgtccgtggcaaacggttgctgggtgaccagcaaaaaatgaccccacccaatgggaaagcagctgggcttcactggtcaggggtgattatccttgacccatcccaggccaaaataaggcgccgggctatgccccttgtattggtattggcgcacacgggctcacatttgcatgcaaagtttgctgagctgaaggaaaaagattgatcgccgtttctggtaaaaagctggaagatggccctaaaattcttgaagtcttggtgatgctgcccattgttgatattgttcctggccaggcccatgtgtgttgagagcttctcagactatccacctttgggtcgctttgctgttcgtgatatgagacagacagttgcggtgggtgtcatcaaagcagtggacaagaaggtctgctggagctgggcaaggtcacccaagtttgcccagaaaggttaggaagggttaatgaaatttattccttaaaccctcccaccccactcttaaaaattttccccaaaagggatttgggtggaaaagaacggttctcagaactgttttgtttcaattggcccatttaaggttaagtagtaaaagcattggttaatgataaccaatgcatcgtaaaaacctttcaaaggaaagggagaatgttttgtgggccccttttgggtttatttttttggcgcggggccgttttaaagttattaagttttttaaaatcccgacttttttaaatgggaaaccacctggacccaaaaatttttgtaaccagaattttgggaacccattaaaaaagttaaatgagaaaaaggatttggggggggcgggcccttttatgagaacccttggggggccccaagttattccgcgggctatggaaaggaaaaaccctttttcccttaaaggggggcccaataaataagcccaaccttggggttcttttgcgaaaaga

SEQ ID NO: 309 - DNA, 729 bp, Homo sapiens
  SIMILAR (397)..(35): 471254mologous to Homo sapiens PRO2987,accession number AF116719,Smith-Waterman Score=143.
aattttgccctcgaggccaagaattcggcgagggcaataagctcctagtcccagacgcccatggggtcatttcacagaggaggaccaaggcttactatccacaagcctgtggggcaaaggttaaatgtggaaaaaatgctggaaggaaaaaacccctgggaaaggcccccctggttgtcctaccccatgggaccccaagaggtcctttgaacaagctttgggcaaccctgtccctctgccctctgcccatcatgggcaaccccccaaagtcaagggcacatggcaaagaaggtgctgaccttcccttggggagatgcccataaagcaccctggatgatcctcaaagggcacctttgcccaagcctgaagtgaactgcacttgtgacaaagctgcatgtggatcctgagaacttcaaagctcctggggaaatgtgctggtgacccgttttgggcaatcccattttcggcaaaagaattcacccctggaggttgcagggcttcctgggcagaaagatgggtgacttggagttggccagtgccctgttcctccaggataccactgagctcactggcccatgattgcagagcttttcaaggataaggcttttattcttgcaagcaattacaaataataaatctatttctgctaagagatcacacatgattttcttcagctcttttttttacatctttttaaatatatgagccacaaagggtttatattgagaa

SEQ ID NO: 310 - DNA, 369 bp, Homo sapiens
  misc_feature (1)...(369): n = a,t,c or g
caccaggttttcctcttttctccttccccgaggggaatgggccctcaaaaaggcaaaccggtgattaaataaggtgccttttttaagacgggaaagtttgggaatgctccccccccnnnnnnnnnnnnnnnnccaagaaaagaaaaaaggctgtcatttttttgtcccagtgcagacaaagtgcattgttgtagaaggaggtgaagagaccttggttggagatgtctaagtgtagccataagcggtccttcaagcatgtggtggcaatgtttcctgaaaaagatgtctctgtactttgtatgaggcaagctttaaaaccaaggaatccagaagagttgatggttttgtgtgtgtgcgtgtgggcaccag

SEQ ID NO: 311 - DNA, 591 bp, Homo sapiens
  SIMILAR (2)..(103): 881254mologous to Macaca fascicularis hypothetical protein,accession number AB047941,Smith-Waterman Score=155.
actgggtgtaaggattcccactgtggctcttcacgtgatggaactgtttgacacaactgtagagcagctgtatagcatcttcactgtaaaggagttaacaaataagaagatcatcatgaaatggagatgtgggaactggccagaaggtatgttactaattactgcccttcatattaaaggtcccaaaacactaaggctaggtttttcgtatggataaattttccttttcataatgcggtaataaggttcctattttttttcttagaacactatgccatggttgcactgaattttgtgcctactctaggggcaaacagaattacaattgaagggagttcctatctatctatctgttaaagaagagaacatggaattctgttgggcagaagcagccttttgaagaaataaaaggtttcactggcagctgacccccctaaatggttgaattaaaatttattataaggcattactttttgtaagcggaaaaagtgtcacatttacctcttccctatcttttgtttaaaaggactgtctttattttatattggatgaaatctatgaacatatatacaatgtaaaaaaaaaaaaaaa

SEQ ID NO: 312 - DNA, 2325 bp, Homo sapiens
  SIMILAR (1627)..(2253): 421254mologous to Homo sapiens putative 38.3kDa protein,accession number AF164791,Smith-Waterman Score=391.
atggctgcttctatagcactggaagctttggaggccttatatggcatcgttaaagaatctggagtgaagcacaagggattgattgaaatacccaatctttctgaggaaaatgaagtagatgacactgagtcaagcttctgctacagacattgggcatttcaaatagtgttgatcagactgtgtggttcctgtgtggtagttcgggtgccttgtggagggcctgtttgccgagaaggattgccgtactgtgggggcagcgtgttgtgtggagctggagtggtacaggaaagagagtcaacgttgagtaaaaagaaaggagatggggttatactgaaggatcttatgaaaactgcaggcactgccaaggtcagggaggcccttggagattacctgaaggcacttaagacggaatttacaacgggaatgattttaccaacgaaagctatggcaacccaggaattgactgtcaaaagaaaactgagtgggaataccctgcaggttcaggcctcatctccagtggcactgggtgtaaggattcccactgtggctcttcacatgatggaactgtttgacacaactgtagagcagctgtatagcatcttcactgtaaaggagttggtgcaaaagttttctaaatctactgctgtattagaaactgaaaagggagggaaattccagatgtttgatgggaacatcactggtgaatatctaggattgttaacaaataagaagatcatcatgaaatggagatgtgggaactggccagaaggtctgaactgcacagatccacttgtatctgggttttctcccaactctggcactcctaaggcagcaaggccaacccctcaccttcctcctcctcttctacttcctgatcaatgtgaagaccatgaggatgaagacctttatgatgacccatttccacttgaagaacagacagagcgggatgccaccagcttgtccaaagggaagttccaggagctcctggtgggcatcgttgtggagaatgacgctggccgcggcgagatcaacgagttgaagcaggtggaaggggaggcttcgtgcagcagccgcaaaggaaagctgattttcttctatgagtggaacatcaaactgggctggaaagaacgtactgtccctttctgtccttccatcgcttttgtgactgcttctccccttcagggtactcctttgtcctgctttgcccaggcaaagagtaccctgggacaagaagaggaatatgggtgcacttgccccacactcctctcaggacggcggactgctgactcctcatgccctctccttggccatggcctgcctgacctttcttccgtggctgctcagggggccctggagtggtggaaccctgtgagggcagctgagctattcagcatcgttaaagaatctggagtgaagcacaagggattgattgaaatacccaatctttctgaggaaaatgaagtagatgacactgagtcaagcttctgctacagacattgggcatttcaaatagtgttgatcagactgtgtggttcctgtgtggtagttcgggtgccttgtggagggcctgtttgccgagaaggattgccgtactgtgggggcagcgtgttgtgtggagctggagtggtacaggaaagagagtcaacgttgagtaaaaagaaaggagatggggttatactgaaggatcttatgaaaactgcaggcactgccaaggtcagggaggcccttggagattacctgaaggcacttaagacggaatttacaacgggaatgattttaccaacgaaagctatggcaacccaggaattgactgtcaaaagaaaactgagtgggaataccctgcaggttcaggcctcatctccagtggcactgggtgtaaggattcccactgtggctcttcacatgatggaactgtttgacacaactgtagagcagctgtatagcatcttcactgtaaaggagttggtgcaaaagttttctaaatctactgctgtattagaaactgaaaagggagggaaattccagatgtttgatgggaacatcactggtgaatatctaggattgttaacaaataagaagatcatcatgaaatggagatgtgggaactggccagaagaacactatgccatggttgcactgaattttgtgcctactctagggcaaacagaattacaattgaaggagttcctatctatctgtaaagaagagaacatgaaattctgttggcagaagcagcattttgaagaaataaaaggttcactgcagctgacccccctaaatggttgaattaaaatttattataaggcattactttttgtaagcgga

SEQ ID NO: 313 - DNA, 893 bp, Homo sapiens
cttaaaacattattatatattcctgctgtccttgatgttactgctgttctgagacattttggcaataaagacaattatcagtggtgctgatgtataaactggaagaaggaccgtatgttgttcattgattcttctaggagtttcaatgaaaggatttttctgtgttgtattgtgggaagtcttaaaagattttcagtggaattttccccctctctttttcagttaacaaataggaagatccatcatgaaaatggagatgtgggaactggcccagaagaacacttatgccatggttgcactgaaattttgtgcctactctagggcaaacagaattacaattgaaggagttcctatctatctgtaaagaagagaacatgaaattctgttggcagaagcagcattttgaagaaaataaaaaggttcctgcaagctgacccccccccaatggttgaattaaaatttattataaggcatatactttttggtaagccggaaaaagtgtcacatattacctcttccctatcttttgtattaaaaagacagtacattattttatattgaatagaaatatatgaacatatatacaatgtaaagcattgtttgactcctttattataactagacactgcattgatttaaaagtagcaaacaacctgaaattaagtattaacctgaccttccatcgatattcctctggaaataggtaagtcctgagtgcagatagttgatgtttgcccaagctgaagcttgtcctataggcaagcttgcttgcaggccgtacttttagttccaagatgccaaagaattaatgggcatgttgacactattcctttattttactttagggtttttaaggtgtgtagatcttaagtcgtaaaacagtggtatattgt

SEQ ID NO: 314 - DNA, 1718 bp, Homo sapiens
  SIMILAR (1391)..(1546): 361254mologous to Homo sapiens putative 38.3kDa protein,accession number AF164791,Smith-Waterman Score=79.
  misc_feature (1)...(1718): n = a,t,c or g
ggatgtcctctgccctgcgcctctggccggggctgtggtccctccaggccgtcgaggggatgctgaggccggtccccagaggagcatgacttggctggtccggaggagctctgagggcatgggcaatcttggctcgctgcaacctcagcttccagagttcaagcgagtctcctgcttcagcctcatgagtagctgggactacagatgcgtgccactacgtccgtctgatgtttgtatttttagtagagacagggtttcaccatgttggtcaggctgctctcgaactccagatctcgtgatccgcccgcctgggcctattaaagtgctgggattacaggcgtgagctagatctgactttctagtgtcctagccttggcccgatggacatgtcatttctctcagctcgtttctgtcccctaaagtgagaatattgcctgggaagattacattagacgatgtatatgcgaagacactttgaatagcctggtattgtcatgattctgattagttcactacttgctactttccctgtggcctaggctttgcctattttccagtgggcgagctagctagatcctcctcccttaaataagccagtgtttttaagacagaatactacttgcatagtggacaataatatcttaaagaactgagcaggatgaaaagaatttgatagaaagcaggtttgaggagcacattgggaggttggcaggtttcgaggctgcttgagaggacttgggccgatctgggctgggctttggacgtgaccctgggcancccaggcaggtggatcccagctggggcttccattcacgactttctggtccctggcaggacagagcgggatgccaccagcttgtccaaagggaaagttccaggagctcctggtgggcatccgttgtggaagaatgacgctggccgcggcgagatcaacgagtttgaagcaggtggaaggggaggcttcgtgcagcagccgcaaaggaaagctgattttcttctatgagtggaacatcaaactgggctggaaaggcatcgttaaagaatctggagtgaagcacaagggattgattgaaatacccaatctttctgaggaaaatgaagtagatgacactgagaatttacaacgggaatgattttaccaacgaaagctatggcaacccaggaattgactgtcaaaagaaaactgagtgggaataccctgcaggttcaggcctcatctccagtggcactgggtgtaaggattcccactgtggctcttcacatgatggaactgtttgacccaacctgtagagcagcttgtatagcatcttcactgtaaaggaggaagagagagtttgtgttttattttctttaacaaataagaagatcatcatgaaatggagatgtgggaacctggccagaagaacactatgccatggttgcactgaattttgtgcctactctagggcaaacagaattacaattgaaggagttcctatctatctatctgtaaagaaaagtaccatgaaatttctgttggcagaagcagcattttgaagaaataaaaggttcactgcagctgacccccctaaatggttgaattaaaatttattataaggcattactttttgtaagcggaaaaagtgtcacatttacctcttccctatcttttgtttaaaaggactgtctttattttatattggatgaaatctatgaacatatatacaatgtaaagcaaa

SEQ ID NO: 315 - DNA, 491 bp, Homo sapiens
  SIMILAR (99)..(383): 971254mologous to Homo sapiens HMG-1 protein (AA 1- 215),accession number X12597,Smith-Waterman Score=483.
  misc_feature (1)...(491): n = a,t,c or g
ggggtgganantttgancccctgggnaatttcgaccccgctgcaggaattcggcacgagtctggctcccgctctcacagccattgcagtacattgagctccattggtgatgttgcgaagaaactgggagagatgtggaataacactgctgcagatgacaagcagccttatgaaaagaaggctgcgaagctgaaggaaaaatacgaaaaggatattgctgcatatcgagctaaaggaaagcctgatgcagcaaaaaagggagttgtcaaggctgaaaaaagcaagaaaaagaaggaagaggaggaagatgaggaagatgaagaggatgaggaggaggaggaagatngagaagatgacgatgaagaagaagatgatgatgatgaataagttggttctagcgcagnnnnnnnnnncttgtctataaagcatttaacccccctgtacacaactcactccttttaaagaaaaaaattgaaatgtnnnnnnnnnnnn

SEQ ID NO: 316 - DNA, 576 bp, Homo sapiens
  SIMILAR (305)..(481): 1001254mologous to Homo sapiens HMG-1 protein (AA 1- 215),accession number X12597,Smith-Waterman Score=303.
atcaaagtctctacattctggttttaatagagttaggatgtggtacataattgcacctcaatgaggcataactttgcaaatattagactatgccatttcatgagttatagattgttataatgatcttgtatttttatgttcatttattgaagttctagttatttctggagttgctgtggatctacagatacgtgatattttggtataactagaatcttgatttctttcataaagttctgccatgttctatttctttccttaatgtttttttcttccctactgttttatcctccctttgctttggaaggatattgctgcatatcgagctaaaggaaagcctgatgcagcaaaaaagggagttgtcaaggctgaaaaaagcaagaaaaagaaggaagaggaggaagatgaggaagatgaagaggatgaggaggaggaggaagatgaagaagatgaagatgaagaagaagatgatgatgatgaataagttggttctagcgcagttttttttttcttgtctataaagcatttaacccccctgtacacaactcactccttttaaagaaaaaaattgaaatg

SEQ ID NO: 317 - DNA, 1601 bp, Homo sapiens
  SIMILAR (212)..(796): 491254mologous to Spalax ehrenbergi high mobility group protein,accession number AF078819,Smith-Waterman Score=375.
tgtggtggaattccggagagagtgaggaggctgcgtctggctcccgctctcacagccattgcagtacattgagctccatagagacagcgccggggcaacgtgagagccggacgggcacatgggcgactctgtgcctcgctgaggaaaaataactaaacatggggcaaaggagatctaaagaagccgagagccaacatgtcatcatatgcattttttgtgcaaacttgtcggggaggagcataagaagaagcacccagatgcttcagtcaacttctcaagagtttttctaagaagtgctcagagaggtggaagaccatgtctgcttaaagaggaaaggaaaatttgaagatatggcaaaagcgggacaaggcccgttatgaaagaggaaatgaaaacctatatccctccccaaaggggaagacaaaaaagaaagttcaaggattcccaattgcacccaagagggcctccttcgggccttctttcctcttcttgctctgagtatcgcccaaaaatcaaaaggagaacatccttggcctgttccattggtgatgttgcgaagaaactggggagagatgtgggaattaacactgctgcagatggacaagcagccttattgaaagaagggctgcgaagctgaaggaaaaatacgaaaaggatattgctgcatatcgagctaaaggaaagcctgatgcagcaaaaaaagggagttgtcaaggctgaaaaaagcaagaaaaagaaggaagaggaggaaggtgaggaagatgaagaggatgaggaggatgaggagattgaagagagatgaagaagatgaagaagatgaagaagaagatgatggattgatgaataagttgggttctggcgcagttttttttttttcttgtctataaagcatttaaacgcccctgtacacaaactcactcccttttaaaggaaaaaaatggaaatgtaaggctgtgtaagatttgtttttaaactgtacagtgtctttttttgtatagttaacacactaccgaattgtgtctttaggatagccctgtcctggtggtattttcaatagccactaacctttgcctggtacagtatgggggttgtaaattggcatggaaatttaaagcaggttcttgttagtgcacagcacaaattagttgtatatgaggatggtagtttttttcatcttcagttgtctctgatgcagcttatacgaaataattgttgttctgttaactgaatacccctctgtaattgcaaaaaaaaaaaaaaaaaagaaaagaaaaagttgcagcgtgttttgttgacattctgaatgcttctaagtaaatacaattttttttattagtattgttgtccttttcataggtctgaaatttttcttcttgaggggaagctagtcttttgcttttgcccattttgaatcacatgaattattacagtgtttatcctttcatatagttagctaataaaaagcttttgtctacacaccctgccatatcataatggggggtaaagttaagtggaaatatttttcttccttacctgaccttccaaattttggatcggtaaaaaatatttccattcccccttaacttttacaaactgaaaag

SEQ ID NO: 318 - DNA, 482 bp, Homo sapiens
  SIMILAR (221)..(448): 971254mologous to Homo sapiens putative ribosomal protein (AA 1-184),accession number X53777,Smith-Waterman Score=379.
  misc_feature (1)...(482): n = a,t,c or g
tgcaaatcaagaggttccaatcttcgtgttcactttaagaacactcgtgaaactgctcaggccatcaagggtatgcatatacgaanagccacgaagtatctgaaagatgtcactttacagaaacagtgtgtaccattccgacgttacaatggtggagttggcaggtgtgcgcaggccaagcaatggggctggacacaaggtcggtggcccaaaaagagtgctgaattctctggtcattgagcatatccaagtgaacaaagcacctaagatgcgccgccggacctacagagctcatggtcggattaacccatacatgagctctccctgccacattgagatgatccttacggaaaaggaacagattgttcctaaaccagaagaggaggttgcccagaagaaaaagatatcccagaagaaactgaagaaacaaaaacttatggcacgggagtaaattcagcattaaaataaatgtaattaaaagg

SEQ ID NO: 319 - DNA, 1728 bp, Homo sapiens
  SIMILAR (64)..(1269): 751254mologous to Homo sapiens myoferlin,accession number AF182316,Smith-Waterman Score=1546.
atggctcataaagaaggagatatgccagctgagcaaggatttggggcaggatatggattcaagagattttatgtgcccatgaaggaaggcttgaagggctcatggtcatttctgaaataccagcgaaggcggaagtacagcctgtctgccgtgtttcattcagccaccatgttgcaagatgttggtgaggccattcagtttgaagtcagcattgggaactatggcaacaagtttgacaccacctgtaagcctttggcatcaacaactcagtacagccgtgctgtatttgatggcaactactattattacttgccttgggcccacaccaagccagttgttaccctgacttcatactgggaggatattagtcatcgcctggatgcggtgaacactctcctagctatggcagaacggctgtatccacaggagaaaaacaacgggccaaaggtgcctgtggagttgcgagtgaacatctggctaggcttaagtgctgtggagaagaagtttaacagcttcgcagaaggaactttcaccgtctttgctgaaatgtatgaaaatcaagctctcatgtttggaaaatggggtacttctggattagtaggacgtcataagttttctgatgtcacaggaaaaataaaactcaagagggaattttttctgcctccaaaaggctgggaatgggaaggagagtggatagttgatcctgaaagaagcttgctgactgaggcagatgcaggtcacacggagttcactgatgaagtctatcagaacgagagccgctaccccgggggcgactggaagccggccgaggacacctacacggatgcgaacggcgataaagcagcatcacccagcgagttgacttgtcctccaggttgggaatgggaagatgatgcatggtcttatgacataaatcgagcggtggatgagaaaggctgggaatatggaatcaccattcctcctgatcataagcccaaatcctgggttgcagcagagaaaatgtaccacactcatagacggcgaaggctggtccgaaaacgcaagaaagatttaacacagactgcttcaagcaccgcaagggccatggaggaattgcaagaccaagagggctgggaatatgcttctctaattggctggaaatttcactggaaacaacgtagttcagataccttccgccgcagacgctggaggagaaaaatggctccttcagaaacacatggtgcagctgccatctttaaacttgaaggtgcccttaacacttgtgaaactgctcaggccatcaagggtatgcatatacgaaaagccacgaagtatcttaaagatgtcactttacagaaacagtgcgtaccattccgacgttacaatgctggagttggcaggtgtgcgcaggccaagcagcggggctggacacaaggtcggtggcccagaaagagtactgaatttttgctgcatatgcttaaaaacgcagagagtaatgctgaacttaagggtttagatgtagattctctggtcattgagcatatccaagtgaacaaggcacctaagatgcgccgctggacctacagagctcatggtcggattaacccatacatgagctctccctgccgcattgagatgattcttactgaaaaggaacagattgttcctaaaccagaagaggaggttgcccagaagaaaaagatatcccagaagaaactgcagaagcaaaaacttatggcatgggagtaa

SEQ ID NO: 320 - DNA, 942 bp, Homo sapiens
  SIMILAR (287)..(688): 471254mologous to Homo sapiens putative ribosomal protein (AA 1-184),accession number X53777,Smith-Waterman Score=194.
ggcacgaggagcaagcctggagggtgcctggattggtgaggcccgtgtggctacttctgtggaagcagtgctgtagttactggaagataaaagggaaagcaagcccttggtgggggaaagtatggctgcgatgatggcatttcttaggacacctttggattaataatgaaccacactctcttctgaagcaagctgttcgaatcatctgatatttatactgaatgagttactgtaagtacgtattgacagaattacactgtactttcctctagggtgatctgtgaaaatggttcgctattcacttgaccccggaggaaccccacgaaaatcatgcaaaatcaaagaggttccaatcttcgtgttccctttaaggaccactcgtgaaaactgcctcaggcccatcaaggggtatgccatatacgaaaaagccccacgaagtatcctgaaagatgtccaccttaccagaaaccagtgtgtccccattcccgaccgttacaaatggggggatttgcaaggtgtgccgcaggcccaagcaatggggcttggacacaaggtccggtggccccaaaaaggagtgctgaattttttgctgcacatgcttaaaaacgcagaagagtaatgctgaacttaaggggtttagatgtagattttcttgttcattgagcatatccaagtgaacaaagcaccctaagatgccgccgccggacctacagagctcatggtcggattaacccatacatgagctctccctgccacgattgagatgactccttacggaaaaggaacagattgttcctaaaccagaagaggaggttgcccagaagaaaaagatatccccagaagaaactgaaagaaacaccaactttatggcacggggagtaaatttcagcattaaaataaatgtaattaaaaggaaaaaaaaaaaaaaaaaaaagtcgacgc

SEQ ID NO: 321 - DNA, 685 bp, Homo sapiens
  SIMILAR (262)..(432): 961254mologous to Rattus norvegicus CDC10,accession number AF142759,Smith-Waterman Score=277.
  misc_feature (1)...(685): n = a,t,c or g
gaggggatgtcggtcagtgcgagatccgctgctgctgaggagaggagcgtcaacagcagcaccatggtagctcaacagaagaaccttgaaggctatgtgggatttgccaatctcccaaatcaagtatacagaaaatcggtgaagagaggttttgaattcacgcttatggtagtggaggtgatgtttcaccatgttgccgtggctaatcttgaactcctgggctcaagcgatccatccgccttggcctcccaaagtgctaggattacaggtgaatctggattgggaaagtcgacattaatcaactcattattcctcacagatttgtattctccagagtatccaggtccttctcatagaattaaaaagactgtacaggtggaacaatccaaagttttaatcaaagaaggtggtgttcagttgctgctcacaataagttgataccccaggattttggagatgcagtggataataagtaattgcctggcagcctgtttatcgactacattgatagtaaatttgaggactacctaaatgcagaatcacgagtgaccagacgtcagatgcctgattaacaggggtgcagtgttgtttatacttcattgctccttcaggacatggactttaaaccattggatattgagtttatgaagcgtttgcatggaaaagtgnatatcatcccncttaa

SEQ ID NO: 322 - DNA, 618 bp, Homo sapiens
  SIMILAR (504)..(536): 721254mologous to Homo sapiens Human secreted protein, SEQ ID NO: 4435,accession number AAG00354,Smith-Waterman Score=44.
cttgaacacctgacctgaagtgatcctcttgcctcagcctcccatagtgctgcgatcacaggtgtaagtcactgagtttggccattattccatttctgtacacaaaaacctttctcattctgtgctataactagttagcatttaaattgggtggatgtggtataactagtgccttgttgatattgatgcatatttacatggttttgctgttataaacaatggtcccttgctattataaatcacactgcttataagtacccttgcatctaaattacttcaaatgtgtaactatattgggtaggataatttctagaagtggaattgtgaacccaaagttttaggtgcatttgtaattttgatttataaccaatcttttcactgatctacttctctgcctctaatttctactaggtgtttgtttgtttgtttgtttgttttgagacagggtcttgctctgtcacccaggctggaggacagtggtgcaatcacggctcactgcagcctcaacctgccacctcagcctcctgaatagttggggtgtgtggcaggtgtataccaccacttccaggtttttttgttgttgttgtttaatagagatgaggtcttgctatattaaac

SEQ ID NO: 323 - DNA, 407 bp, Homo sapiens
  SIMILAR (151)..(264): 781254mologous to Homo sapiens erbB3 binding protein EBP1,accession number U87954,Smith-Waterman Score=152.
cttttgctcccttgaagatctatcctggctataacccagtctaagccagaaatctcagagccctgtgtttccataaccaggtagttgtctcactgcctaccacttcaaactactgaagtgggtggatttggaaaccttttgggatactggatagcttgttccataggttgtgtactatctacaggtatgctgtcacaccagttgaagcagcatgtcatcgatggagaaaaaaccattatccagaatcccacagaccagcagaagtaggtgccaaccctacttattaccttctaccacacaagactagtcatcaggtttttttctatactcccaactgaatcttgtccgccctctactccatgttttcaggagtggacctgtgctcttaatattccctttctctaggc

SEQ ID NO: 324 - DNA, 1779 bp, Homo sapiens
  SIMILAR (1138)..(1776): 901254mologous to Homo sapiens cell cycle protein p38-2G4 homolog,accession number U59435,Smith-Waterman Score=988.
atgtctgccacaggggaccgacacccgacccaaggggaccaggaggccccggtaagccaggagggagcacaggccgaggcggccggagctggtaaccaggagggcggcgactccggccccgacagcagcgacatggtgcctgcggccgaggtggtcggagtcgcagggcccgtggaaggcctcggggaggaggagggtgagcaggcggcaggcctggccgcagtcccccagggcgggagcgccgaggaggactcagatatcgggcccgcgacggaggaagaggaggaggaggaagaggggaacgaggcggccaacttcgacttggcggtggccacccgtcggtacccggcggcgggcattggcttcgtgttcctgtacctggtccactcccttctccgccgcctctatcacaacgaccacatccagatagcgaaccgtcacctcagccgcctgatggtggggccccacgctgctgtgcccaacctctgggacaaccctcccctgctgctgctgtcccagaggctgggtgcaggggctgcagccccagaaggcgagggcctcggcctgatccaggaggctgcgtcggtccaggaggccgcgtcggtcccagagcctgcagtgccagctgacctggccgagatggccagggagcccgcggaggaggccgcagatgagaaacccccagaggaggccgcagaggagaagctcacagaggaggccacagaggaaccggccgcagaggaaccgacctcagaggaggccgtggcccccgagggtaagggggctagcggcagcagcggggaagcggggatccatgtgtccaagggctctgggcagggctgcggtgcgggcacagctggtgaagcgggtgaactagaaataatcagccgctttgggtgggagatttactggaaaaaagggaaatacagtgtccctgtggaaatgatcaagcagcagcaacaagtcactaaatctcagcccgaaaagtgggatgaagaggcccaagatgctgcaggcgaggaagagaaagaacaagaaaaagagaaggatgtggaaaacaaggtgttcaaacgcaaaacctcttcaatggcccttctccctcataccaaatatcaatgcgcacctgaaagccatcagcttgaagcatctagctcaggtgtgttggtactgagcctgtgtgagaaagatgatgccatgattatggaagaaatagggaaaatcttcaagaaaaaaatagaaatgagaaaaggtattgcttttcccaccagcatttcagtaaataactgtatatgtcacttctcccctttgaagagcaaccaggattatattctcaaggaaggtgacttggtaaaaattgaccttggggtccatgtggatggcttcatcgctaatgtagctcatacttttgtggttgatgtagctcaggggacccaagtaacagggaggaaagcagatgtcattaaggcaattcacctttgtgatgaagctgtcctacgcctggtcaaacctggaaaccagaacacacaagtgacagaagccctgaacaaagctgcccactcacttaactgcacgccaatagaaggtatgctgtcacatcagttgaagcagcatgtcatcgatggagaaaaaaccattatccagaatctcacagaccagaagaagaaggaccatgaaaaagcggaattggcggtacatgaagtatatgctgtggatgttctcgtcagctcaggagagggcaagagcaaggatgcaggacagagaaccactatttacaaatga

SEQ ID NO: 325 - DNA, 2728 bp, Homo sapiens
  SIMILAR (411)..(458): 811254mologous to Mus musculus proliferation-associated protein 1,accession number U43918,Smith-Waterman Score=63.
gagagaccacgcttcccctcatgctcctcaacggctccgccttcccgccggagcctgacccttcccagagtgcccggcgattgcggcgtgcgaggcccttggagggcaaggccccagggcctggcttaggagcgcgagaggcaggctgggaattgtagttcgaaggccctcgagagcggctagagtctggcggccgagaggactagttgtcccagcgtgccctgcgcctcagcccgcgcgctcgcagcttctcgctctcgcctgcctgcccgctcccttgcttgctcgcgctttcgctcgccctctcctcgaggatcgaggggactctgaccacagcctgtggctggggaagggagacagaggcggcggcggctcaagggaaacgaggctgcagtggtggtagtaggaagatgtcgggcgaggacgagcaacaggagcaaactatcgttgatgttctctggtcgtgaccaagtataagatggggggcgacatcgccaacagggtacttcggtccttggtggaagcatctagctcaggtgtgtcggtactgagcctgtgtgagaaaggtgatgccatgattatggaagaaacagggaaaatcttcaagaaagaaaacggaaatgaagaaaggtattgccttttcccaccagcatttcgggtaaataactggtgtatgtccacttctccccttttgaaagaagcgacccaggattatattcctccaaggaaggtgacttggttaaaaattgaccttggggttccatgttggatgggcttcatcgctaatgtagcctcacactttttgtggttgatgtagctcaggggacccaagtaacagggaggaaaggcagatgttattaaggcagctcacctttgtgctgaagctgcccctacgcctggtcaaacctggaaatcagaacacacaagtgaccagaagcctggaacaaagttgcccactcatttaactgcacgccaattagaaggtatgctgtcacacagtttgaagcagcatgtcatcgatggagaaaaaccataattccagaatcccacagacaagcagaaagagggcccatgaaaaagctgattttgaggttacatgaagtatatgctgtggatgttctcgtcaagcctcaggagagggcaaggcccaaggatgcaggacagagaaccactatttacaaacgagacccctctaaacagtatggactgaaaatgaaaacttcacgtgccttcttcagtgaggtggaaaggcgttttgatgccatgccgtttactttaagagcatttgaagatgagaagaaggctcggatgggtgtgggtggagtgcgcccaaacatgaacttgctggcaaccatttaatgttctctattaagaagggagggtgattttgtttgcccagtttaaatttacagttctggctcatggccccaatggccccatgcggataaaccagttggtcccttcgagcctgaacttctacaagttctgagatggaggttccaggatgcagagctaaaggccctcctccaggagttctgcaaagtcggaaaaaccccagaaaaagaaaaaaaaagaaggcctccaagactgcaggagaatgccactggtggcattctctgcagtcttggaaacattagaagaaaatgaagcttggggacttgaggtgggtcccatctccccagcttgctgctcctgcctccatcccccttcccaccaaacccccagactctgtgaagtgcagttcttcttctccacctaggaccgccagcagagggggggggattccttggcccccaccccagttccccaacccactcccttccaacaacaaccagctccaactgactctggtcttgggaggtgaggcttcccaaccccggaagactactttaaatgaaaaaaagaaattgaataataaaatcaggagtcaaaattcatcgtcttcaaggcccctctttctagccttttctactactctctgcttggtcaaggtttgtgccccactacagaacaggggctaaattagccaccaccactgaaaactcagccgaatttttttataccactctgatgtcagcattttttccatctgtttggggctttttcctcttttttccattctccccaaatattttatctggcttcaaaattaagaggattatttttcagattgtttttattcagtgtggccgattcctcatctgattcaggctgtccagtcaggccccctccccattttgggacctggagccttcatttatgaagagattctccatcctatgaaatggatcctcatttgtaaatcttttttcttcccattttcaccaaagctgtaaagaaataatccatctcaaaccttacccttttttctctggagtcagtggggtctttcctcgctccatcttacacagaccctgagctggaagcctcaacctggttttgttcccctgtttgaaatattgtgatctccctcccatgaaagaaaaaccaagaaccagaggcgtagactgactgaagacacaactcctggctttctgaagctatggacttggattggattgctgggggtttgtagagaaaggtgacaaatttcagtacctctggcatgctgtcccaggaaactagggctcccactaacttatgaggtttttaaacacattgaaaatgacatgacattaaaataaatttggatatgctcataatgaaaaaaaaaaaaaaaaagtcgacc

SEQ ID NO: 326 - DNA, 532 bp, Homo sapiens
  SIMILAR (232)..(282): 1001254mologous to Homo sapiens Amino acid sequence of the human selenium-binding protein,accession number AAW37940,Smith- Waterman Score=100.
  misc_feature (1)...(532): n = a,t,c or g
ttcaccagctgcttcggtgatagcaccaatgtcgcgcaccaggctggtgtgccccagtctcattcccttttgcatctatgtggtggacgtgggctttagccccggcccccaaagctgcacaagtcatgagcccaaggacatccatgccaagtgcgaactggcctttctccaccatcagcgcttctacaagaacgagggaggtacatggtcagtggagaaggtgatccaggtgcccatgagctccgctaccctgggggcgattgtagctctgacatctggatttgaaccccaccctcatcacccacactccctattttgggccctcacttccttggggacctggcttcattntgctctctcttggcacccgacccttggcagcatgtaccacacagccaagctgagactgtggcaatgtgttgagtcatatacatttactgaccactgttgcttgttgctcactgtgctgcttttccatgagctcttggaggcaccaagaaataaactcgtaaccctgtccttcaaaaaaaaa

SEQ ID NO: 327 - DNA, 2029 bp, Homo sapiens
  SIMILAR (1073)..(1735): 341254mologous to Mus musculus Selenium-binding liver protein,accession number M32032,Smith-Waterman Score=138.
  misc_feature (1)...(2029): n = a,t,c or g
ccgccgggatcaaagtgtaccagtcggcagcatgggtcatgtgtctccagctcttcccagcacaacctcaccctcctcagggctctgagggggcggagaggacaggccagagcgatgaggctggagtggggacctaggccagccgcactgccgtggcccgctgggaatgtgtgctgcagaacgtgcggagggagccttcaccctccagagcgtggcccagccaattgcgccccattgcttccacagctacgaaatgtcgggaattgtggacccggctactccacccctctggaggccatgaaaggacccagggaagagattcgtctacctggccctgcattttaccggaaacacagggcactgagggccccagattatcctgggccactgtggatgttgaccccaagtctccccagtattgccaggtcatccacccggctgcccatgcccaaccctgaaggacgagctgcatcactcaggatgggaacacctgcaggaagctgcttcgggtgattagcaccaagtcgcggaaccaaagctggtgctgcccagttttcatctcctcttcggcatctatgtgggtgggacgtggggctctgagccccgggccccaaagcttgcacaaggttcattgagcccaagggacatccatgccaagtgcgaactgggcctttctccacaccagccactgcctggccagcggggaagtgatgatcagctccctgggagacgtcaagggcaatggcaaagggggttttgtgctgctggatggggagacgttcgaggtgaaggggacatgggagagacctgggggtgctgcaccgttgggctatgacttctggtaccagcctcgacacaatgtcatgatcagcactgagtgggcagctcccaatgtcttacgagatggcttcaaccccgctgatgtggaggctggactgtacgggagccacttatatgtatgggactggcagcgcattgaagattgtgcagaccctgtctctaaaagatgggcttattcccttggagatccgcttcctgcacaacccagaccgctgccccaaggcttttgtggggctgcgcacttcaagctccaaacatccagcgcttcttacaaagaacgaggggaggtacattgttcagtgggagaaggtgattccaggttgcccccaagaaagttgaagggctggcctgctgccgaaaatgccagggcttgatcacgaccattctggcttctccctggaacgacggcttccctctacttcagcaaactggctggcatggggaccctgaggcaagtatgacatctctgacccacagagacccgccctcacaggacagctcttcctcggaggcagcattgtaaaggaaggcccctgtgcaagtgctggaggacgaggaactaagtcccccagcccagagcccctagtggtcaagggaaaacgggtgggtgaaggcccctcagatgatcccagctcagcctggatgggaagcgcctcaacaatcaccacggtcgctgtaccagtgccctgggacaaagcagtttttacccctgatctcaatcaggggaanggctcctggtgaatgctggcagggttgaatggtaagacaacagtaaaaaaggaggggcttgaaagttgaacccccaactttcctgggtggatttcggggaaggagcccctttgcccaagcccttgccccattgagcccgctacccctgggggcggattgtagctcctgacatctggattttgaactcccccccctctcacccacactccctattttgggcccttcacttccctgggggacctgggctttcattctgcatctctcttggcacccggacccttggcaagcatgtaccgacgacagccaagctgagactgtggcaatgtgttgagtcataatacaatttactgacccactgttgcttgttgctcactgtgctgcttttccatgagctcttggaggcaccaagaaataaactcgtaaccctgtccttcggaaaaaagagacctaaaaaaaaaga

SEQ ID NO: 328 - DNA, 1729 bp, Homo sapiens
  SIMILAR (849)..(971): 411254mologous to Chimeric - Homo sapiens Fusion comprising human and eel calcitonin fragments,accession number AAW23378,Smith- Waterman Score=56.
tccacccgagccccctcccccgggccgttcccgagttctaagttggcgggagcctataaaagctggtgccggcgcgacccgcggacacacagtgcaggcgcccaagccgccgccgccagatcggtgccgattcgctgccctgccccgaccgccagcgcgaccatgtcccatcactgggggtacggcaaacacaacggacctgagcactggcataaggacttccccattgccaagggagagcgccagtcccctgttgacatcgacactcatacagccaagtatgacccttccctgaagcccctgtctgtttcctatgatcaagcaacttccctgaggatcctcaacaattggtcatgctttcaaacgtggagtttgatgactcttcaggacaaagcagtgctcaagggaggacccctgggatgggcacttacagattgatttcagttttcacttttcactggggttcattttgatgggacaaggtttcagaggcatactgtgggataaaaaagaaatatgctgcagaaacttaccttgggtcactggaacaccaaatatggggattttgggaaagctgtgcaggaacctgatggactggccgttctaggtatttttttgaaggttggcagcgctaaaccgggccttcagaaagttgttgatgtgctggattccattaaaacaaagggcaagagtgctgacttcactaacttcgatcctcgtggcctccttcctgaatccctgggattactggacctacccaggctcactgaccacccctcctcttctggaatgtgtgacctgggattgtgctcaattttaccttttagcgtcagcagccgagcaggtgtttgaaattccgtaaactttaactttcaatgggggaggggtgaaccccgaagaactgatggtggacaactggcgcccagcttcagccactgaagaacagggcaaatcaaagcttcctttcaaataagatggtcccatagtctgtattccaaataatgaatctttcgggtggtttccctttagctaagcacagatctaccttggtgatttggaccctggttgctttgtgtctagttttctagacccttcatctcttacttgatagacttactaataaaaatgtggaagactagaccaattgccatgctttgacacaactgctggtggctggttggtgcctttgttatgggtagtagttttctgctaacaccagaatataggataagaaataagaataaagtaccttgactttgttccacagcatgtagggtgatgagccactcacaatttgttgacctaaaatgctgcttttaaaaacatgggcaaagtagaatggttgagtgcaaaccccatagccacaagataaattgagcctagttaaggccaatcaggtaaaatagtcatgattctatgtaatgtaaaccaggaaaaaataaatgttcatgatttccaagatgttatattaaagaaaaccttttaaaaattattatatatttatagcaaagttatcttaaatatgaattctgttgtaatttaatgacttttgaattccagagatataaatgaagtattatctgtaaaaattgttataattagagttgtgatacagaggtatatttcccattcagcacaataatattcataacttaataaatattgtattttagatatattctctaataaaattcagaattctaaaaaaaaaaaaaaaaaaaaaaaaaaa

SEQ ID NO: 329 - DNA, 582 bp, Homo sapiens
  SIMILAR (384)..(548): 921254mologous to Homo sapiens PNAS-101,accession number AF274958,Smith-Waterman Score=256.
  misc_feature (1)...(582): n = a,t,c or g
cntgtgaagtcactttgccagccccagaacactggtctcgggcccgagaagacctcctttttcccaggcntttaggtatcaccactaaaatctccaggggcaccattgaaatcctggtgttcgacaatggcagcatctacnaaccctgaagtgcttgatatcacagaggaaactctgcattctcgcttcctggagggtgtccgcaatgttgccagtgtctgtctgcagattggctacccaactgtngcatcagtaccccattctatcatcaacgggtacaaacgagtcctggccttgtctgtggagacggattacaccttcccacttgctgaaaaggtcaaggccttcttggctgatccatctgcctttgtggctgctgccnccttgggctgctgccaccacagctgctctgtntgctgctgcagccccagctaaggttgaagccaaggaagagtcggaggagtcggacgaggatatgggatttggtcnctttgactaatcaccaaaaagcaaccaacttagccagttttatttgcaaaacaaggaaataaaggcttacttctttaaaaaaaaaaaaaaaaa

SEQ ID NO: 330 - DNA, 764 bp, Homo sapiens
  SIMILAR (574)..(687): 921254mologous to Rattus rattus ribosomal phosphoprotein P0 (AA 1-316),accession number X15096,Smith-Waterman Score=163.
  misc_feature (1)...(764): n = a,t,c or g
aaatgtttcattgtggagcagacaatgtggcttccaagcagatgcagcagatccgcatgtcctttcgcggaaaggctgtgtgctgatggggcaagaacaccatgatgcgcaagcccatccgaggcnacctggaaaacaacccagctctggagaaactgctgcctcatatccgggggaatgtgggctttgtgttcaccaaggaggacctcactgagatcagggacatgttgctggccaataaggtgccagctgctgcccgtgctggtgccattgccccatgtgaagtcactgtgccagcccagaacactggtctcgggcccgagaagacctcctttttccaggctttaggtatcaccactaaaatctccaggggcaccattgaaatcctgggtgtccgcaatgttgccagtgtctgtctgcagattggctacccaactgttgcatcagtaccccattctatcatcaacgggtacaaacgagtcctggccttgtctgtggagacggattacaccttcccacttgctgaaaaggtcaaggccttcttggctgatccatctgcctttgtgctgctgcccctgtgctgctgccaccacagctgctcctcgtgctgctgcagccccagctaaggttgaagccaaggaagagtcggaggagtcggacgaggatatgggatttggtctctttgactaatcaccaaaaagcaaccaacttagccagttttatttgcaaaacaaggaaataaaggcttacttctttaaaaagtc

SEQ ID NO: 331 - DNA, 1200 bp, Homo sapiens
  SIMILAR (497)..(1108): 471254mologous to Bos taurus acidic ribosomal phosphoprotein PO,accession number AF013214,Smith-Waterman Score=283.
ggggctctcgccaggcgtcctcgtggaagtgacatcgtctttaaaccccctcgtggcaatcccatgacgcaccgccgtgatgcccagggaagacagggcgacctggaagtccaactacttccttaagatcatccaactattggatgattatccgaaatgtttcattgttgggagcagacaatgtgggctccaagcagatgcagcagatccgaattgttccctggggggaagcttgtgttttgatggggcaaaaaaccatgaatgggccaggcccatccgaagggcaccctgtaaaacaaccccagcctctggagaaaactgctgccttcatatccggggagaatttgggcttttgtttcacccagggaggaccctcacttgagatcaagggacatgtttgcttggccaataaagggttgccaagctggttgcccgttgttggtgccaattgcccccatggtgaaagtcactggtggccagccccagaacactggtcctcggggcccgagaagacttctttttttccagggctttaggctattaccactaaaaatctcccagggggcacccattgaaaatcctgaagtgaatgtgccagctgaatcaagaactggagaccaaagtggggagcccagcgaagccaacgctgcttgaacatgctcaaacatctcccccttcatcctttggggctgggtcatcccagccaggtgtttcgacaaatggcagccatctaccacccctgaaagggctggatattcacagaagaaacctctgcattttttggctttcctgggagggtgtccgcaaatgttgcccagtgtctgtctgccagattggcttacccaactgttgcaatcagtaccccgattctatcatcaacgggtacaaacgagtcctggccattgtctgtggacgccggattacaccttcccacttgctgaaaaggtcaaggcttttcttggctgatccatctgcctttgtggttgctgcaacctgtgggttgttgcccccccagctgctcctggtggttgttgcagccccagctaaggttgaagccaaggaagagtcggaggagtcggacgaggatatgggatttggtctctttgactaatcaccaaaaaagcaaccaactttagccaagttttaatttgcaaaaacaagggaaataaaggcttacttttttaaaaaaaaaaaaaaaaa

SEQ ID NO: 332 - DNA, 569 bp, Homo sapiens
  SIMILAR (397)..(558): 571254mologous to Homo sapiens dJ34B21.2 (PUTATIVE novel protein similar to part of APOBEC1 (Phorbolin 1, Apolipoprotein B mRNA editing protein)),accession number AL031778,Smith-Waterman Score=147.
ttgtcacagatgttaccacagacaagacctatttatagtaagagtgaatgcatttctgaagtactgacctggaagagctacctactctaggctggttctagaaacaagaacttatcattctttcctgtccttttgtctccttgacctacagagaacggctgcctgccaacttctttaaattccagttccggaatgtggagtacagttccgggaggaacaagaccttcctctgctatgtggttgaagcacagggcaaggggggccaagtgcaggcatctcggggatacctagaggatgagcatgcggctgcccatgcagaggaagctttcttcaacaccatcctgccagccttcgacccagccctgcggtacaatgtcacctggtatgtgtcctccagcccctgtgcagcgtgtgctgaccgcattatcaaaacccttagcaagaccaagaacctgcgtctgctcattctggtggggtcgactcttcatgtgggaggagccggagatccaggctgctctgaagaagctgaaggaggctggctgtaaactgcgcatcatgaacctcgtgcc

SEQ ID NO: 333 - DNA, 464 bp, Homo sapiens
gtggtctcattcaggtcctttacatgaagctgaaaggtgagaatattgtcagaccaacacatcaagagaaactatttgctggataagccactagtaaagttctgatgatccttcataaactcttttctaccaatccctagaagtaatcatggtgaagaacataaccccagaatgtcgtcacatgttttatgcacgcatttaaaaagggcaaagaggatgtacctcttcacccattactttgtccggagcttttggtctattctcaggtctagtgtgatacacccacatcctgagacagctaccgacgctgcgacatgaacagaaaagcagggaaaactgtctggaagagatgtccttggatagatttcaagctgctaaacctgtcccccactcccacccaccacacgtacaaaccaaccctggcaggacactagaaaatacacgctatgggtttaactcgtgcc

SEQ ID NO: 334 - DNA, 1960 bp, Homo sapiens
  SIMILAR (152)..(238): 861254mologous to Homo sapiens dJ34B21.2 (PUTATIVE novel protein similar to part of APOBEC1 (Phorbolin 1, Apolipoprotein B mRNA editing protein)),accession number AL031778,Smith-Waterman Score=119.
tccgaattgccgcgtcgacccacgcgtgcgcccgtcatccccagccagatttagctgctgacagctgcgttgggactctggcgccagggcctggcccagacctgcctgcctctctcctctccctcagagactcctgagccacagcccctccatggcccagaaggaagaggctgctgtggccactgaggctgcctcccagaatggggaggatctggagaacctcggacgaccctcagaagctgaaagagctgattgagctgccgccctttgagattgtcacaggagaacggctgcctgccaacttctttaaattccagttccggaatgtggagtacagttcccgggaggacaaagaccctccctctgctatgtggtttgaagcacaggggcaagggggggcaaagttcaggcatcttgggggatacctagaggatgagcgatgcggcttgcccattgcagaaggaaagcttttctttcaacaccatcctgccagcctttcgacccaagccccttgcggttaccaatgtcacctgggttatgtgtcctccagcccctgttgcagcgtgtgctgaccgcatgagtcaaaacccttagcaagaccaagaacctgcgtctgctcattctggtgggtcgactcttcatgtgggaggagccggagatccaggctgctctgaagaagctgaaggaggcttggctgtaaacttgcgcatcatgaagccccaggactttcgaatattgtcttgggaagaattttgtggagcaaggaagagggtgaatccaaggcctttcagccctgggaggacattcaggagaacttcctatactacgaggagaagttggcagacatcctgaagtagggcaactgggctttgcctcaagtattcctgctgccacccaagagccagccaatgacatgtacagccatctgggacatgcctgtcttcctaataccatttgggagctgggacaacatttggacaccaaccaatcatactgggacaagggccctagaggacttgaaatatacttctcatgctggtagtttatttaggctgtgacctctctctcctaatgctgctctcggggaaggacgaaagtgacactgcacggagagaaatgcaaccatacatgggctccgagtcgaactatgggactgaaggtcctaattgctcacccaagggggctgcttaacacaaacagcctcagacccgaggtttagatttctgaaatatgcattttatgttaagttgggtattttttttaaaaaaagaaaaacagcaacattaataaaagaagtggtgtgtttttcccgtggccagatttttaagaaacttgaacatctggaagttgccacagacaagcgagctagtcccagacaccagggacacttcccaggctatgaaccaagcccatggttaaaccaagacttgcctagacaatgcagaataactctcccatacagacttcttacgacaatcaagtgagggcctttcccttctctgaaggcaagttaataaggcagaaggtggaacaaaaagtatgataattctaatgtagccacatcccaaatgccagataataagcaactagcttttttattagagaggagcgggtgaaaagtagtagtttaatgttcagatatacaatcatttaaaagtattcaatacatggtgtttgatggtaatggcaggatgatgtcaagtctctctttttttttttttaaaggtttgtttgagtcctatgtggaagcaaaaattcacaggtgaatttccgggtgtttgccaaactctaactaggtttccaggaataatgtgttcactctgattaccagggcatgcctcctttcctcaggcttcaagtgtgataagtcgtcggaatttgacccaagactactatcggcaaatgacaaagtgctttatcacattcctgctaagtcccagaattccacttacagccaatc

SEQ ID NO: 335 - DNA, 727 bp, Homo sapiens
  SIMILAR (549)..(725): 771254mologous to Homo sapiens guanine nucleotide-binding protein G-s-alpha-3,accession number M21142,Smith-Waterman Score= 208.
aacaccgaggaccagcgcaacgaggagaaggcgcagcgtgaggccaacaaaaagatcgagaagcagctgcagaaggacaagcaggtctaccgggccacgcaccgcctgctgctgctgggtgctggagaatctggtaaaagcaccattgtgaagcagatgaggatcctgcatgttaatgggtttaatggagatgagaaggcaaccaaagtgcaggacatcaaaaacaacctgaaagaggcgattgaaaccattgtggccgccatgagcaacctggtgccccccgtggagctggccaaccccgagaaccagttcagagtggaccacattctgagtgtgatgaacgtgcctgactttgacttccctcccgaattctatgagcatgccaaggctctgtgggaggatgaaggagtgcgtgcctgctacgaacgctccaacgagtaccagctgattgactgtgcccagtacttcctggacaagatcgacgtgatcaagcaggctgactatgtgccgagcgatcaggacctgcttcgcttgccgtgtcctgactttctggaatcttttgagaccaagttccaggtgggacaaaagtcaacttccacattgtttgacgtggggtgggccagcgcgatgaacgccgcaagtggatccagtgcttcaacgatgtgactgccatcatcttcgtggtggccagcagcagctacaacatggtcatccgggaagacaacca

SEQ ID NO: 336 - DNA, 1641 bp, Homo sapiens
  SIMILAR (2)..(1111): 881254mologous to Homo sapiens alpha subunit of GsGTP binding protein,accession number X56009,Smith-Waterman Score=1673.
gccggttagaagctctgctccccggcggggacactcagtcgcgtcggcaccgcggagcgggctgcgtcaggtggctggccggcgcggcgcggcgctcccctgctctctggctccgggctgcggcgcggcggctggagcgagcccctgtcccggcgcggggcggcggcgggcggccggcgggcgctgccttgcgtgtgagtgcacctcactcacatgtgctggagaatctggtaaaagcaccattgtgaagcagatgaggatcctgcatgttaatgggtttaatggagagggcggcgaagaggacccgcaggctgcaaggagcaacagcgatggtgagaaggcaaccaaagtgcaggacatcaaaaacaacctgaaagaggcgattgaaaccattgtggccgccatgagcaacctggtgccccccgtggagctggccaaccccgagaaccagttcagagtggactacattctgagtgtgatgaacgtgcctgactttgacttccctcccgaattctatgagcatgccaaggctctgtgggaggatgaaggagtgcgtgcctgctacgaacgctccaacgagtaccagctgattgactgtgcccagtacttcctggacaagatcgacgtgatcaagcaggctgactatgtgccgagcgatcaggacctgcttcgctgccgtgtcctgacttctggaatctttgagaccaagttccaggtggacaaagtcaacttccacatgtttgacgtgggtggccagcgcgatgaacgccgcaagtggatccagtgcttcaacgatgtgactgccatcatcttcgtggtggccagcagcagctacaacatggtcatccgggaggacaaccagaccaaccgcctgcaggaggctctgaacctcttcaagagcatctggaacaacagatggctgcgcagccatctctgtgatcctgttcctcaacaagcaaagatctgctcgctgagaaagtccttgctgggaaatcgaagattgaggaactactttccagaaatttgctcggctacactactcctgagggatgctactcccgagccccggagaggacccaagcgtgaacccgggccaagtaacttcattcggagatgagtttctgaggatcagcactgccagtggagatgggggtcactactgctaccctcatttcacctgcgctgtggacactgagaacatccgccgtgtgttcaacgactgccgtgacatcattcagcgcatgcaccttcgtcagtacgagctgctctaagaagggaacccccaaatttaattaaagccttaagcacaattaattaaaagtgaaacgtaattgtacaagcagttaatcacccaccatagggcatgattaacaaagcaacctttcccttcccccgagtgattttgcgaaacccccttttcccttcagcttggtttagatgttccaaatttagaaagcttaaggcggcctacagaaaaaggaaaaaaggccacaaaagttccctctcactttcagtaaaaataaataaaacagcagcagcaaacaaataaaatgaaataaaagaaacaaatgaaataaatattgtgttgtgcagcattaaaaaaaatcaaaataaaaattaaatgtgagcaaagaaaaaaaa

SEQ ID NO: 337 - DNA, 2008 bp, Homo sapiens
  SIMILAR (295)..(1482): 641254mologous to Homo sapiens guanine nucleotide-binding protein G-s-alpha-2,accession number M21142,Smith-Waterman Score= 1069.
ctcctgctctggtccgcctcggcccggcggcggccatcagccccctcggcctcggctcgaggggcggggagctgcgcgcgcccctcggtccgaccgacaccctccccttcccgcccgtccgcgcgccccgcggcccgcggcccgcagtccgccccgcgcgctccttgccgaggagccgagcccgcgcccgggcccgcccgcccggcgctgccccggccctcccggcccgcgtgaggccggccgcgcccgccgccgccgcagcccggccgcgccccgccgccgccgccgccgcgcatgggctgcctcgggaacagtaagaccgaggaccagcgcaacgaggagaaggcgcagcgtgaggccaacaaaaagatcgagaagcagctgcagaaggacaagcaggtctaccgggccacgcaccgcctgctgctgctgggtgctggagaatctggtaaaagcaccattgtgaagcagatgaggatcctgcatgttaatgggtttaatggagagggcggcgaagaggacccgcaggctgcaaggagcaacagcgatggcagtgagaaggcaaccaaagtgcaggacatcaaaaacaacctgaaagaggcgattgaaaccattgtggccgccatgagcaacctggtgccccccgtggagctggccaaccccgagaaccagttcagagtggactacatcctgagtgtgatgaacgtgcctgactttgacttccctcccgaattctatgagcatgccaaggttctgtgggaggatgaaggagtgcgtgcctgctacgtaacgctccaacgtagtaccagctgattgactgtgcccagtactttctgggacaaagatcgacgtgatcaagcaggctgacttatgtgccgagcgatcaggacctgcttcgcttgcccgtgtcctgacttcttggaatcttttgagaccaagttccaggtggacaaagtcaactttccacatgttttgacgtgggtggccagccgcgatgaacgccgcaagtggatccagtgcttcaaacgatgtgactggccatcatcttcgtggttggcagcagcagctacaacattggtcatccgggaggacacgggacacaacggccttgcaggaaggctctgaacttctccaaaaggcatctgggacaacagatgggctgcggcaccatctcttgtgatcctgttcctcacaaagcaaagatcctgctcgcttgagaaagtcccctggcgggaaattcgaagaattaaggactactttccagaaatttgctcggctacactactcctgagggatgctactcgcgaaggcccggagaaggaccccacggcgtgtaccggggccaagttactccattcgaagatgagtttctgagatcaagcaactgcccagtggaagatgggcgtcactactgctaccctcattttcacctgcgctgtggacactgagaacattccgccgtgtgttcaacggacttgccgtggacattcatttcagcggcatgcacctttcgttcagttacggagctggttttaaggaaggggaaccccccaaatttaatttaaaggcttaaagcacaatttaattaaaagtgaaacgttaattgttacaagcagttaattcacccaccctaggggcatgattaacaaaacaaaccttttcccttccccggagtgattttgcgaaaccccccttttcccttcagcttgctttagatgttccaaattttagaaaagcttaaggcggcctacagaaaaagggaaaaaaggccacaaaagttccctctcactttcagtgaaaataaataaaacaggcagcagcaaaccaataaaatggaattacaggaaacaaatggaataaatattggtgttgttgcagcattaaaaaaaaatcaaaaataaaaattaaatgtgagcaaagaaaaaaaaaaaaaaaaaaagggcggccgctctagagtatccctcgaggggcccaagcttacgcgtacccagctttcttgtacaaagtg

SEQ ID NO: 338 - DNA, 784 bp, Homo sapiens
  SIMILAR (45)..(437): 1001254mologous to Homo sapiens FLJ00008 protein,accession number AK024419,Smith-Waterman Score=720.
agcctttgtttgttgtatttcctctgtctccagacatcgcaggccggccgggcggcgttgttggcgggggccccggtggaggcccggcctgggcggcgcccgccatgaatgggctgtcgctgagtgagctctgctgcctcttctgctgcccgccctgccccggccgcatcgctgccaagctcgccttcctgccgccggaggccacctactccctggtgcctgagcccgagccggggcctggtggggccggggccgcccccttggggaccctgagagcctcctcgggcgcacccgggcgctggaagctgcacctgacggagcgtgccgacttccagtacagccagcgcgagctggacaccatcgaggtcttccccaccaagagcgcccgcggcaaccgcgtctcctgcatgtatgttcgctgcgtgcctggtgccagacaaggacaccaggctcagggaggccatccccagctggcatgggtgggcaggctgggcgactccaacaacccagcgcctggtggttgcctgctgggcaagagctggggcacaggggctgccctggcctgcgggtacatccaccttctcgccaggtacacggtcctcttctcgcacggcaatgccgtggacctgggccagatgagcagcttctacattggcctgggctcccgcctccactgcaacatcttctcctacgactactccggctacggtgccagctcgggcaggccttccgagaggaacctctatgccgacatcgacgccgcctggcaggccctgcgcaccag

SEQ ID NO: 339 - DNA, 2255 bp, Homo sapiens
  SIMILAR (311)..(580): 701254mologous to Mus musculus Similar to CGI-67 protein,accession number BC005632,Smith-Waterman Score=323.
  misc_feature (1)...(2255): n = a,t,c or g
cgcccgccatgaatgggctgtcgctgagtgagctctgctgcctcttctgctgcccgccctgccccggccgcatcgctgccaagctcgccttcctgccgccggaggccacctactccctggtgcctgagcccgagccggggcctggtggggccggggccgcccccttggggaccctgagagcctcctcgggcgcacccgggcgctggaagctgcacctgacggagcgtgccgacttccagtacagccagcgcgagctgnagcaccatcgaggtcttccccaccaagagcgcccgcggcaaccgtgtctcctgcatgtatgttcgctgcgtgcctggtgccaggtacacgggtcctcttctcgcacggcaatgccgtggacctgggccagatgagcagcttctacattggcctgggctcccgcctccactgcaacatcttcacctacgactcctccggctacggtgccagctcgggcaggccttccgagaggaacctctatgccgacatcgacgccacctggcaggccctgcgcaccaggtgagggcgaccctgggggcagctcagcctggcgggagggagtgggtggtggtctgggggtctgtgcacgtgtggctgggagcccatcggctgaggcagcacttggggccaagtgaggcgaggctgctgcatccaggtccggaggactggcccatgaggccctgtggctgcggagcttggccatcctgccatggccagctctgagctctgtctgctcggccatctgtcctgctgcccctttgtcctgcaggaacctaggcccagagccatgagggggaggccagagcgtgcccagggcctccactggggatgtgtcccgttcgtttgagtggtgacatccaggtggcagctgggggctcctgcctgcccatgctcctgccttgcaagagggcgtctgcctgggatcagagcctagagcgtgtgggaggagagttgtggggtcccggcatgggcagggtggcaggtgggtcccgcgtgcttgggactgggcacgaggaggccttgtaactggtgctggatcagctgggtcaggggccgcacaccaatgacctgggggtgagggtgcccctgggtgggagctggtggtgctgaggtggccgaggacttgtccactcccaagggaaggtgctggtgggagggggtgccacctccgcagccaccaccctcgatgctgacctgggttgcactggcatctcactgggcgtggggactccgagagtccaaaattgggtggagacatttggggacacagctgcctgaattcctcatggccaagggggtgggcaagggctgcagggaggaagagtgtccgctgtcctggccagtgcaccaggaacggctttctaacccgggcaggaaggtatgaagcattcaggatgtgggggccacacagttcccagtgtgcactgacttggctgagtggggagactggagggtcgcatccggagctgggcccggggacgcccgctggtgggaagggtgcgcgcgcgttggaggccgcggctgaccctgctccggcgccgccaggtacggcatcagcccggacagcatccatcctgtacgggcaggagcatcggccacggtgccccaccgtgggactgggcctcgcgctacgagtgtgccgcggtgatcctgcactcgccgctcaacctcgggcatgcgcgtcgcattcccagacacccaagaaagacctactgcttcgacgcctttcccctacattcgagaaaggtgtccaagattaacgtctccccgtgctcatcatcccacgggcacgaaggacgaggtgatcgactttctcgcacgggctgggcgctctacgaggcgctgccaccaaggcgggtggagccgctgtgggtggagggggccccgggcacaaccgacatcgagcctctacagccagtacctggagcggctggcgtcgctttcattctcccaggagctgcccagccagcgcgcctagcggcggcccccaaccggccggacctcagcaataaggcggcccccggacttcaccccgcgccggcccccacccaggggcttgcatgtggaccccccgggcggccccggtggaggcccggcctgggcggcgcccgccatgaatgggctgtggacgatgtacaggcaacgagacgtacgcactcctttccttttggaagcaagaagaaaatacgtgaaaacggacaattaaagatttaaaattttaaaaaaaaaaaaaaaaa

SEQ ID NO: 340 - DNA, 1350 bp, Homo sapiens
  SIMILAR (37)..(333): 891254mologous to Plasmid F Protein E,accession number M12987,Smith-Waterman Score=475.
atgaccagcacagtcttactgcaacgaggatcccgaatgaagagtttcgcggggaaggaagtggttttttatcgccctgaagaggatgccggcgatgaaaaaggctatgaatcttttccttggtttatcaaacgtgcgcacagtccatccagagggctttacagtgtacatatcaacccatatctcattcccttctttatcgggttacagaaccggtttacgcagtttcggcttagtgaaacaaaagaaatcaccaatccgtatgccatgcgtttatacgaatccctgtgtcagtatcggagaacctccctttcaaagttctttatggttaaaggtgtggaaaggacccccatttttggtggactggatcccagctcagttattccagaaggagatctaggaaatgagtcttctctcgggaatctggtctggtttgtggacattttacaagggaacagcccagcccgatcacctggtaaagttcacagacagtatagcacacttagagcttctagtctctttttttctccatattcttcaatacagcagacaattggattaccagagttaagagaaagcttagccattgacagaagtcaaagtgaacatcaacaaaaaccaatctggacttgcgcggaggcttttcttgttgttattttcgggcagaagagtcaggttgccatcgcggcagagaattggcgggaggaagagcctcaagcaggtccttcaggaggtgttccagaaggcattgctgtcagagatgacagctccatgcgtgttgttgtcccagaagaccttctagtgggagaagacgtggaggtgaaagatgaccgtgtacagaccaaccccaaggcaccaatttccagaagcttcaaagcatccgagagcaaaaattttcagaagcaacacgagatgacggaagcagaaggaagagaatataaaggatatgcaaggatttcttgttttcagaagtttggaaacctagtgccctccagaggtcatatagcccttgcccgtgctccagaagagcctcaagcaggtcctttcggaggtgttccagaaggcattgctgtcagagatgacagctccctgcgtgttgttgtcccagaagaccttctagtgggagaagacgtggaggctgagcagcagaaaaaggtggccatcatctctgctgagggctactccaaggcagctgagctgattgccaactcactggccaccgcaaggatccgcctgatggagctctgcaagctggaagctgcggaggacatcgcgtaccagctctcacgctctcggaacatcacctatccgccggctgggcagtccgtgctcctccagctgccccagtga

SEQ ID NO: 341 - DNA, 1525 bp, Homo sapiens
  SIMILAR (287)..(943): 431254mologous to Homo sapiens prohibitin,accession number S85655,Smith-Waterman Score=271.
  misc_feature (1)...(1525): n = a,t,c or g
agagatctgaagtgattttacctttatttccttcactttaagccaatcatgaaatttcagagtggaagcaggtgtgagaggtgttcagcagaaggaaacatgtgctttcaaagtgctagagtccattggcaagttgggccgtggccttatctgttgcaggaggcgcggagaactctgccttatataatgtggatgctgggcacagagctgtcatctttgaccngattccaggacaaaaatgacaggacattgtggtaggggaagggactcattttcgtcatcccggtgggtacagaaaccccaattatctaatgactgccgttctcgaccacgtaactgttgccagtcaatcactggtagcaaaagatttacagaatgtccaacatcacactgcggcatccctcttccgggcctgttcgccagcccagctttcctcgcatcttcaccagcatcggagaggacttatgatgagcgtgtgcttgccgtcccatcacaactggagaacctcaaggtcagtgtgggctcgctttgatgctgggagaactaatcacccagaggagagctggtctccaggcaggttgagcgacgacctttacagagcgagccggccacctttgggctcatcctggatgacgtgtccttgacacatctgaccttcgggaaggtatttcacataagcggtgggaagccaaacaggtggctcagcaaggtaagcagagaagggccagatttgttggttggaaaaggctgagcaacagaaaaaaggcggccatcatctctgctgagggcgactccaaggcagctgagctgattgccaactcacttggccactgcaggggatggcctgatcgagctgcgcaagcttggtaagctgcagaggacattcgcgtaccagctctcaacgctctcaggaacatcaccttacctgccagcggggcagtcctgtgctcctccaagctgccccagttgagggcccacccttgccttgcacctcccgcgggcttgacttggggccacagccccgattgattcttaacacagccttccttctgcttcccaccccagaaatcaattgtgaaattttcatgattggcttaaagtgaaggaaataaaggtaaaatcacttcagatctctaattagtctatcaaatgaaactctttcattcttctcacatccatctacttttttatccacctccctaccaaaaattgccaagtgcctatgcaaaccagctttaggtcccaattcggggcctgctggagttccggcctgggcaccatgcatttggcagcacgcaggcgggtgcagtatgtgatggactggggagcacaggtgtctgcctagatccacgtgtggcctccgtcctgtcactgatggaaggtttgcggatgagggcatgtgcggctgaactgagaaggcaggcctccgtcttcccagcggttcctgtgcagatgctgctgaagagaggtgccggggaggggcagagaggaagtggtctgtctgttaccataagtctgattctct

SEQ ID NO: 342 - DNA, 1606 bp, Homo sapiens
  SIMILAR (992)..(1129): 731254mologous to Homo sapiens Human myelin oligodendrocyte glycoprotein gene,accession number AAZ29204,Smith-Waterman Score= 176.
  misc_feature (1)...(1606): n = a,t,c or g
nnnnnnnnnnnnnnnnnnnnnnnnnnnnnnnnnnnnnnnnnnnnnnnnnnnnnnnnnnnnnnnnnnnnnnnnnnnnnnnnnnnnnnnnnnnnnnnnnnnnnnnnnnnatagagacagggtctcaccatgtaggccagattagtcttgaactcctgggctcaagcaatccgcccatcttggcctcccaaagtgctgggattataggtgtgagccaccgcgcccggcaacccagaagtggttttgacagcaccagcgctttctgtgtccacaatctagtgagtagagggcacaaaacctgacaccacggaggcagacaggcaggggctctgccggggaagggtgttggagtcccaaaggaggcgtctgagtcaccttcgcaacctgggaagccttcttgcataagatgcctgagcagtgccttgaatgaccaaggggagatccgcatctgcaaaggaagggcagggagggatagggattgggggtgggcatcctaggtcttggagactgtgtgggcaaatgtgcagagacataaagggactatggctgagggaaatcaagccctgccctctcaccaatagggctggcgctggtcccagctaacactccttttggagagcaaagctcctcacttctgagtagtgagattgattgcggatcactctccatgttgctgcctgctgtgtgtcatcccactgtcatcctccctttgtggctgttctgtggagcccctctccctcaatctgcactcacctctatgccccagccccattggcagctcctaatgcactcccggtaaaaaaaaaaaaacaaaaaccagatgttagtgatagtggtggtagttcttctctccacctccaaatcttgcccttgcctcctaataagacccctatgtggtttaacctcattttttttttttttttttttttttgagatggagtttcactctgtcacccaggctggagtgaagtggtgtgatggggcttcaccatgtgatggggcttcaccatgttggccaggctggtatcaaactcctgacctctagtgatccgcccgcctcagcctcccaaagtgctgggattaccggcatgaggcaccgtgcccagcctatcctccttctcttatcagctcccaactagaggtccacccaggacccagagacctggatttgaggctgctgggcggcagatggagcgatcagaagaccagggtaagggtgtggcagatactgccactaacacttctcagcctttccttctcctgccttttccaccccaccctgtgtttgtctactcccagccaggtgtacctttccaggggaagacctggccaacctgtccagctcaattatccagcagttctttgacctcactgagatctcgagtccattgttcatcacctcagctattgacctgtgtcattagccttatagagttcagcgccacggaaactccctgccctgttctttttctttttctttttttttttttttttgagacagagccttgctctgtcgcccaggctggagtgcagtggcgcgatctcggctcactgcaagctctgcctcccaggttcacaccattctcctgactcagcctcccgagtagcc

SEQ ID NO: 343 - DNA, 429 bp, Homo sapiens
  SIMILAR (3)..(368): 821254mologous to Homo sapiens Human flavin-containing mono- oxygenase isoform x,accession number AAW49700,Smith-Waterman Score= 503.
tgtccatcaagcccagtgtgaaggagttcacggaaacctcagctgtgtttgaggatgggaccatgtttgaggctatcgactctgtcatctttgcaacaggctatgattattcctaccccttccttgatgagaccatcatgaaaagcagaaacaatgaggttaccttgtttaaaggcatcttccccccactaatggagaagccaaccttggctgtgattggcttggttcagtcccttggagctgccatccccacagcagacctgcaagcctggtgggctgctaaagtatttgcaagtaggtgggccattctgtctttcattcattttatcaatgaacatttactgaacacctgctataaactcaagtggtaagcagctaactgtacttgctaatagagcaagtcctaaaatgtgcctttatgtgtagaaa

SEQ ID NO: 344 - DNA, 2612 bp, Homo sapiens
  SIMILAR (639)..(1715): 1001254mologous to Homo sapiens alpha-1,3 fucosyltransferase 6,accession number M98825,Smith-Waterman Score=1998.
gtttgcatagctccctggacttctgctttgcactgccctgcaggagtgggtggggaaaggaagtggctttgaggcacacagaggggcttgttgaggccaccggaggaagcttctgccaccaatatgggacctgtgcccagcctaccagaagagagcatctgaaaacatgtatcgacatggtaacccctctgcttgaagcctcacatggctccctattgccttggtgctgaacaccctatggctgaccgtggcccagcctctgcaacagctctgcctcctctccagtgccttttcactttgtactcaaagccacatcgcattgaagccacaggtggggcaaggtcatgcatgactgagtctccaaatcccttcaccctgtttggttctgcaacggggattaggggagccccacgatttgttttcaaaggatgtccgggctccaggacaggatgccctgggtcacctgatgacaggtgtggtggttggaaagggccgggtttcagctccgggtacacttcctccttccttctgctgcgtggtgtggcctcttccacgtcctcagaatccagctgttactcgtccgcggcctctcagctctagggccctctgcacactggcccccccagagactctgacccatggatcccctgggcccggccaagccacagtggtcgtggcgctgctgtctgaccacgctgctgtttcagctgctgatggctgtgtgtttcttctcctatctgcgtgtgtctcaagacgatcccactgtgtaccctaatgggtcccgcttcccagacagcacagggacccccgcccactccatccccctgatcctgctgtggacgtggccttttaacaaacccatagctctgccccgctgctcagagatggtgcctggcacggctgactgcaacatcactgccgaccgcaaggtgtatccacaggcagacgcggtcatcgtgcaccaccgagaggtcatgtacaaccccagtgcccagctcccacgctccccgaggcggcaggggcagcgatggatctggttcagcatggagtccccaagccactgctggcagctgaaagccatggacggatacttcaatctcaccatgtcctaccgcagcgactccgacatcttcacgccctacggctggctggagccgtggtccggccagcctgcccacccaccgctcaacctctcggccaagaccgagctggtggcctgggcagtgtccaactgggggccaaactccgccagggtgcgctactaccagagcctgcaggcccatctcaaggtggacgtgtacggacgctcccacaagcccctgccccagggaaccatgatggagacgctgtcccggtacaagttctatctggccttcgagaactccttgcaccccgactacatcaccgagaagctgtggaggaacgccctggaggcctgggccgtgcccgtggtgctgggccccagcagaagcaactacgagaggttcctgccacccgacgccttcatccacgtggacgacttccagagccccaaggacctggcccggtacctgcaggagctggacaaggaccacgcccgctacctgagctactttcgctggcgggagacgctgcggcctcgctccttcagctgggcactcgctttctgcaaggcctgctggaaactgcaggaggaatccaggtaccagacacgcggcatagcggcttggttcacctgagaggctggtgtggggcctgggctgccaggaacctcattttcctggggcctcacctgagtgggggcctcatctacctaaggactcgtttgcctgaagcttcacctgcctgaggactcacctgcctgggacggtcacctgttgcagcttcacctgcctggggattcacctacctgggtcctcactttcctggggcctcacctgctggagtcttcggtggccaggtatgtcccttacctgggatttcacatgctggcttccaggagcgtcccctgcggaagcctggcctgctggggatgtctcctggggactttgcctactggggacctcggctgttggggactttacctgctgggacctgctcccagagaccttccacactgaatctcacctgctaggagcctcacctgctggggacctcaccctggaggcactgggccctgggaactggcacccatgggcccacccatgagtgatggttctggctgatttgtttgtgatgttgttagccgcctgtgaggggtgcagagagataatcaccgcaccgtttccagatgtaatactgcaaagaaaaccaatgatgaggccgggtgcggtggctcacacctgtaatcccagcactttgggaggccgaggcaggcggatcacaaggtcaggagatcgagaccatcctggccaatatggtgaaacccgtctctattaaaaaatacaaaaattagtggggcgtggtctcaggctcctgcagtcccagctacttgggaggctgaggcaggagaatggtgtgaacctgtgaggtggagcttgcagtgagccaagatcgcgccattgcactccaacctggacgacagagcaagactccatctcaaaaaaataaaataaaggccatatgtttaatca

SEQ ID NO: 345 - DNA, 1599 bp, Homo sapiens
  SIMILAR (1)..(1596): 991254mologous to Homo sapiens Human flavin-containing mono- oxygenase isoform x,accession number AAW49700,Smith-Waterman Score= 2844.
  misc_feature (1)...(1599): n = a,t,c or g
atgagcaagagggttggcatcatcggagctggagtcagtggcttggctgccatatggtgctgtctggaggaggggctggagcccacttgctttgaaaggagcgatgatgttggaggcctgtggaaattctcagaccacacagaagaaggcagagccagcatttaccagtctgtattcacaaactcttccaaagaaatgatgtgctttccagacttcccttatccggatgattacccaaactatatacaccacagcaagctccaggaatatataaagacatatgctcaaaagaaggaacttttaagatacatanagtttgagaccctggtttccggtataaagaaatgtcccagcttcttagtcacgggccaatgggttgttgttactgaaaaggatgggaaacaggaatctactatttttgatgctgtaatgatttgttcaggacatcacgtataccccaatctgccaacggattcctttcctggcctggaccagtttcgaggcaactacctccatagccgggattataagaatccagaagccttcaaggggaagagggtcctcgtgattggtctggggaattcgggatctgacattgctgttgagctcagccgtctggctacacaggtcattatcagtaccagaagtgcttcctgggtcatgagtcgggtctgggatgatggctatccttgggatatgatgtatgttacccgctttgcatcctttctccggaatgtccttccttcattcatctctgactggttatatgtccagaagatgaacacgtggtttaagcatgagaactatggcctgatgcctttaaatggttccctgagaaaagagcctgtgttcaatgatgagctcccatcccgcatcctgtgtggcactctgtccatcaagcccagtgtgaaggagttcacggaaacctcagctgtgtttgaggatgggaccatgtttgaggctatcgactctgtcatctttgcaacaggctatgattattcctaccccttccttgatgagaccatcatgaaaagcagaaacaatgaggttaccttgtttaaaggcatcttccccccactaatggagaagccaaccttggctgtgattggcttggttcagtcccttggagctgccatccccacagcagacctgcaagcctggtgggctgctaaagtatttgcaaactcatgtaccctgccaaccacgaatgaaatgatggatgacactgatgagaaaatggggaaaaaactcaagtggtttggccagagccagactttgcagacagattacatcacatatgtggatgagctgggctctttcataggggccaagcctaacataccatggctcttcctgacagatccccgcctggccctggaggtgtactttggcccttgcagcccataccagtttcgactgatgggaccagggaagtgggatggggccagaaatgccatcctgacccagtggaaccggacagtgaagccaaccaggacaagagttgtcagtgaagttcagcgaccccatcccttttacaatttgcttaaaatgctttcattcccattactccttctggctgttacacttacattttattaa

SEQ ID NO: 346 - DNA, 556 bp, Homo sapiens
  SIMILAR (2)..(496): 891254mologous to Homo sapiens dJ127D3.2 (Flavin-containing Monooxygenase family protein),accession number AL021026,Smith- Waterman Score=754.
ttgggatatgatgtatgttacccgctttgcatcctttctccggaatgtccttccttcattcatctctgactggttatatgtccagaagatgaacacgtggtttaagcatgagaactatggcctgatgcctttaaatgggtacttaaaaatggaaattttttttattcaaaaaaggggggcactcatttaatgaatttatttgtccatcaagcccagtgtgaaggagttcacggaaacctcagctgtgtttgaggatgggaccatgtttgaggctatcgactctgtcatctttgcaacaggctatgattattcctaccccttccttgatgagaccatcatgaaaagcagaaacaatgaggttaccttgtttaaaggcatcttccccccactaatggagaagccaaccttggctgtgattggcttggttcagtcccttggagctgccatccccacagcagacctgcaagcctggtgggctgctaaagtatttgcaagtaggtgggccattctgtctttcattcattttatcaatgaacatttactgaacacctgctat

SEQ ID NO: 347 - DNA, 2714 bp, Homo sapiens
  SIMILAR (843)..(4): 981254mologous to Homo sapiens PIG-B,accession number D42138,Smith-Waterman Score=1511.
tcagaatttcatcttcatgttgaatttcccttttaacttccgttcatagacatatatgtgacttccaattcgaccctctggcaagtgagtgtggaagaaaacagcagttcttttataattgcttgaaattaggaaagcgcttatttcctcttccaaaatgctgaaggtgatcaagtgagtaggcaatgatgcatcatcatgaaactctctatgtaaccagtttaagggatttaggtaaaatacatctgcttcatcaagataatgactttttccagtcaggtctggcgggcactggagaaatctcatgggaagtgggcagtgaacatggctgtaataaggagtagagtggcaaggcatcattataaatattgaagctgaagatttattgggattgttgtaacaaactttttgaatatgactcatgacatcaagagtacctcgttgatgaactaaaccagtataaagggcgaggaacaaatttgataaaaacaggaaacttagagctggtttcttccatgttttcaggtgggttaatgagtatccacagaacaccatacagaatggtaaaactggataaataaacctgaattctttgtggctcaacatgctataaacaagcagtgtccacagcacagtcaccaaaagtatccggtatctctttggtgctagatagcagccatgaataaagaagggtaagtgagtacccaagataactggaaatccttgactgaagtaccagtgccatggatgagaaccataaaatgttccccagttctgcagcacgttaaatttcaaaaaattaaattgaaccagagtcccctggccccgttgaaggaaaaataaataaaaatgtgttagtgccaagtagtaatttttggcattaggggattgatacaattttgcccttaaatcagaattgaagtttaaaaaccaggccatagtttcccttaataaattttttttttttttttttttaagatggagtcttgccctttcgcccaggctggagtgcagtggtgcgatctcggctcactgcaagctctgcctcccgggttcacaccattctcctgcctcagcctcctgagtagctgggactacaggcgcccgccaccacacctggctaattttttgtatttttagtagacatgggttttcaccgtgttagccaggatggtctcgatctcctgacctcatgatccgcccgccttggcctcccaaagtgctgggattacaggcgtaagccaccatgcccagcctataatgtttttaaagatgatgggtaacataaaaatactatgtggtaataacttagaatactaggtctggaggaggagaacaggcctagcccatgtgaaagaataagcagtagctaatctatgtggtcttgaggtatagtataaacctggaaagttctctgaacctcttcagatactgagggttgcccaattaaaacaacaacaacaacaacaacaacaaaactttatcagatgtactgaatgacttcattctctgataaatttcaaagcttccagaacagaggatcaactattgtaactattgcccatttctggtccaggaaatacctttctgataaagagtgctcataaaacgcttgtgttgttttcattcattctatctagaagtgggcaaataccaaaacctttatcccagattaaggtcggataataagtgaacctgatgacctactttagaatgacaattcaaacagctatccctgaaaccagacaactacacgagttatgccttgaagcagatctttcaaagtgcaacgaaacattactcctgtttttcacttgaggagactaaattatggtcatatcttttccatgatactgattttttatttaacataaaccaaatactgactgaatcaaagactaaaaccccacaaaatttcatcctttaaaacaaaaagcaataaaatcccacccctaaatcaggcctcaaagttcaaagaaatgtttaaaaatcccccatatgggatctgacatgaatgtctattattgtcccccccaagtcttctcaaaaatcactttaaaatcttgctttgagaccctaagttttcttggaaataaaatacatttatagattgttttaaacctactgaattttactatttctgcttgctttcttcccatttaataaaatcaaaataaaaaattttgaccaaataaatatttattgaaaggtcctgccaccaaaaaagcttcaggtttttaaaaacatataatcaaacaacaatgttcttctgattaaaaaaaaaaaaagtacttatttaaatctgaggatccttatatgttcaatagaggattgtggtgatcctttgtattttaaaaatattatttgtggggcctactttacgtatctcctgtataaaaaccagctttcactccacatgaatagagaagatgctgaatacgcaggaatctgattatccctcacgtgattattaccggcccctctggggcaatctgcttgctcactcattctgccaccattctcttcattcaagtgtttaacagcacatttatcaaaggcagctctccgatgcaatgtttaacgagtgtcttctcaggagtgtatccgtgtcatttattcttctcatccaggtaagcacgaacttcacagtactactaaaaatcttcttcaaattatattgataatggacttatttctgaccgtttttggatttg

SEQ ID NO: 348 - DNA, 23287 bp, Homo sapiens
  SIMILAR (13769)..(13623): 1001254mologous to Homo sapiens dJ127D3.2 (Flavin-containing Monooxygenase family protein),accession number AL021026,Smith- Waterman Score=249.
ttaataaaatgtaagtgtaacagccagaaggagtaatgggaatgaaagcattttaagcaaattgtaaaagggatggggtcgctgaacttcactgacaactcttgtcctggttggcttcactgtccggttccactgggtcaggatggcatttctggccccatcccacttccctggtcccatcagtcgaaactggtatgggctgcaagggccaaagtacacctccagggccaggcggggatctgtcaggaagagccatggtatgttaggcttggcccctatgaaagagcccagctcatccacatatgtgatgtaatctgtctgcaaagtctggctctggccaaacatgaagaaagaagagaacatactggaataagtgttacagttgcaaataggagcattaatttcttattttttctttcagaaaaataacattttagatagcacctccatttatgccctccttttccacaaaattgaatttattgttttttctttagctaagtgagctgcttttctcctccttcctaatctctatttgagtttgatgtaatgttggacttttgcctttgaccatgtggcctggagtaaactgaccctctggtttaaggagactaattaacttagtttactcattaacacataattattctttataagacattgcttagaatctgccccaatgttagactttcagattggtttgtttaaaagtgagatcatggatggttttaatactcctgtaatctaataatataaattgtttcatactaaagaaaacaaaaaatattttactgcaaaatatacacttcgttgacagattttgagatggctattcagagggcctgcagacagaaacagccctgaaaagctgccttttgtgaaggagatttttatctgtggagaaaataaaaggaagtaaacagaagatggaaactaggctttctcggaggcctcccttgcccactctaggaaagattaacttgcaggagagagagactgagagtcaggcactgctgaatgtctgacagagaaactttcatcataggctactgactctgagagttgctttctgtgaggtttcgtctgcagaacaggacagcctttgtttgacatactttcctccctttagtctcccatgtcctgtgatgttacctctgaaatcacctttaaaaaaattgtgacagtgaaaaaaatgtgaaaaaaaaatgtaattactccatctttcttctaatctccaagctgccattattcattcctgagcataggccaagctaactatgggagacatttagtttacagtttaactttgaaacaaagatggtaacagccctttcccaaaacaaaccccctccttgcttggagatcagactgcttttgtagaactaacaaattagccacaagataagaaattagggctcaggagtcatgcagtcagaagtccccaattgctcctatggataacatcaccattataaaacctaccattggtgctcaagatatttttcagaccctgcattctgatgggccggctggcactacccagactggtaaactggttcatcttgtcatgtggtctcctcccaggaagaccagaagacaagctttgactccctatggtttcatccctgacccaaccaatcagcattccccattccctagcccctgactaccaaactatccttaaaaaaatctagcctctgaattttcatggaggctgatttgagtagtaataaactcctgtccttccgtttagctggccagaccccaaaagagggttcttggacctctcacaagaaagaattcagggccagtccataaagtgaaagcgagtttattaagaaagtaaaggaataaaagaatggctacttcataggcagagcagtggcatgggctgctcaactgagtatacttatagttacttcttgattacatgttaaacaaggggtggattattcataagttttacaggaaagaaatgggcagttcccagaactgagggttcctcccctttttagactatatagggtaacttcctgatattgccatggcatttgtaaactatcacagtgctggtgggagtgtcttctagcatgctaattcattataatcagcatataatgagtagtgaggacgaccagaggtcacttttttcatcatcttggttttggtgggttttggccagcttcgttactgaatcctgttttatcagccaggtctttgtgacctgaatcttgtgctggcctcttttctcatcctgtgactaagaatgcctaacctcctgggaatgcagcctagtgggtctcagcctcattttacccagcccctattcaagatggagtcactctggttcaaatgcctctgacagctgtgtgtttattaaactctctctattggaaaaacctgctgttctcagggcatcagcttttctgggcagtgagcaagatgaatctgttgggtgattacacctcccccaaagcccagagaaacttggtctaatctgtgttctttggacttattaatttcctctgaaaaatcatttacttttacacttccatctcccctaaccccagtgaagagaatatttaaacatgaatgatctggccctcctttgagttcatgttttgtaaggctctcatgcacacatgtgcacgtaataaatctgtcacgttttctcttgttaacctgtcttttgttataggggtgttggccattaccttttatgacagagagaaaagagatcacctcctttccgcctctatagttcttttagttggaatatggtgtaatttgctttttgaaactctgaagagcagcttatcatttaagcaataagatgaacattttaacctctctatttcctcatttttatttctactgggctctaaaggaaagggtatcaagctgcatgaattgttagcacataaaagtgcccaactctgcaagttgttcgtcaactggctgaagttgtgcaggagaggttttgttgaatctgagggttccatttcttttcttctctaggccctgaatgggtgactacattgtggcattcaatgtgagagaagaaaaatagctcagagtagtttgcactatgtgaggtatgcaaaatttatcaagctgagagagccacgtgtatgggacttgtcatgctgccctctaccaagcctggcggcaattgttaaaaggcatttttattcctgactagctgtctcactcatcatcttcatgttcgtagaatttgtgatacgaagaacagtatatagccaatcaatagcttatataattttaatgtaagttcttggtaaacaacttagaagttgactcttttgtatttcctttaaaaaacctacttgtaactgctgccaacggagtgcatattcagggcaatttgactctgtgctcctgggttgcagtcctcaaacttggcccaaatcaattctctttttatattaaatttgcctcagtgttttcctttaggttgacatatcaatgcaatgttaaatgcttgaaaaagtaaagaaacttcctatatcagttgactttggaagaactgaggggttaggggcattgagccctcttgcagtcaaaaatccatgtataacttttgactccccaaatacttaactcttaataacctgttgactggaagccttaccaataatgcaaacagttgattaacacatattttatatgtcatacgtattaaatactattcttacaataaagtaatatggagaaaagaaaatgttattaagaaaattatgaggaagaaaaaatatgtttactattcattaagtggaagtggtttatcataaatgtcttcatccttatcatctttatgttgagtaggctgaggagtaggaggagaaacagaaggggttggtcttgctgtttcaggcctggcagaagcggaagagatggaggaggtagaattgggggcaggagaggcaggcccattggtgtaattatggaaatatattataatttctgtctgactttgcttttttatttctctaaaaattttctatatagtagtaatccttcctctatcatttgctttagtttcagtgcctgtatcatagaagggtccatgttatataaaagaagtcaaaagaagtcttaaataactggaacctgtctgccagatgatctaatgtcaatttatttctggcatggctttttctatgtcttcgttctcatctggcactgctttggaaggactcatctccatcaagtcatcttttagttcctctagtgtggaattaaaagtgtctattagtggtgtctattagctgttgaatttctccatgatccatatcttgaaacccttcaccctcacctttttattttgccatatccataatctttttcatgatttctgtgactggtctgttgtaaatcctctgaagtcatatataacatctggacatagttttctccaggagaaatatgttgttttaggattgatggctttcatggctttttctataacaattagggcatcttcaatggtataatccttccagactttcatgatgttctctctgttgggttatcttccacagcattgactatcttttccatagagtatggtatgtgatgagccttaaaggtccttatgactccctgatataaaggctgaattagaatgttgtgtttgggggaaattagactacttcgatgccttccatgttgaactcatggggttctgggtggtcaggggcattgtctatatcaaaaaaactttaaaaggcagtctcttattggcaaggactttctgacttcagggacaaagcattgacagagctaatccagaaaaagggtcttgtataaccaaaagataggaagctgatattcatcttttcccttcaaggtttgagggggtagcttcataggtaggggccatcctgatcataaatctgactgcatttgcacaaaacagtagttagcttattctttcctgcctaatcttggtgctcacttctgctccttattaataaatggcctttgtggctttttttttttttttttttccagaatagggcacttttgtctgtgttaaaaatctgttcaggcagaaatcctttctcctcaatgattttcataatgacatctgggaattcatctccttcttcttggttggcagcatgcgtgtctcctgttatcttgacatttttgaagccaaactctttctgatgtaatcaaatcatcctttgctggcattaacttttccagctctagatccttcaccttccttttgctttgtcatataataacttcactttttctcaaattatattagagtctatatgtatacttccttatagcaatcctgcacccacataaaaagctgcattttcaatccaaaataaaaagatattttacaaaaagtgcaagatttcatgcctgctggcatagttgcactggattcatttatcttgaaatggtgggcaactatagctgcagacctcaatgtatagtatacattaagcaactcaatttttttattataatgtcataacttttctctgcttcttgggagcacttccaacatcattaatgacacttcatatggagcccatggtgttattaaaggcttaaggtattgcactaaacatgataaaaatatgtgagaaccttgagagatcactttttactgtgaggcagaatttactggagatatgaactgctcaggtgaaaatgactaatgtcacacagcattttaagtagatactcaaaacacttgagctcactgcaataccaacaagaggtgactgcaaaattattatactagcacattatgtgctatattttatgcagttatgacaatattgcatctttatgtttgtttacatttctgttgactatgaatggtgccatgtatagtctaagagtttgtatgcatttagttttgataaattttaatttttaataatagatttgtgtatattttatggtagtaaatgataaaatagactagtatctacaaatattttatacatggcatctttttcttaattttttaaaatatttctaggctacacaattcatctttgaggttttttttttttgagacggagtctcactctgttgcccagactggagtgcagtggcacaatctgggctcactgcaagtccgcctcctgggttcacgccattctcctgcctcagcgtcccgagtagctgggactacaggcacccgccaccacgcccggctaattttggtgtatttttagtagagacggggtttcaccatgttagccaggatggtcttgatctcctgaactcatgatccacccgcctcggcctctcgaagtgctgggattacaggcgtgagccaccgcgcctggccttgagtttttaaattgctgcaaatctccaaaaaattgcattttttttttttttttttgtgagatggagtctcactctgtcacctaggctagagtgcagtggcgcgatcttggctcactgcaacctccacctccctgattcaagcaattcccctgcctcagcctcccgagtagctgggattacaggtgcacaccaccacactcgactaattttttttgtatttttagtagagacagggttttaccatgttggccagactggtctcgaactcctgacctcaggtaatccgcccgcctcagcctcacaaagtgctgggattacaggcgtgagccaccatgcccaatctgcattatgttaattgaaaaaatccatgtataagtggacccatataattcaaacctgtgttgttcaaaggtcaactgtagtcatttatagagttgtttcttaacctcagcactattgacattttgagccagataattgttttggtgaactgtgctctgcattgttggatggttagcagaatccctgttctctactcataagatgctgatagcatgccctctccactcacaatgaccaaaagtgtctccagattttgccatatgtcacctggagggcaaaattatccctgatagaaaacctctattcttgagttacacaagagaagtgtgatgactgtttactatctaaacattttttgattattgcaagtgttcagaaaatgtaaactctgactaatgacaatattaaagcatattaatgtttttctacacataaaggcacattttaggaacttgctctattagcaagtacagttagctgcttaccacttgagttttttccccattttctcatcagtgtcatccatcatttcattcgtggttggcagggtacatgagtctagaaaagaaatgaagagaaaaatattgaaaaacacaaatcagaaatatataatgacatatgatggaaatcatttggtttttataaactgtattcctgaaaacttttgtattaagaggagctggagatgtctttgatatctttagcaaaataccagttcatagaaacaaagatctgaaaagttaatgaacctttgggaattggaaaagctggcctgtagtgagatagtgacagcagagacatttgtagcttcaaatcactcagtctcttatttcggtaacattatagaggacctaatcctcaacatatgtgctcagtacacttcatgcatataatagcttaataatttcttccttttttttctgtatccttttcctaaaacttctctgaagaaagaatctggtaaaacagttccctttaaggtttctgccattttaaatgaggtaatggaaggaagcataggattttaaacatcttctgcaactatgcaaggtgttttaaggggcagcagacaagttttagctttttgtgaatttcactacatcaatgcaacttcttttaactggtgatggtagcttatttgcctttgtaacagtggaagaaagttactctaaaatttgcagtgcatgaatatttcccagtcatcgttagtgtcttatgtcaacctggtagtaccctatgattgatattggctggacaccctgctagaaagtaagaggccagaattttgttctgcttcgtttgttgttgtgtcctaagtgccaggttagagcctgacacatagtaggtgttcagtaagtatttgctgaataaataaatgataccatttgcttcatgtaaatttcttaggtttatgaactatatccagtcttctcataataccccaggctcttggcattgttgtgcctttcgaaggaaaaaggcaatagaagtattttgcagggagcacctttacaaaagatttcatgatggggtttatttaaatgatgatctttcatggtgtatttgaaatagaaatttatttatctacaaagttttagacaatatatatacatatattccatgattgtaatggtttgttaattaccaatagtgtaagtttttatggattagttatgttaggtaagttatacctatattggtcaatattttggagaatacctgaataaaagaacacttttcaataataatgataatattcagtatgactggagtaaattaatatatttgagacattgcctttctccatgtaatcctcatattcttgatttcctcacataagcatacttgtagcccctggagaccatgaggtctagagtagagggagagaagaagaagattgtcatgagaatcagagtggcctgactttgttattctgacagaagttgacaccagtgaggtttctggcacacctccaaccctcaccagggcccttccaatctttataatgtagcctgacattgcagttatcctctgctatttttttcttgcttaaaatcttgcgaagtccttaatccctatgagaagtttaagctctttaacgtggcttataaacctatatttcttgccactccctgcctctgctttatattcccttccaccaaaatgtttctgggtccttacacatttcatgctttccctcacctttatgacttcctgtatactgtttgctctgtgcaacagtccaactcccctcactagaacccccccaaatttcccctattatggcatcccccacaccccattttaagccttgagaggtcaaggaacatgtttgtcttgttctcattgtatccctagcacagtgctttgcatatagcaggtgttcagtaaatgttcattgataaaatgaatgaaagacagaatggcccacctacttgcaaatactttagcagcccaccaggcttgcaggtctgctgtggggatggcagctccaagggactgaaccaagccaatcacagccaaggttggcttctccattagtggggggaagatgcctttaaacaaggtaacctcattgtttctgcttttcatgatggtctcatcaaggaaggggtaggaataatcatagcctgttgcaaagatgacagagtcgatagcctcaaacatggtcccatcctcaaacacagctgaggtttccgtgaactccttcacactgggcttgatggacagagtgccacacaggatgcgggatgggagctcatcattgaacacaggctcttttctcagggaactacagcaatgagaggcaaacacccttgctgtaaatagctcatttccaagaaatacctgcaacagcccataacattgaaataacatcaagcacttaaacatcagcatgagtgccactgactctcttctctcatggcaattcctttcctaaatgagactaaaactaatttatagacatactaaagtggttaagaacgccaactctggaagcagatggcccaggttcataacctagctccatctcttactagttgttacttttctgtatttgtttctttatgtgtaaaatggggatgatgatggaatcttcctcataggttgttgtgaaaattaaatgatcaattatccttaaagcacttaaaacagttcctggcacatgcaagcactgttgttataagtgcactattatcataactttaacgtcttgtcttacatggagaaatcagacttgcagtggtgggaagttttattgccatgtttggttttctttcatcagctgtgtccacaaaaaagtgtaacaactttgatattgcattttagttgccaaaattctaggaataatatttttcaggacaatatatttcattttgatttaagtttcctttgagattccggaatttcctgcaagtatctcagacacaaagaaaccttgtaaatcctgaaatttgtctctatacttccacatcattttctgtttatctaatcctgcaacctcttcttttaccttacaaggtagcaaaacatagaccacaatgaaacctgtttttcctccccctttctccctccagaaacttagggtaattggaaccctttccaaaaggaagcttagttttcagaatgaatgaatttctaaaactatgttttaattgtctaaatggcaaggccaaaatataatttatagttactcttacaagataaaaaatcttaaccagctcaagctatgggacttactatattaaacataatttttaaaaacttttattttaggtttgggggtccatggtttgttatataagtaaattgtgtgtcacaggggtttggtgtatagataattttgtcgcctgggtaataagcatagtacctgataagtatttttttctgattctcttcctcctcccaccctctactgtcaagcaagccacagtgttaaacataattttaaatgcataaaatcaacatattttaaagggttatagcagcctgcaagacttggtagtataagtgctttggactgacagtttagctcctaaatctggcatttgctcttttgatttacagttcctcctttttcttaccatctttctctaaacacaatgaaactttttggctagcatgggccaggagataaaatttctcaattctttcttttcttaccaacttaaatattctttttttctattgatatgctgattcttctacctggaatgacttcctaattagtaaatgttgggccctgtctctataaagaagtaaataaatgaatctgactaatcttacaggccacgttagttgtgactctccattactttatgtgttccatgcctcctgatggttctgcaaaaatgtcaacatttcaggggtggaggaagtgtgcacttttgttttgagacttcctacttgctgagacatgttgattaacactattttgttatttgctcctttgaagcacattagaaaaattgagactaagaagaaccaatttttttaaagctttatcatttagaaagcaatttttatatttttatattattgaataccacaaccatcttgagaagcaagtattattattgatgtcttcatacacccataagcacggacaagatattcttccaaaaaccaatttgagtttgttcagtcctcaaagttctatgctatagcttgtagccaccacaaatgcatcatgcatgtcagggtgatttatctgcctgcgtcatctccatttcagatttttccataccctttctgtactggactaatttcaataagttttccaagccatacgtggtctctgggcatattccgtcacctgtgaaaccttgagtttaatgtttctaggctcaatgagacaacaaaagtaagttctagagagaataaattcattaaatgagtgccccccttttttgaataaaaaaaatttccatttttaagtacccatttaaaggcatcaggccatagttctcatgcttaaaccacgtgttcatcttctggacatataaccagtcagagatgaatgaaggaaggacattccggagaaaggatgcaaagcgggtaacatacatcatatcccaaggatagccatcatcccagacccgactcatgacccaggaagcacttctggtactgataatgacctggtggggaaaagcaacacagatttcagcattactctgtaagaaataagcaaacacaacacacttctttgggcacttccgtgcattttcctcaatatccaagtaggaacacttttaaaaggcgagtctaaataagttgtctagcagccataaaaaagaatgagttcatgtcctttgcagggacatggatgaagctggaaaccatcatcctcagcaaactaacacaggaacagaaaaccgaacactgcatgttctcactcataagcaggagttgaatcatgagaacacatggacacaggaaggggaacaacacacaccaaggcctgtcggggggatggagggctaggggagggagagcattaagacaaatacctaatgcatgtggggcttaaaatctagatgaagggttgataggtgcagcaaaccaccatggcatgtgcagacctatgcatgttctgtacatgtatcccagaacttaaaataaaaaaaattttttttaaagtctaaaatttaaactagtagagacaggattctttcactgcccctgagggctggtgtgtagttgttgaaaggattagaatcatcactctaggaacaacagggctctgtgttcaactgtgatggtttaatcttcacatactcatagactaagatggcaagtctggtagggaccagatgatccagtgagccccagtggttgtggctggtgatagtggactaggtgtgggaaaagtgtagctaaatctctagctgaaattaggctgacgagatgtcaaggatttaattctgttctctgtctctggttgccttttccagttctccctatacacataccccaaggacttctcctgagcaacccaaaccatggcaaccgcctcagccctgagatgagtctggctgcttatctattttaccgtctttgcaaaatagactttaactttgtgataactgaagggaatttttagtttaaaaaattaaggttttatttacatccatttaagaatttatttattgagaacctgttttcttaaaaatatgttgtttctttagggtctatcgatgatacatgatttagcttggagtcctctgggaagtcttccttgacctcatccaggctaagttagattctcttttccctgtgttgctattgccacacctaattctactggaagactcaccatctcctctggtgatagtctgtgtgtacctgtcaactccatctccatccattgactctttcttgaagtcaggaactagtctaacttatttatgcatttatttttagtttatcatagttctgacacatagtaagcatagtaagtgcccaatatttgttgagcatctgctgttgattgaattaatgttagtaaataccaagtcatgcatatctttcagaacttcagagtggtaaacacagtgctttttgcatgatacgttataataaatactgttaaataaataaagattaagcctgaccaggaactagtctatttggaggtgatcagaatataaaatgaaaacaagaaatacacacatacacactcatctgtacatacacgcactcatgcacttacttctggattcagtggaatgtacttccttactagcacgggccacattacctggcttcacatggaggatgtctcaagtcctccttgatttgaagggccacatagaagaggtggatctcttgtggtgtgacatagaagtaccatcctctgtgccttggctactgatttagtagcacagccctaccttaggtttatttcccaaaacctttacgtcatgtacctgtgtagccagacggctgagctcaacagcaatgtcagatcccgaattccccagaccaatcacgaggaccctcttccccttgaaggcttctggattcttataatcccggctatggaggtagttgcctcgaaactggtccaggcctaagtggaacatggcaagttgtttgaactgattttcagaaattatgaagatgttttctttgtgtctttttaaacctattatcagttgtaattaaaaaattccctagttgaagtgcatttatccatttagcattttttgacattaagccccctaaaacttacttttagttccttaaaaaatcttaaggcatgagaatgtatgtttcgataataataatggttaatatttattaagttaactctgtgggctagatcctctgataaatgctttacacgttttaactatttaatcttgataacatccctgcatggtgggctattgtccctattttaaaagaagaggaaattgagacaaagaagttaagtggtaaggaactagtggaatagtaagttgaggccaggtgttctgatcccatgctcataaacattaaatatgctgcccgttaacattaagagttttaatcttatattcctcctgaaccttcactctttaattttcctcggcctatggacatcatacctagacatggaaactctaatatctttgagtagattgtgttcctgtggcaaggaaggaaggaaaaatggaaggaagcctccatgtatattgtatttatttgaggtttgccactttcggatggtaatgaagtatgctgctatacacacacccatgtgtgtacccacacacaaatcactgagatttctaaagtttatttgcaaattgtggatgaagatgaaattagaaacctaggagtctcctataaataacataagtaaacgtgtctttctttaaaccatttggcagttggactctacttttttttaatgtaactgtgctcggagaccccgtgtgctgttagaacttatatttgagttactgtctgtaacacaggaacttgtgtttgtctgatctctggcttgcagtccttgattattttaacataaggacttatgaggctatttattactatatcctatcattaaacttaatttttttcttttgaaatctaagaataatcattatgtaatacctatagaaagatatgtttctaactcttgatgtttgcatataagtccctagattattatatattttccaaacttaccaggaaaggaatccgttggcagattggggtatacgtgatgtcctgaacaaatcattacagcatcaaaaatagtagattcctgtttcccatccttttcagtaacaacaacccattggcccgtgactaagaagctgggacatttctttataccggaaaccagggtctttaagaaaactagaaaatttatttttccatttataattctacatgtgaaagtttttttccttcttgccttgtttctgtggaggaaataattgttacgagctctcttggtcattcagaaatgtatagaaagatagtaaaattggagtcacagtgaatcttcagtgagtctttgaatctcacaagaaaaattactcactggagtacatttactttttgacatcaagttagttgatttaggggtaaatcacactgaatatttttgtgaatgatgtcatataacaaatctgtgttattttcttatggctaccctctactgacatggcttcctccttttctgacctcatcttccatctactcaataagtatgggaatatctcaaggtttgatcgttggcatctcttttgctctgcataaatactcttatcttagaaatatagcaactttacggccaggcgcggtggctcatgcctgtaatcccagcacttttgggaggccgaggtgggcagatcacctgaggccaggagttcacaagaccatcctggctaacacggtgaaacccccgtctctactaaaaaaaaaaaatacaaaaaaattagcttgggcgtggtggtggcgggcgcctgtagtcccagctactcgggaggctgaggctggagaatcacttgaacccaggaggcagaggttgcagtgagccgagatcattgcaccactgcactccagcctggggtgacagagcgagactccgtctcaaaaaaaaaaaaaaaaaattagcaagttttgtggtatgaatatacaaatacatctatccttggtctctcttctatccagtttagcttgacctttccatctggagggccacctaatacttcctcatatgtagcaggttttgattgacctacttaaatttcctttgaaactggcttctgactttcttatttctttgaatgatgacatgaaactcccagccacttatgcttcaaatccatgacttgttttccttgttatttctccatccttgcctcatgtttaaacagtatttatctcccaatctcacgctttctttccatgattgctaacactgccttcattcaagtccttatcactcccttgcatggactacggcaagaacctatacctagcctgtcttcagcctcccatttcctacaagccatcctttgtcctgcttgtcagattaatcttcctgaaggactatattcatttctcaatttctctgctcaattcactgctcaatttctgttacttcacagcctctaaaacttattctacattttgaatgcgattactattaagtccatacaattttgttccaatttactcttttagttttattttctgttattcccacagacttttctggaacatattctgcaaattgcttccctaatgtccattctcccttcattcttactaacagaaccctgattttgtttggagcgacaacatacacagaaaagggatgcattttccaggttcctgtgcaactagggtggcctgtgagatataagcaatgttggacagttttttcaggagaatttgtaaaaggggagctgattcagctgagagaacatccctttgcccttcattctttactttttttttttttttgctagaaggcagatgtgacggctcaagcttcagcaactgttttgcaccacaaggcaaacgtcatgatgtaggccacgtgctaagatgggtgaagctgaatctttgataactttggtgccatcacataagctctggatgtcccttctttggacttcttttacatggttgcaaaataatcctctatttttcaaagtcacagtacacactagtttactgatatatgtggccatatctcatcctagcatatatatctccctcctaaccaacttggtttgcccactgttctccaaatgagcagggcattttcccacctctctaattttactcatgccactcatttatctaaaacacctactaaatacaactaaattttacctcctctagaaaataccttcccccaaagtgttgcctcttgcttcatgatctccatagcattgttttatttataaacaaatcataaagagctttaaaaaattttctctttgattgaaattgttactggaatctttttacttactctttacatatttattttgaaataacttcttgagagctaagtcttagacctctttttcttttacatataacacatagcacaatgcaagcacacaataggaacttcattaatgtttgttgatattaacaccataatggaagcaaatgaatgtaatgaatgaatggaataaaatgactattggaaaattttattttaactatacatttggggctactccaggtaaaataatgatgtaaatatcaccatggttcataattttgctgattgtttttcccactatatgcaagtgttctgcatttagcagcagttaattgaggttaagagttccaaacatacagacagaaatgctcaataaagagtcccaaataaatgtaaaacattattctcgcagaaacaatgctgaaatctcacctttttaataaaaaaactaatgaactgagtgggtaaagatgggggcaatgactatatttcccatttaagttgttaaccttttcataatgtaatgggagaaaccctaccaaatgctctggttttttgaaccacaactcattggcattgaactgacaaaattcctaatatatactaaagcattttggattatttccaaaacatcagagcatgagggtggaaagtggacaatgatgggctagctgcctccattttctaaggtagtctgaaagctctcagagactagtgaactagtaagtctaggagagaaaaaatcaatgcatgaatgctttataatcagacccaacatttgattactgaggtgcccaaacatttggctctaatttttataatagtttgctgcctcctttttctctaacccacacatatcttaatttcaacagtacaagttatgagacccctacctcaaactatatgtatcttaaaagatccttcttttgagcatatgtctttatatattcctggagcttgctgtggtgtatatagtttgggtaatcatccggataagggaagtctggaaagcacatcatttctttggaagagtttgtgaatacagactggtaaatgctggctctgccttcttctgtgtggtcctagggagaataagaaagcttaaagagaaagccaagaattgtgttcccttcagtgaacacagtggttcaattcttggttgactaaaacccttttcatgtttaaaagcgtaaacaaaaattaaaagctctcagtaagataaggaatggaaagcccttcgcgtaacctggcacagaactggagctctttccatgtgaatcctcttactgtaattaccctcagtgttagctctgtctttatagccacttagtggtttttgctttctcctgtgccaccactggttctgatcttatactcaggttaaaaaaaaaacaaaaaacaaaactgtctagaagaggctctgacttctagcctatttatttgcttttggagtttagcaaactcttcactggcaacaacccaatattgcagtggtttcccagctttggcgtaatgagaatcgcctggaagctccctagaccgtagattcttgggccctattcttagaatttcggattcaatctgtctggggtggagtctggggtggtttgcatttctatcaagttcctggtgatgctgatgtggctggtttaggaaccacactttgagaaccactgctctgttgtaaatgaatcctattctttggctcaccagttgctggacttcactcctcaccaaagaaacacaggaaaccagagcccttagaacatgtgttaaatcttggcacttcattttaaagcctctgtgtaattgaaaagtggcttattttttagaagcagtcaaaagctaaattgaaaataaacatttcctctcagttgtgagggtagggtaaaagtgcacacaatgtgctgccttgaaaatacatttcagagctggcagcttctgcttcccgaggtccggaagggactcttgtgcaatggggggaaagagatggaatgtcacgttgctgctggattcaagatgtgtatctccctctcacaccagatgacctctggaagagggaaacaaaaagtgctggaaagggttgagaggattgtgtccccgtggggaagtggggggctgcccaaagcctcagtattttttctcaagttgaaaacataatcttcctctattcatggttgctgtatttctcataagcgtggaagcacaggaatttaaactttttaaaatttttgtggaggtcagaaaaagggtgaaggctcatgtccagcagtttggcaggctgagtgcttccctttcacccacagctagcgccttctactgatggttgtgagaaggagaggtgggaaggaggttttttcagctgcctgttgaaaggaggcagggctgaactgtgggatggagcctggttaaagaatgtaagactctgttctgggaaacagatgctaaggccttggaatatttccatcttgaatgaatctctgcttttttgccccttgacctcagccaattataacaccaggagagaagagtatgtacactacagctccttggaatttttccgaaaagactgttctccaagtgaacacaaaaaagcaaatgtattagataacaagtcagttgctccagggagcatgcatttttattatttcaatatgaggtgtggtttgagccagtaaggaggaaattcaactttgactctgcctctagctgagggagctttaccctggaaccagagatctaagcagctgtgggcaccatctgtcttggatgataaccgtgttcatctctcatctttcccacgagaacataagtaacttgagggcaaagtcagaggttaatttcagaatgttgtacatgcatctaagcagtttaccttgatcttctttcctattccagctctgcttatgagtcccatatctccttgtctaaatatgcccttgaaatatgctcaaaagttgccttcaactttgtcatggctttctttaccttccctctcagctactgccaaatcatctttagttttactaaggtcccattatccttattgccctaattatatagtcacttatagttattctgatacttgttttctcacggcttttaaagtgctggctggcctcttatctgcagcttatgcttaatatagtaccctacacataaagtacacagtatgtattcattgaatgaacaaaggaataaatgagtgggaaaaagttcaaatagtcctggcttcagcttttgcaatcaaaatgctactaacctattggtaagcattttttttttttttaatggagtctcaactctgtcgcccaggctggagtggagtgcgtggtgtgatctcggctcactgcaagctccgcctcccgggttcacgccattctcccgcctcagcctcccgagtagctgggactacaggcgcctgccaccacgcccggctaattttgtttttgtatttttttaagtagagacggagtttcaccgtgttagccagggatggtctcgatctccctgacctcaggctatatgcccacttccacctcccaaaagtgctggggattataggcatgagccaccgcacctggctgttgagcaacttcttattacagcagtaatgaaatcttttgaggacacgaggccctatttaggagtggatgaaacttaaaacacacattcagcctgctagtatttaaatcccatttggttttcatttctcagaaaaagcaaatagtgaaaagttcagaattaccacgtttctgtctgctagaacaccttctaaaaaaggcttacaagataaagtcttatgtaacacataaaaaaaatccctctctgattatatattgtgccaagcaacttttctaagaaaagaaggaagggctggggtatgtggaggaggctaaagttttgagtatttgtatgggtccatatcctcaccaggactttgagtagaattttgcttatagacatgaccttatggaaaagaagaatttcctcttgtggataactcagaatccaactttgaatcttactgatctttgtatcatattattgcttccttaagtaaactttctgatctggctatattggataactcatggatccctctctgcacacaccatgttcattgccttttctgtgcctttcatggattgttggtctctcttaacctggtgctggcacactgccaatgactgcataggcctatggagtgccattcgcagactttattgggaaatgcactctctaggagttgtgtcacaggtggtcctctattttgcttgtctggggttatccttcaaggctaagtgtcatccctgtgggaggttttctttgacctactaagatttccgtagtccaccctcttctaaacgctcgaggcactcgtccattgaattgatggtgacaaggtctatcttgttgttgtagttatataatctcttattttaaaagtcttagggccagatatattttggaatgtgtacatttttggattttgctccataatactcctagtgagatctggggcagcaatctgtcaaatgcaataaaatttctgccgtgcaacagaaggtgagacttagcttcatgttgatccaattcacggtatttaaccttacgatttcagaagaggttcggctatcaaatgagtttttgcccatttgctatcaaaggattacggaattatattatggcttgcttaatcaaatgaaatggaaccatttacaaggagtgattatattccatatttgtcatcccagtacttagcacaaactaccagaatagatgctcaagcatcatttaattgttactagggagatggtagaaagccattttatgatttactctaagctgtccacatttccctgagcaaatgtaaatagggaaaattaaattcttgaaaaatattaactcttgattaccccctactgggaaataaaaattaatgaccttatatctcatggagtgctttcagggttacaaaaccacaattttttttaaaaaaagcttggagaagaataaaaatgtgttctaagttagcactgatatactctattggaggaggctattggcgcaggcagagcagtaactgagaccaggacaggaagtagttacaatatgaatgatgtgaatatgttttcaagccaaatatgtatcatcgacaactgattacaatggctgggaaatccaggacagaagaactagaagtttctccaaacttggctttgaaatttaaaaaaaaatgtgtttacaaggactatttcctaattatattatttctacaatgagcccaaatggcaaagaccataatttttccctctggatttggagctgataggctattcaacagccgcacacacaatcatcatctataataatttctatctgcccaatagacataagttaattatagaatcatatcctctgcatttgacaaatgagcatttgaggtccagggaaacaaaagcaactggactgaaatcttatctgcctagaaaacctacaagttgaaattagaactcaggacttctgacctcaggatctcagtccaggtttgtttgtctcttttctagtcgtgttcctggcatttaagagcaataaagaatagaattgtttcacttacctgggaagcccatggtatatttttgactaattaccaacattagtgccctttacagcttggagatctggatttcaccatgcaggtgatgatgtttaatgagctgaaaatgtccttttcaggacaaattttgctggtatgaaatagtttttttgggcattagtatgattggagaggtaagattttactttccagatttggagcttttgtgatctgccttctaaatctgaattagaactgatcagatttgatttgcattggaatccatctccttccactggtgttctaatgatgtgccactcactgagaatttccacaggcctccaacatcatcgctcctttcaaagcaagtgggctccagcccctcctccagacagcaccatatggcagccgggaccattagatatggcctgacacctggttaagcctggagcctgggactgtgaggactcacctggcactggggtttagtagtgcaggcctggtaatagggtccagagcaaagttgc

SEQ ID NO: 349 - DNA, 433 bp, Homo sapiens
accggctaaaatggcgtctaccacattacgtcaggcgtcagatccgcgcacgactagagggcgggaaagatttgagctacgcctgcgcagagttgagaagctgatgtctcctcgacttccaactggaaccttgaacccccacatttctggaccttgatcattcctcaagtaggaagatgtaatgcaccttgacctctttctaaataagacacttccccaaataaggggagttgagagtgaacagtcttcacgtctccacccacttccagatcccagaggagacagacatcggatggctgataatcttccaatggaaatccatggttcaagtgccacctcttcaggaaagccatctgacttcaatcaggcagcagtggatggtgcaggggaaagaggtgggaaggaggtcctgggagggacactggatgtctta

SEQ ID NO: 350 - DNA, 894 bp, Homo sapiens
  SIMILAR (640)..(849): 621254mologous to Homo sapiens S100A13 cDNA,accession number AX038714,Smith-Waterman Score=158.
  misc_feature (1)...(894): n = a,t,c or g
cggccgccagcgcctgctcggtgtctattacaaaatggtcgccacgtccagtgcttgtctgaccggctacaatggtgtcaacgcaattacgtcaggcgtcagatccgcgcacgactatagggcgggaaagatttgagctactcctgcgcagagttgataagctgatgtctcctcgacttccaactggcaccttgaacccccatcatttctggaccttgagcattcctcaagtaggaagatgtaatgcaccttgacctcattctaaatgagacacttccccaaataaggggagttgagagtgaacagtcttcacgtctccacccacttccagatcccagaggagacagacattggatggctgttacctcctcctaaaatgtctgcatttacccagataatcttccaatggaaatccatggttcaagtgccacctcttcaggaaagccatctgacttcaatcagaatcgaccacggaaatttgacacctccgggcttggaagcagctctctcctccttccccgctgcttataaacctcagccctgaggctccagctcactctaccccatctccttgccgggtcagccctgacaaaggtcagctagccccttgaggacatcagctttggcctcagggtcctaatggcagcagaaccactgacagagctagaggagtccattgagaccgtggtcaccaccttcttcacctttgcaaggcagggagggccggaacgactaagcctcagcgtcaacgagtttcaaagaagctgggtttaaccccaagcaagtttggcccccatcttggcttcaagggatgttggggctcttcttttgattgaagaaagattgaaagaaggctttgggaattgntggaaattcaagggaacttccgggaag

SEQ ID NO: 351 - DNA, 808 bp, Homo sapiens
  SIMILAR (366)..(686): 471254mologous to Homo sapiens S100A13 cDNA,accession number AX038714,Smith-Waterman Score=153.
accggctaaaatggcgtctacgcaattacgtcaggcgtcagatccgcgcacgactagagggcgggaaagatttgagctacgcctgcgcagagttgagaagctgatgtctcctcgacttccaactggaaccttgaacccccacatttctggaccttgagcattcctcaagtaggaagatgtaatgcaccttgacctctttctaaataagacacttccccaaataaggggagttgagagtgaacagtcttcacgtctccacccacttccagatcccagaggagacagacattggatggctggtcagccctggccaaggtccagctaggccctttgaggacatccagctttggcctccagggtccttaatggcagcagaacccactgaccagagcttagaggagtcccattgagaccgctggatcaccaccttcttcacctttgcaaggccaggagggccggaagggattagcctcagcgttcaaacgagttcaaagaagctggttacccagcagttgccccatcttgctcaaggatgtgggctctcttgatagaaagaattaaggagcttgggatgtgaatcaggacttcggaggttcaaggttcaattgagtacttggagattgattgggggagcttggccaaaggaaatcaggaaagaagaaaagaccttgaagattcaggaaagaagtaaagccgcctggctggaagatggggttgggcagggcagaacttgatcagggccgagcagaaccgcactcttcccaaataaaagcttcctccttgaaacacaaaaaaaaaaaaaaaaaaa

SEQ ID NO: 352 - DNA, 565 bp, Homo sapiens
  SIMILAR (11)..(349): 891254mologous to Homo sapiens PB39,accession number AF045584,Smith-Waterman Score=510.
ggcacgagggaccaacaccacccaggatgagcagcgcaggtggccaggctgtgaccagcaggacgagatgctcaacctgggctgcaccattggttccttcgtgctcagcgccaccaccctgccactggggatcctcatggaccgctttggcccccgacccgtgcggctggttggcagtgcctgcttcactgcgtcctgcaccctcatggccctggcctcccgggacgtggaagctctgtctccgttgatattcctggcgctgtccctgaatggctttggtggcatctgcctaacgttcacttcactcacgggacggggttgctaccaaatccatcagaccacgctactgcaagatccaaaagctcaccaatgccatcagtgccttcaccctgaccaacctgctgcttgtgggttttggcatcacctgtctcatcaacaacttacacctccagtttgtgacctttgtcctgcacaccattgttcgaggtttcttccactcagcctgtgggagtctctatgctgcagtgttcccatccaaccactttgggacgctgacaggcctgca

SEQ ID NO: 353 - DNA, 1479 bp, Homo sapiens
  SIMILAR (729)..(466): 931254mologous to Homo sapiens proteoglycan 3,accession number AF304354,Smith-Waterman Score=496.
ctagaacagagctccatggacattcatgggctcccactcgggggaactctgctgccaggccaggcctgtgacactcaccgtgagtgaagtgaacgttaggcagatgccaccaaagccattcagggacagcgccaggaatatcaacggagacagagcttccacgtcccgggaggccagggccatgagggtgcaggacgcagtgaagcaggcactgccaaccagccgcacgggtcgggggccaaagcggtccatgaggatccccagtggcagggtggtggcgctgagcacgaaggaaccaatggtgaagcccaggttgagcatctcgtcctgctggtcacagccgctgttattattactaatatcattatctgtctcctcatctgtacaatgactcaacaacagtatagtcttcatgagattagtggagatgcttatattaaggaacttcctatattgttggtgctctttggtgcatagggccacacaggagccttgcccattcccaggttgccctggggaccagtaagcaaaattccagtggctcccatcagtccagcaaaaccgcttccacaggaaccagcccctgaggttgcctccaatccagacctgggcttggttgactgtgctagtgcagcactgaatgcgatagttgaagttgaagtcatggatagagacaaggttgcctccgtagcatctgctgcagacattctcagagccgctaagcaccttcagtgggcccatcccattggcggcgtactcctgctggagccgggcacggtaatagaagaggtaggaaggcaacaggaatcccaggagtgagaatagcaggaggcccagattcaccttcgaagcaatagccagagacatctttggggttggaaagaaaaagctgcctgtttgtgggacccgtgggtggttggtgtgcttgcacgtgctacatggctctgcttggtgcgagtgtgtgtgagagctcgggagtgtgggtgtgcacgtgatgggcgtccgtgggtctgtctgggccccgtagcccccccagtagtcgtcctcagtaggcgcgtccccgccctggcgcccccgcgagtcttcggcaggcagatctcggtagagggtggagggatcggctgggggcgccccggcctcggccaccccgtacaggtggttggaggagctgttgccgcgggcgcgggcctggaagtcggcctcgcggagcgcgcgcaggtctcggccctggcgctccgggggggtggcgcaggtcacgtcggagctggacacgcgcgcgcgctgcaaccaggcccagagcggccgcgcgcggcagtcgcacgcccaggggttagcgttgagccgcaggaactcgagcgagggcaggtcggcgagcgcccttggcgagcaggggttgtgaggattaaaggagatactactgagctcacagcccaatgtctgcttgacaatgctgacgccgatgatgacgatgatacccat

SEQ ID NO: 354 - DNA, 996 bp, Homo sapiens
  SIMILAR (91)..(546): 581254mologous to Homo sapiens Nogo receptor,accession number AF283463,Smith-Waterman Score=454.
atggactggcggatcaaggactgcgtggacgccccaactcagggcactgtcctcggagatgccaggcccattctcttcttctgtgccccactccaccccacccaggatgacttgttcgcggacctggccaacctgagccacctcttcctccacgggaaccgcctgcggctgctcacagagcacgtgtttcgcggcctgggcagcctggaccggctgctgctgcacgggaaccggctgcagggcgtgcaccgcgcggccttccgcggcctcagccgcctcaccatcctctacctgttcaacaacagcctggcctcgctgcccggcgaggcgctcgccgacctgccctcgctcgagttcctgcggctcaacgctaacccctgggcgtgcgactgccgcgcgcggccgctctgggcctggttccagcgcgcgcgcgtgtccagctccgacgtgacctgcgccacccccccggagcgccagggccgagacctgcgcgcgctccgggagggccgattccaggcgtgtccgcccgcgggacccacgcggccgggcagccgggcccgcgggaacagcttctccaaccacctgtacggtccatccagaggctttacagtgtacatatcaacccatgtgtcattccctatatttatcgggttacagaaccggtttacgcagtttcggcttagtgaaacaaaagaaatcaccaatccgtatgccatgcgtttatacgaatccctgtgtcagtatcgtaagccggatggctcaggcatcgtctctctgagagtcgactggatcatagagcgttaccagctgcctcaaagttaccagcgtatgcctgacttccgccgccgcttcctgcaggataaagccaagatgaaactccccttacttctggctcttctatttggggcagtttctgctcttcatctaaaaacctggttccaggtttcccctttccggccggagttgagccctctgatgccccaggcccaggtgtga

SEQ ID NO: 355 - DNA, 3127 bp, Homo sapiens
  SIMILAR (1154)..(2230): 1001254mologous to Homo sapiens alpha-1,3 fucosyltransferase 6,accession number M98825,Smith-Waterman Score=1998.
gtttgcatagctccctggacttctgctttgcactgccctgcaggagtgggtggggaaaggaagtggctttgaggcacacagaggggcttgttgaggccaccggaggaagcttctgccaccaatatgggacctgtgcccagcctaccagaagagagcatctgaaaacatgtatcgacatggtaacccctctgcttgaagcctcacatggctccctattgccttggtgctgaacaccctatggctgaccgtggcccagcctctgcaacagctctgcctcctctccagtggtgaagacccagcctgctgagactcctcctgcagttcctcaacatgcctgcatttctgctgccgtcagggcctttgcgaaggttgttccttgtaactggaatgcccttccatccctttttttattcaaaaggctgcaattttaattgaagaaagttcccttccaaggttcatgagttgcctgacttgcccaccggtttcctgcaagatcccttggcctggcacttagtgctcaggaaatatttggtgatgggccaactgagtgagaaggtgggatctggtgggaaggaaaggcggaaggtagaaattctgctcacttcctcattcccacctcccaaggaacccctggtgtccctgtggaacccgctttgggaaccggtggttcaggtcagccttttcactttgtactcaaagccacatcgcattgaagccacaggtggggcaaggtcatgcatgactgagtctccaaatcccttcaccctgtttggttctgcaacggggattaggggagccccacgatttgttttcaaaggatgtccgggctccaggacaggatgccctgggtcacctgatgacaggtgtggtggttggaaagggccgggtttcagctccgggtacacttcctccttccttctgctgcgtggtgtggcctcttccacgtcctcagaatccagctgttactcgtccgcggcctctcagctctagggccctctgcacactggcccccccagtgtcacgggcatccagacgggatccagtgcatcctcttttagaagaaaggcctgtctccaggtccccgagtccctctagcatctcccagaaggtgtcaagacgcagcagtgtccaggagcggcagagactctgacccatggatcccctgggcccggccaagccacagtggtcgtggcgctgctgtctgaccacgctgctgtttcagctgctgatggctgtgtgtttcttctcctatctgcgtgtgtctcaagacgatcccactgtgtaccctaatgggtcccgcttcccagacagcacagggacccccgcccactccatccccctgatcctgctgtggacgtggccttttaacaaacccatagctctgccccgctgctcagagatggtgcctggcacggctgactgcaacatcactgccgaccgcaaggtgtatccacaggcagacgcggtcatcgtgcaccaccgagaggtcatgtacaaccccagtgcccagctcccacgctccccgaggcggcaggggcagcgatggatctggttcagcatggagtccccaagccactgctggcagctgaaagccatggacggatacttcaatctcaccatgtcctaccgcagcgactccgacatcttcacgccctacggctggctggagccgtggtccggccagcctgcccacccaccgctcaacctctcggccaagaccgagctggtggcctgggcagtgtccaactgggggccaaactccgccagggtgcgctactaccagagcctgcaggcccatctcaaggtggacgtgtacggacgctcccacaagcccctgccccagggaaccatgatggagacgctgtcccggtacaagttctatctggccttcgagaactccttgcaccccgactacatcaccgagaagctgtggaggaacgccctggaggcctgggccgtgcccgtggtgctgggccccagcagaagcaactacgagaggttcctgccacccgacgccttcatccacgtggacgacttccagagccccaaggacctggcccggtacctgcaggagctggacaaggaccacgcccgctacctgagctactttcgctggcgggagacgctgcggcctcgctccttcagctgggcactcgctttctgcaaggcctgctggaaactgcaggaggaatccaggtaccagacacgcggcatagcggcttggttcacctgagaggctggtgtggggcctgggctgccaggaacctcattttcctggggcctcacctgagtgggggcctcatctacctaaggactcgtttgcctgaagcttcacctgcctgaggactcacctgcctgggacggtcacctgttgcagcttcacctgcctggggattcacctacctgggtcctcactttcctggggcctcacctgctggagtcttcggtggccaggtatgtcccttacctgggatttcacatgctggcttccaggagcgtcccctgcggaagcctggcctgctggggatgtctcctggggactttgcctactggggacctcggctgttggggactttacctgctgggacctgctcccagagaccttccacactgaatctcacctgctaggagcctcacctgctggggacctcaccctggaggcactgggccctgggaactggcacccatgggcccacccatgagtgatggttctggctgatttgtttgtgatgttgttagccgcctgtgaggggtgcagagagataatcaccgcaccgtttccagatgtaatactgcaaagaaaaccaatgatgaggccgggtgcggtggctcacacctgtaatcccagcactttgggaggccgaggcaggcggatcacaaggtcaggagatcgagaccatcctggccaatatggtgaaacccgtctctattaaaaaatacaaaaattagtggggcgtggtctcaggctcctgcagtcccagctacttgggaggctgaggcaggagaatggtgtgaacctgtgaggtggagcttgcagtgagccaagatcgcgccattgcactccaacctggacgacagagcaagactccatctcaaaaaaataaaataaaggccatatgtttaatca

SEQ ID NO: 356 - DNA, 1105 bp, Homo sapiens
  SIMILAR (533)..(997): 961254mologous to Homo sapiens PB39,accession number AF045584,Smith-Waterman Score=776.
gaagaagatcaagctgagtgggctggccctggaccacaaggtgacaggtgacctcttctacacccatgtgaccaccatgggccagaggctcagccagaaggcccccagcctggaggacggttcggatgccttcatgtcaccccaggatgttcggggcacctcagaaaaccttcctgagagtgagtgtctggtcaaggtgccggccttgggggatagtgatgagaatgatgccccccatctggagagcctagagacacaggcagacctaggccaggatctggatagttcaaaggagcaggagagagacttggctctgacggaggaggtgattcaggcagagggagaggaggtcaaggcttctgcctgtcaagacaactttgaggatgaggaagccatggagtcggacccagctgccttagacaaggacttccagtgccccagggaagaagacattgttgaagtgcagggaagtccaaggtgcaagatctgccgctacctattggtgcggactcctaaaacttttgcagaagctcagagcctctgctcccccactttcctgtggagcctcctcaccatgggcatgacccagctgcggatcatcttctacatggctgctgtgaacaagatgctggagtaccttgtgactggtggccaggagcatgagacaaatgaacagcaacaaaaggtggcagagacagttgggttctactcctccgtcttcggggccatgcagctgttgtgccttctcacctgccccctcattggctacatcatggactggcggatcaaggactgcgtggacgccccaactcagggcactgtcctcggagatgccagggacggggttgctaccaaatccatcagaccacgctactgcaagatccaaaagctcaccaatgccatcagtgccttcaccctgaccaacctgctgcttgtgggttttggcatcacctgtctcatcaacaacttacacctccagcgtttatcactaacactctgcctatctcttgcttattgtctgaccgccacctgctccatgggaatgccacctcctcgatggcaggaatctgttgacttgcttgatcgtggtatctccagcacctag

SEQ ID NO: 357 - DNA, 552 bp, Homo sapiens
  SIMILAR (239)..(397): 701254mologous to Homo sapiens PB39,accession number AF045584,Smith-Waterman Score=162.
ggtgtgggcacccaccaggccctgccacttgttatacctgagaagtctcatctcagccactttgcagaattgctgaacattaagtgagatactggtggaacaatgactacacataataagtactagctgtatttattctggctccaggacctggagaaaaatggccgcctttcttctccctgtgggagggctaaggggaagatgactccctacttgactctgtttctctctcccttgccccctaaaggtgaaatctggggcctcctgctattcctcactcccctgggattcctgttgccttccctacctcttctattaccgtgcccggctccagcaggagtacgccgccaatgggatgggcccactgaaggtgcttagcggctctgaggtgaccgcatagacttctcagaccaagggccctggatgacaggcaatcaaggcctgagcaaccaaaaggagtgccccatatggcttttctacctgtaacatgcacatagagccatggccgtagatttataaataccaagagaagttctatttttgtaaagactg

SEQ ID NO: 358 - DNA, 2801 bp, Homo sapiens
  SIMILAR (2031)..(2123): 831254mologous to Homo sapiens PB39,accession number AF045584,Smith-Waterman Score=140.
  misc_feature (1)...(2801): n = a,t,c or g
atggatcctcttagggcccaacagctggctgcggagctggaggtggagatgatggccgatatgtacaacagaatgaccagtgcctgccaccggaagtgtgtgcctcctcactacaaggaagcagagctctccaagggcgagtctgtgtgcctggaccgatgtgtctctaagtacctggacatccatgagcggatgggcaaaaagttgacagagttgtctatgcaggatgaagagctgatgaagaggatccacttcatccaagcccagcttcgcagacctctggcgcccggcgggttcccagttcccccgcttcttccgaggagacagcggaggcgaggccaccgggctgtcaggctgaagctccgtggcggccgggtcctgcacgcagagaagaccccagcgccggcgcggctcagggctgggcccacgggactccggacgcgccgcgaaagcgttgcgctcccggaggcgtccgcagctgctggctgctcatttgccggtgaccggaggctcggggccagcatggcccccacgctgcaacaggcgtaccggaggcgctggtggatggcctgcacggctgtgctggagaacctcttcttctctgctgtactcctgggctggggctccctgttgatcattctgaagaacgagggcttctattccagcacgtgcccagctgagagcagcaccaacaccacccaggatgagcagcgcaggtggccaggctgtgaccagcaggacgagatgctcaacctgggcttcaccattggttccttcgtgctcagcgccaccaccctgccactggggatcctcatggaccgctttggcccccgacccgtgcggctggttggcagtgcctgcttcactgcgtcctgcaccctcatggccctggcctcccgggacgtggaagctctgtctccgttgatattcctggcgctgtccctgaatggctttggtggcatctgcctaacgttcacttcactcacgctgcccaacatgtttgggaacctgcgctccacgttaatggccctcatgattggctcttacgcctcttctgccattacgttcccaggaatcaagctgatctacgatgccggtgtggccttcgtggtcatcatgttcacctggtctggcctggcctgccttatctttctgaactgcaccctcaactggcccatcgaagcctttcctgcccctgaggaagtcaattacacgaagaagatcaagctgagtgggctggccctggaccacaaggtgacaggtgacctcttctacacccatgtgaccaccatgggccagaggctcagccagaaggcccccagcctggaggacggttcggatgccttcatgtcaccccaggatgttcggggcacctcagaaaaccttcctgagaggtctgtccccttacgcaagagcctctgctcccccactttcctgtggagcctcctcaccatgggcatgacccagcttgcggatcatcttctacatggctgctgtgaacaagatgctggagtaccttgtgactggtggccaggagcatgagacaaatgaacagcaacaaaaggtggcagagacagttgggttctactcctccgtcttcggggccatgcagctgttgtgccttctcacctgccccctcattggctacatcatggactggcggatcaaggactgcgtggacgccccaactcagggcactgtcctcggagatgccagggacggggttgctaccaaatccatcagaccacgctactgcaagatccaaaagctcaccaatgccatcagtgccttcaccctgaccaacctgctgcttgtgggttttggcatcacctgtctcatcaacaacttacacctccagtttgtgacctttgtcctgcacaccattgttcgaggtttcttccactcagcctgtgggagtctctatgctgcagtgttcccatccaaccactttgggacgctgacaggcctgcagtccctcatcagtgctgtgttcgccttgcttcagcagccacttttcatggcgatggacgggacccctgaaaggatagcccttctgggtgaatctgggcctcctgctattctcactcctgggattactgatgccttcctaccgtctctattacacgtgcccggctccagcatgagtacgccgccaatggaatgggcccactgaaggcgcttagcggctctgacgtgaccgcatagacttctgagaccgagggacctgggatgacaggcaatcaagggnctgagcaaccaaaagggagttgccccatatgggcttttctacctgtaacatgcacattagagccatgggccgtaggatttattaaataccaagagaagttctatctgttgtaaagactgcaaaaaggaggaaaaaaaaccttcaaaaaacgccccccctaaagtcaacgctcccattgactgaaagacaagtcccctatcctagaggggttgagctttcttcctcccttgggttggaggagacccagggtgcctcttatctccttctagcggtctgcctcctgggtacctcttggggggatcggcaaacaggctaccccttgaggtcccatggggccttgagggtgcacaacatgcaatgtgtctgtgtatgtgtgaatgtgagaaaaacacagccctcctttcagaaggaaaggggcctgaggtgccagctgtgtcctgggttaggggttgggggttcggccctttccagggcagggaggggcaggttccctctctggtgctgctgctttgcaagtcttagaggaaataaaaagggaagtgagaaaaaaaaa

SEQ ID NO: 359 - DNA, 648 bp, Homo sapiens
cgttatagtatttgtcagaagttggggtctccgtgggcattgtgatccgtcccaggcagtggattaggaggccagaaggagatcccttccacggtggtaggcttaagatggatcctctcagggcccaacagctggctgcggagctggaggtggagatgatggcccgatatgtacaacagaatgaccagtgcctgccaccggaagtgtgtgcctcctcccttccaaggaagcagagctctccaagggcgagtctgtgtgcctggacccgatgtgtctctaagtacctgggacatccatggagcttgatggggcaaaaagtttgacagagttgttttattgcagggttgaagagcttgatggaaggagggttgcagcagagctcctgggcctgcatgaggtccctgtcagtatacacccctggggtgtaccccaacccttccccactttaatcaacgtgctccctgttgggtgtcatctgtgaagactgccaggcctaggctctctgtagagagtcttcaagatcccggagtggtagcgctgtctcctggtgaaggagtatttgtcacactggaatgtgactgtgtgtgtatgtatgtgtatatatatatatatatatatatatatataaacaagtttgttgacacctaa

SEQ ID NO: 360 - DNA, 1011 bp, Homo sapiens
  SIMILAR (696)..(839): 871254mologous to Homo sapiens The KIAA0146 gene product is novel,accession number D63480,Smith-Waterman Score=212.
  misc_feature (1)...(1011): n = a,t,c or g
agggactgagggccggctcagttgtggtgatgtaactacctatgcatctggaaaaatatcccaacaaaaatacttcagttaggtggtaatatgcaggcaagttttaaaacgtacttcttattgttataatttttctttgtacaataagtggaaattataaaaatcttaggaacatgtatataaactcccaagtaaggcaaaaatcacgaggcccctcatgttgtcctctgcacgtggaggagcagaggagtcagagagggcagagccgcctctgaggtgggctttccttctcttgggcctaggcactgtggttggcgtggacgagagcactgctttctcatggcctgtgtgtgacatgtgtggcaacgggagattggaacagaggccggaagacagaggcgccttttcctgtggggactgctcccgggtggtcacatctcctgttctaaagaggcacctacaggtctcccctggactgccgctcaagaccgcagtgcagagtgaaggtcaagctgttgcagcgcagcatttcctccctgctgaggtttgccgccggtgaagatgggctctattcacagtggctgatcaggtctttactgcggatctggaaagaagctgatagaagatgggtgccagaggggcctgggtagagatgttagctgagagatacccagtatggattctgtcagttttctggagctacgaagtgaagaagtgtcttcggaaaggaagtggggttgttaaattgttttgtccagtccgtaaccgcccacccgaccagctgcattggattggaggaaatcgagcttctgagtgcaggaggggcctctgcagaacactagcggttgccgcaggatctgtgaactttgcaatgtggctgcaagggtggtggtggtggtggtgatttgnggtagttatttgttaactatggacacagtgaacgtagtttacgatcttgaaatgaaacttatatttttctggggaaatgttcagatacagttttgtgaactg

SEQ ID NO: 361 - DNA, 3692 bp, Homo sapiens
  SIMILAR (35)..(1846): 621254mologous to Homo sapiens The KIAA0146 gene product is novel,accession number D63480,Smith-Waterman Score=1724.
tttcgtgctgaggaggcggtgcgctcaggcggcgctcccggagatgccccgcggcagccgcgctcggggctctaagagaaaaaggagttggaatacagaatgcccatcgctttccgggagaaagacctctgcagggcagaagagcaggtctcaggacagcaggggcagctgcctctctctctgaagcatggctcaggtgtggagaagggtttcagaacacttctgggaatccggtcattaacagctgaagagaagacggattacagaaaagcaccttgaattatgccctagacccaagcaagaaaccaccacatctaaaagcaccagtgggcttacagacataacatggagctccagtggaagtgatttgtcggatgaagataagacactttctcagttacagagagatgaattacagtttatcgactgggagattgacagtgacagggcagaggctagtgactgtgatgaatttgaagatgacgagggtgctgtggaaatctcagactgtgcttcttgtgcaagtaatcagtctttgacaagtgatgagaagctgtcggagcttcccaagccaagttctatagaaattttagagtattcatcagatagtgaaaaagaagatgatttggaaaatgtcctactcattgattcagaatcccctcacaaataccacgtgcagtttgcatcggatgcaagacagattatggagagactgatagattcaaggacaaaatcaccagagaccattttgcatacacctcagaatcccacagttaagtttcccaggactgcagaaaattcagcaaagaagaagcttttaagaggtggactagcagaaagactaaatggactgcagaatcgagagagatctgctatttctttgtggagacatcaatgtatttcttaccaaaagacactttcaggtagaaaatctggtgtattaactgtgaaaattttaaagctgcatgaggaatgtgccatgcaagttgccatgtgtgagcagttattggggtcaccagccaccagctcctcccaaagtgtggctcccaggcctggagctggcctgaaagttctcttcaccaaggagactgcaggctacctcaggggcccgccccaggacactgtccggatcttccctccctggcaaaaactgattattccaagtgggaagttgccctgttattctgaatacttacttttgtgagaaagttgttgccaaagaagattcagaaaaaaacttgtgaagtgtactgtccggacataccccttccaagaagaagcatctctttggcccagatgtttgtaattaagggtctaacaaataattcacctgaaatccaggttgtgtgtagtggtgtagccactacagggacagcctggacccatgggcacaaagaagcaaaacagcgcatcccaaccagcactcccctgagggattctctcctgggatgtggtggaaagccaggggagctgcctcgtggccagggagctggagtccgagtggtggtgcaaagagtgtattctcttcccagcagagacagcaccaggggtcagcagggggccagctcaggacacacagacccagctggaactcgagcctgccttcttggtacaagatgcctgttggaatgtttcggtgaagtgcactttggagttcaacatgttcgaaggcaagacagtttggaagggaagtcttgcagcctgggtggggaatgaaggttctacagaaagtcaccagaggaaggacagcggggattttcaggttgacttgacaccctgttggcccccagcgatacctctggaaaacacctgggccgcgaccagccctgttgaagagataaaaactccatctggctactccagcctttgggtacaatcttaccgctcatccaaatctgggacaaattgatataattgacgaagaccccatttataagctttaccagcctccagttacccgctgcttaagagacattctccagatgaatgatcttggtaccccgttgcagtttctatgccacggtgatttaccaaaaacccacaagctgaagagtctgctgcttcctgggagcaaagggagatctggctgctagtgaccgatgtcactcctgcaaacgaaggaggaagagagaccccaggctccccaaaaccctgctggtctatgtggcccccttgtgtgtgctgggctctgaagtcctgggaggcactcgctggggctgcccctccacagcctcttcttcaagggacgctctccgtgaccagggtcgggattgtttgtgcttgaacgaactggtcctccttgcttcagaagccccttttgagtgtggtctctggtgcaagttcctgtgagctgcctggcccgggtgatgctcgacagcctggactctgcaacacctgtcaactccatctgcagtgttcaaggcactgtggttggcgtggacgagagcactgctttctcatggcctgtgtgtgacatgtgtggcaacgggagattggaacagaggccggaagacagaggcgccttttcctgtggggactgtccccgggttggtccattccctgttcctcaagaggcactgcaggttcttcctgggactgccgctccaagccccagtggcaagagtgagggtcaagcctgttgcagcgcagcatttcttcccttgtgaaggtttgcccgccgggtgaagatgggagctacgaagtgaaagaagtgtccctcggaaaaggaagtggggggttgttaaattgttttgtccagtccgtaaccgcccaccccgaccagctgcattggatgggaggaaatctgagcttctgagtgccaggaggggcctctgccagaacactagcggttgcccccaggatctggggaactttgccaatgtggcctgccaaggggtggtgggtggtggtggtgattggggggtaggttattgggttaacctatgggaccccagtgaaccgtaggtttacggatcttggaaaggaaactttagatttttctggggaaatgttccagataccagttttgtgaactgttaaatcaaaataccctttttcctacagtttatcttttattttcctgcaaatttaaggaacatatttactccgttttccacattgaatccttaagttttaaactccttcatttggtatttaaggccaatatatgaggaaaaaaatttttttttgttcatttgtaattttaacaagttgaacattttaccatgattgaacatgtttttattacagtatttaacattcccccaaagaataccctgcaaagtgtaaacctttgtcccatactgtgatattaaaaattctgctacaataaatgtcaaacctaaggcactttgcaggttcactacttttggggaaaatgttctagggaactgtatccacaggttgaaactggttacccccataaagtgtagctcctctgaactggtgtgatccgtgtctctgctgaatgggtggtggggatagccggctccacccacacacacctgttttaattaggctgggtaatgtgcacggagagcaaagatcacagactaaggagcagtcagtcggatatttgctttgctggcaaagatttaaaccaagaattaattatctttggacactataaagattttgttcccttccttatagcaatataatcatgacaggccatggttaactacatcagatac

SEQ ID NO: 362 - DNA, 729 bp, Homo sapiens
  SIMILAR (61)..(540): 441254mologous to Pan troglodytes gamma-2 globin,accession number M92294,Smith-Waterman Score=165.
aattttgccctcgaggccaagaattcggcgagggcaataagctccgtagtccagacgcccatgggtcatttcacagaggaggaccaaggcttactatcacaagcctgtggggcaaaggtgaatgtggaaagatgctggaggagaaacccctgggaaaggctccctggttgtctaccccatggaccccagaggttctttgacagctttggcaaccttgtccttctgccttcttgcccatccatgggcaacccccaaaagtccaaggcgacatggccaagaaaggtgctgactttccttgggagatgccaacaaagcacctgggatgatctcaaagggcaccttttgcccaagcctgaagtgaacttgcacttgttgacaagcttgcatgtgggatcctgaggaactttcaagcttcctggggaaattttgctggtgacccgtttttgggcaatcccattttcggcaaaagaatttcacccctgaaggttgcaggctttcctgggcagaaagatgggtgacttggagttggccagtgcccttgttccttccagattaccactgaagcctcttggcccatgaattcagaagctttcaaggataaggcttttattcttgcaagcaattacaaataataaatctatttctgctaagagatcacacatgattttcttcagctcttttttttacatctttttaaatatatgagccacaaagggtttatattgagaa

SEQ ID NO: 363 - DNA, 485 bp, Homo sapiens
  SIMILAR (76)..(123): 1001254mologous to Homo sapiens alpha globin,accession number V00488,Smith-Waterman Score=84.
  misc_feature (1)...(485): n = a,t,c or g
aatgagaccatggaannnnccactgagttctctaggaagngcggcggaanttcacagactcagagagaacccaccatggtgctgtctcctgccgacaagaccaacgtcaaggccgcctggggatgttcctgtccttccccaccaccaagacctacttcccgcacttcgacctgagccacggctctgcccaggttaagggccacggcaagaaggtggccgacgcgctgaccaacgccgtggcgcacgtggacgacatgcccaacgcgctgtccgccctgagcgacctgcacgcgcacaagcttcgggtggacccggtcaacttcaagctcctaagccactgcctgctggtgaccctggccgcccacctccccgccgagttcacccctgcggtgcacgcctccctggacaagttcctggcttctgtgagcaccgtgctgacctccaaataccgttaagctggagcctcggtggccatgcttcttgcc

SEQ ID NO: 364 - DNA, 653 bp, Homo sapiens
  SIMILAR (48)..(461): 361254mologous to Homo sapiens alpha globin,accession number V00488,Smith-Waterman Score=134.
ccccgactcttctggtccccacagactcagagagaacccacccatggttgctgtctcctgccgacaaagaccaacgtcaagggcccgcctgggggtaagggtaggggtctcacccgccaagtaatgttgcgaagaccctggagaggaatggtcctgttccctccccccacacccaagccttacttcccggcacttcgaccttgagccacgggctctgcccaggtttaagggccacgggaaagaaggtggccgacgcgctgaccaacgccgtggcgcacgtgggacgacatgcccaacgcgctgtccgcccctgagcgacctgcacgcgcacaagctttcgggtgggacccgttcaacttcaagctcctaaagccactgcctgcttggttgaccctgggccgcccaccttccccggccgagtttcaccccttgcggttgcaaggcttccctgggacaagtttcctgggctttttgttgaagcaccgttgcttgaaccttccaaattaccgttaaagcttggaagccttcggttggccatgcttctttgcccctttgggcctttcccccagcccctcctcccctttcctgcacccgtacccccgtggtctttgaaataaagtcttgagtgggcggcaaaaaaaaaaaaaaaaaaa

SEQ ID NO: 365 - DNA, 458 bp, Homo sapiens
  SIMILAR (166)..(279): 1001254mologous to Mus musculus putative,accession number AK002311,Smith-Waterman Score=187.
gggctgggattggaactgtgtttgggagcctcatcattggttatgccagagtctgactctgtcacccaggctggagtgcaactgtgtaatctcagctcactgcaacctctgcctctcgggttcaagcaattctcctgcctcagcctcccaagtagctgggattacaggaacccttctctgaagcaacagctcttttcctacgccattctgggctttgccctctcggaggccatggggctcttttgtctgatggtagcctttctcatcctctttgccatgtgaaggagccgtctccacctcccatagttctcccgcgtctggttggccccgtgtgttccttttcctatacctccccaggcagcctggggaacgtggttggctcagggtttgacagagaaaagacaaataaatactgtattaataagaaaaaaaaaaaaaaaaaaaaaaaaaaaaggcgg

SEQ ID NO: 366 - DNA, 3002 bp, Homo sapiens
  SIMILAR (1029)..(2105): 1001254mologous to Homo sapiens alpha-1,3 fucosyltransferase 6,accession number M98825,Smith-Waterman Score=1998.
gtttgcatagctccctggacttctgctttgcactgccctgcaggagtgggtggggaaaggaagtggctttgaggcacacagaggggcttgttgaggccaccggaggaagcttctgccaccaatatgggacctgtgcccagcctaccagaagagagcatctgaaaacatgtatcgacatggtaacccctctgcttgaagcctcacatggctccctattgccttggtgctgaacaccctatggctgaccgtggcccagcctctgcaacagctctgcctcctctccagtggtgaagacccagcctgctgagactcctcctgcagttcctcaacatgcctgcatttctgctgccgtcagggcctttgcgaaggttgttccttgtaactggaatgcccttccatccctttttttattcaaaaggctgcaattttaattgaagaaagttcccttccaaggttcatgagttgcctgacttgcccaccggtttcctgcaagatcccttggcctggcacttagtgctcaggaaatatttggtgatgggccaactgagtgagaaggtgggatctggtgggaaggaaaggcggaaggtagaaattctgctcacttcctcattcccacctcccaaggaacccctggtgtccctgtggaacccgctttgggaaccggtggttcaggtcagccttttcactttgtactcaaagccacatcgcattgaagccacaggtggggcaaggtcatgcatgactgagtctccaaatcccttcaccctgtttggttctgcaacggggattaggggagccccacgatttgttttcaaaggatgtccgggctccaggacaggatgccctgggtcacctgatgacaggtgtggtggttggaaagggccgggtttcagctccgggtacacttcctccttccttctgctgcgtggtgtggcctcttccacgtcctcagaatccagctgttactcgtccgcggcctctcagctctagggccctctgcacactggcccccccagagactctgacccatggatcccctgggcccggccaagccacagtggtcgtggcgctgctgtctgaccacgctgctgtttcagctgctgatggctgtgtgtttcttctcctatctgcgtgtgtctcaagacgatcccactgtgtaccctaatgggtcccgcttcccagacagcacagggacccccgcccactccatccccctgatcctgctgtggacgtggccttttaacaaacccatagctctgccccgctgctcagagatggtgcctggcacggctgactgcaacatcactgccgaccgcaaggtgtatccacaggcagacgcggtcatcgtgcaccaccgagaggtcatgtacaaccccagtgcccagctcccacgctccccgaggcggcaggggcagcgatggatctggttcagcatggagtccccaagccactgctggcagctgaaagccatggacggatacttcaatctcaccatgtcctaccgcagcgactccgacatcttcacgccctacggctggctggagccgtggtccggccagcctgcccacccaccgctcaacctctcggccaagaccgagctggtggcctgggcagtgtccaactgggggccaaactccgccagggtgcgctactaccagagcctgcaggcccatctcaaggtggacgtgtacggacgctcccacaagcccctgccccagggaaccatgatggagacgctgtcccggtacaagttctatctggccttcgagaactccttgcaccccgactacatcaccgagaagctgtggaggaacgccctggaggcctgggccgtgcccgtggtgctgggccccagcagaagcaactacgagaggttcctgccacccgacgccttcatccacgtggacgacttccagagccccaaggacctggcccggtacctgcaggagctggacaaggaccacgcccgctacctgagctactttcgctggcgggagacgctgcggcctcgctccttcagctgggcactcgctttctgcaaggcctgctggaaactgcaggaggaatccaggtaccagacacgcggcatagcggcttggttcacctgagaggctggtgtggggcctgggctgccaggaacctcattttcctggggcctcacctgagtgggggcctcatctacctaaggactcgtttgcctgaagcttcacctgcctgaggactcacctgcctgggacggtcacctgttgcagcttcacctgcctggggattcacctacctgggtcctcactttcctggggcctcacctgctggagtcttcggtggccaggtatgtcccttacctgggatttcacatgctggcttccaggagcgtcccctgcggaagcctggcctgctggggatgtctcctggggactttgcctactggggacctcggctgttggggactttacctgctgggacctgctcccagagaccttccacactgaatctcacctgctaggagcctcacctgctggggacctcaccctggaggcactgggccctgggaactggcacccatgggcccacccatgagtgatggttctggctgatttgtttgtgatgttgttagccgcctgtgaggggtgcagagagataatcaccgcaccgtttccagatgtaatactgcaaagaaaaccaatgatgaggccgggtgcggtggctcacacctgtaatcccagcactttgggaggccgaggcaggcggatcacaaggtcaggagatcgagaccatcctggccaatatggtgaaacccgtctctattaaaaaatacaaaaattagtggggcgtggtctcaggctcctgcagtcccagctacttgggaggctgaggcaggagaatggtgtgaacctgtgaggtggagcttgcagtgagccaagatcgcgccattgcactccaacctggacgacagagcaagactccatctcaaaaaaataaaataaaggccatatgtttaatca

SEQ ID NO: 367 - DNA, 15062 bp, Homo sapiens
  SIMILAR (6756)..(7022): 691254mologous to Homo sapiens Human myelin oligodendrocyte glycoprotein gene,accession number AAZ29204,Smith-Waterman Score= 306.
ctgcagtgagccatgatcgtgtcaccgcaccccagcctgggtaacagaacaagaccctgtctccaaaaaataaaataaattaaaaaataaacaaattcaaaggaaggtgaagttcttccccagcaaaaatgtttttggtcatccctctgccaccatctctcctactgattcctccctcagaagcctggataccagtgatcctttcccttccttcatctactgttttctttctttagaagtagggaggtttaccgatgtctcacagtcctgatgtcttagggaattgatttagcaaggaaaagtagaaaatatatcagtcagttcccaccagcccatcacagcccaggagcttgaaattaacaatcactaataaatagagaagctcaatatgtataaagtattggcagtgcaaagtttccactttaacttgcagaaaagtgcctgtttagcagaaagaaagaaaatcctggaaagttaacactggatgaaatcttagagatcacctacttctctccctgatttttccaaatgaggaaactaaagcttcgagagatgaagtaactagcatagttattcaactatttagtagcagggctaggactagactccagtctcctgcctcgaagacagctgttctatccatgccacttgctggcaacatgtgcatctagcaaaacacatcataaagtatcctcatcttaagccatcaggaatggaaatcaaaccatttaaacccttcctcttctctctagcaatattttttcttcgcatttctctgtgccctggtctctctctctctctctctctctctctctctctctctctcgtttttaaaatcactcctgtttctttcgtggctctttctcattgtggcatgcctgcatgagtatcttgatttttctgctctaagctatggtttcttgtccaaagaaacatatataaacaaatcaaaacccttccttggtgacctttgtagaaaaggacacttggaatttctatatgagagaagctgaacctctctcttagcctatccagtcaattaaaatgagtctgtggcccccctgagggttgttaaccaatcctaagaaaggaaagatcaatctcatttcttcgtcaccactgggcagggaggctgccaaccagtcagaatctgccactcacagtcattaaaaaaactggccaatcagtccaaccttgttatatggtctggtaggaaaagaaagggactgattggaaaggatagttctgtctccacaccctttccttcctggaccccggttttccctttgtgaagtgaaagaaggacccttccccaagcctatagttaagaagatcctccgaccctcagctaagcttctcttggatcttttgctgtcttcaaattcacccctccccttacaaacctcctttttggagcctcactgctcccttgcggatttgatttcttgcttcaagcctcgtagtaatagtcccaggattctcagcctcccctcagatctccactcaccagcaagtaaaataacttgttttgtatgacttatgcaggtgaaaacgtttttaaagtgtagttgagtctctttcaggagatactatctcaaggaccttgcaataaacagtccatataggtagcagtgcagaattgagttgcaatgcccttaactatagaagcagtgatgatgatggtgatgatggtggtgatggtggtggtggtggtggtggtggtgacgatgatgattttaatgctagcaattactgaactcttactgggtaccaagtaccttgctaaaagcttcatatgtattatcccaatattggctgtgtgataagtactattattcttctcaatttacataggaggaaatagatttagagggggttaaacagctagctcaagatcacacagcaatttgggaacccagatttgtctgaacgcagaacccattattctatgagggcaagggagtgttaaacatcgcaggctgtaacaacttttggaaagagccagctttagcttcctcccaggccccttctctgatcctcctctgggattgttagccatatctgagtgtctaaattgtcgcaacagctgcaacagccgtttgggggtggtggctcctaagaactgtggactttctctgccactgaggatgtgaagctgacagcttaaaagaattccgttttggtgggaatggagatgtctggagacctcaggggataaacttgtgtctttgctagcctgtctttctcctaacagcatctccacagtgcctggcaccacttggtacttgataaatacctgttgattgattcccaaagatcccagttccatttcccacgtacctgcccgctcggggcgcaatcaacaactaaaactggagatttggggatttcagaggaacctgtgagaatcctgatggagctggaaatgcgaatttaggaaagacaggcagtctaccaccctcctcttctcgcccgcttctcctatttctccccactccttcccctccctttcaggagctcagggccataaaaatgcagatggaggatcggtgtgaaataacgggcccatataaatccctctgccgcccgcctgcaagatggattggccgcattgaaattcctccgcgaggataattaaactcggggcctcatccgggcaaaattacattcctgtaatggcgtcgctcggggtcccgggaaattgctccgtgggctttcagcggcggtttttatcgccggccggggtgtgcctgtctgcggctcgcctctcctccgggaccgtaaagctgctgccgtgatttatcctccccttctcccaaatccgattaaatggaggagctcggggccggggcgccgcggggcccgggagccgggagggggcggcgggaaggacggggccaaggaggggaggacaaacggcccctcagagagtggcggatttgcctttatttacagccgcggctttctttttattttttattttttatggggtttggtgagcttttcccgtctttctcgtgctgcgttcaagcacgatgcagggacggcaggggtttggaactggataggccttgtcgccctgttccaaagggcagggcaggtcctgtctgggagacaaggaggcctaggaaagatgagggccaggaagcctcccccacctccttccatcaggggaagggcgagcgaaaggggagagaaaacccacgttcaggagagcatgggggcgggaggggagggcgctgcttatcccaactcgcgtagttgaaacctgagcagaggctcgggcaagcctggagtgacctcgcaaccttacagcgggtcgcaggtgcccgttattcctagactgtcccaggagccaggaaagagggattcggatcatatttaaccctatcttctggctcgctgatgctgcttctctcatggtttatcaccggaatggaaaggaggaaacggggagtgggggaaagggcgaagccaccagaagcagctgcggcattttgctgactattcgcccatggagccggtttgccatccagtgatgccagagtcccggcgcgacagaaagcaggactcccaagatcttcctcctgctgcattttaggcactgaaccccaatcccgaccgtatgttaacactgaattctgagtaggagttttgttttggcagtgtgacgactgcgcatgctcggaaaggggacgcaagtccgagatcccaaacgcggtacagaccaaaccgcagtccacgttacggatcggcttactccgcggagttggcctcatttctgcagtcggcgctccctgtagtttctcctctcgaacgccaggtggagcaaccggccggataccgccacagccctggcaggcggcgctgtgatgcctgagctgatcctgtatgttgcaatcactctatccgtggctgagcgactcgttggcccgggtcacgcatgcgctgagccttcctttcgctcttcccgctgctccgcccctctctgtcttctctgcagtgggagcaggtaaggccttgggacctagagccctctgtgcgctgcgcacgcgcgcgggacacctcaccttgcgcggatgctttgaggcgcttaccttgcgtgctcccaccctggtcctctcgccctttcttgcttccgctatcccttagccttagagttggctcttccgcgtgccggtgacctccaaccgcgcgggcctggcgccatcttggatgtctcgcagggggaggataccttggagctggccaaagttagatcctggagtgctgcttttcacctgttccacccagtccctgcaaacactcttttctcgccctctggccctttcagattgtgacaacccccaggctctcccctcctatctctgctttctcttctcatcctgacttgtgccttctttattctgaaatctccagactttaggccccagaacctcaggtgctccgagcaatggagatagtggatcgtctaaagtcaccaatccctctagtcagcacccctcaatttaaaaagtaaaccttgaacatggtagaagtgggaaaaaaagccaaaacatcgcctcccgttaggttgtggcttgggatagctaaggcagaagagagaggctggttgctttggaatcactagttatttaccagtacctttctcgcatcccggcacgctggtgaagttgtaaaagtcacaaatggtgggctagagatgagggtttctgttgaggcagcaggcccagaaaggtggggtaaggccaagctagtggggccagcatgagaccctgcctgccagctttcctgtgaaggattaattaacctccccagattctgctgttacaaggaaaagaaggtttaaggaaaggaatagttaagttactacccctgtgactcatctacactgaggaaaaagcccgtgatgattttggagtcctgattctggatagtgcctttgcccaagttgtaggctaacaattgcagagttgccatggttagatagccaatggtgggatcacttaattgccaccccttgttgtgggtttattatatgccagcaccacattaaactctttatgtatgttaatttgtaaatgaacatacttaatccccctaagagctgcattttacaaagaagataataaggtataattcccttagaaaagaaccaccccttctttttctaaaagccttaaagaactattggattttgacccaagaaaacctgaatagtacggcagcaaaattgggttagagttacatataggcaaaaatcagagttctagataggacaagagttgaagacatccattaacttaaaagtaattaaggctgggtgtggtggctcacacctgtaatcccaacactgggaggccaaggtgggaagatcttttgatgccaggagttccacaatagcctgggcaaaaaataaattaagagcaattaagatgttggattcagaagtgttttaacctgggacaatctgagttcagttcatttaatgaagtggtatttaatagccctaagcattcactgagtatttcagcctgtgacatattagaaagcatgtaacttaaaagatccaagttcaagtctatcctctaccactaccacagtttcaagactgggtttagggtcacgctcttgcgttaagtatacctaataatcatctgggaaacttgtttgaaatacagggcacttgagccttattcccagagatcttttttgtttgtttatagacagggtttcacgttgttgcccatactggacaactggcgtgatcatagctcactgaagcctccagctcctgggttcaagcagtcctcctgcctcagcttctggagtagctgggactacaggtgcacttccacctcacctggctaattttatgttttgtagagatgaggtcttgatgtttgcccaggctggtctcaaactcctggcttcaagttatctttccgccccagcttctcagtgttgggattacaggaatgagccactgaacctagctcccccagagatcttgaccaggaaggtccaagttgcgcccaagaatatgcattttttaatacgtacaccacccagataattctagttcagatgggcttctcacttcacttggagaaaccctgcctttaggtttttaactcaccttctgtttgaggtaagttcacttctaccaacttagatacctatagggtgtcagatcttctttagatcttggggagacacaatttaatacttttttttttttttttgagacagtttccctcttgttgcccaggctggagtacaatggcgcaatcttggctcaccgcagcctctgcctcctggattcaagcaattctcctgcctcagcctcctgagtagctgggattacaggcatgcaccaccatgcccgactaattttgtattttcagtagagacggggtttctccatgttggtcagcctggtctcgaactcctgacctcgtgatctacccgcctcagcctcctaaagtgctaggattacaggcgtgagccactgcgcccagccactaataccttttggatagactaataacagagttcctccttgatcttcctcatcttattaatacaggaaattgaagtattttcaggaatcagatacttccagggatcagcaaagagattgttggagaccttccagtgtcttggccttcaacaaatatctcccaaaactacaaagactctaaagggcaactttttgtttgtttgtttgtttgtttgtttgttttgagatggggtctcgctctgtcacccaggctggagtgcagtggcgtggtctcgtctcactgcaacctccgcctcctgggttcaagcaattctcctgcctcagcctcctgagtagctgggattacaggcgcgtgctaccacacctggctaatttttgtatttttagtagaggtggggtttcaccatgttggtcaggctggtctcgaactcctgacctcgtgatccgcccgcctcggcctcccaaagtgctgggattacaggtgtgaaccacgtgcccagcctaaacggcaacttttaaaggtccagatgatgaagtcttgagaagcgttccttttgaataaaaactaaggaaaacttaggcaaaagacactctgggaaaattcctgtggcaactgcaaatcatgaggctatggaaatgggtaacaggtcttacctgaacccaagtgttcacttgttcagaccaggggaagtcacttcattataaggaaatcttgggagctgtgtggggtttctggaagaagtcatgacttcagggttttaattctatttctgccaatgacttaaggtcagtcactgttttctgggccagttaagctttctagggccccttttctgctaataaggatatagtttagtgaataaggagcgtttacaatactgcttctgtaattccagctctcctgccacagctcctcaccccctgaaaatgttcgcctgctccaagtttgtctccactccctccttggtgagtacctgcttttctgggagagttttaaaggagagacatcttgtctctctctttccatcagaccttgttcttcacagcaaggctgggggagaggaggtccaggcgggcagatcacttgaggccaggagttcaaaaccagcctggccaacatggcgaaaccccatctctactaaaaaaacgaaaaccagttgggcatggtggcgggcgcctgtaatcccagctactcaggaggctgaggcaacagaatagcttgaacccaggaggtagaggttgcagtgagccaagatcgcaccactgcactccagcctgggcgtcagagcaagactctgtctcaaaaaataaataaataagtaaataagtaagaaagattcttggggagggaaggccctctgctatgattgcgtaacaggatagagtgaatgcttgctagatactctcctgccccatatcccttggcggccagttaattttttttttttttttttttttgagacagagtttcgctcttgttgcccaggctgcaatggcgcgatccaccacaacctccgcctcccgggttcaagcagttcacctgcctcagactcccaagtagctggggttacaggcacctgccaccatacccagctaatttttgtatttttagtagagatggggttacaccatgttggccgggctggtctcaaactcctgacctcgtgatccgagtagagacagggtttctccatgttggtcaggctggtcttgaactcctgacctcaggtgatccgccgtcctcggcctcctaaattgctgatattataggcatgagccaccgtgcctggctgtgcccagttaattcttacccagccatcttaggagaagaatagagatgagaatctagaccaagatcaagttattcctactcctgaaactatatgtcgtgtaagctggccatccagagtggtaaatataagtagattacataacttggactgagtatgcactgtctgtaggatcttgtcctgagttagccatagctaaggagttcattctgggacttaaatttggataggaagctaaaatttacataaatacacattggaaaagtatttgactcagaaacaacagtatggaagaaatttttgaaatagtagctagaggaggcggttggttcattcacaaataaaaaggagtaccatttattgagcatttaccatgtgccttagcactcactgagtttactaattggtatacataatctcatttactcttcaaatcaaccccaagagatgatattttgatttcataaatgagaatacaggcttagaaaggtttaagtgacttatcctgagaatacactgctgataatagaattaagatttgaatctcactttatctgatgcctaaagccctggctatgaatcaccatgtgtctgttttggtgtcactggcttggggttagtcagaaaaggctaccagaaggaggtgagttttgagcatgaatctttgttcctattttccaaaaggatgtgttcagggaaagttactggcttctttcttgtgggctgaccattacccatacagaaggcccccaactttagattaagattttttttttttaactttatgatgatgcaaaaatgatatgcattcattagaaaccatacttcgggctgggcgtggtggctcatgcctgtaatcccagcaccttgggaagccgaggtgggtggatcacctgaggtcaggaattcaaaaccagcctggccaatatggtgaaaacctgtctctactaaaaatacaaaaattagctgggcgtggttgccggcgcctgtagtcccagctacttgggaggctgaggcaggagaattgcttgaacctgggaggtggaggttgtagtgagccgagccgagatcacgacactgcattccagcctggcgatacagcaagactccgtctcaaaaaaaaaaaagaaagaaagaaagaaaccatacttcgaattaggaatctttatcttttcccaagctagcaatgtgtggtacaatactctgttgcaatactcagcaggaacccacagctcccagtcacctgcccaatcacaggggtaaacaaccagtactctacggtgtactgtgttgctaggtgatttcacctaactgtaagctaatgtaagctagtgtaagctttttgagcacattgaaggccagactatggtgtttggtaggttagcagtattaaatggtttttcaaagtatgatggatttattggcacataaccctatggtaagttgaggagcatctgtatatatttcccttgttgagtgaggcaaatgcttctgaggcttagatttcttcttgttctcaagagctataaaaggatatagcaaggttggatgctcccttatggcccaaaggaagtagactttctttccttaaagcaaagtctgagaagcaagagaaatggtgtggttctttaatttagactttgctaaaaggaagaatgatccaaaactctaacgtacatgtgaagatggaaaggccatgagaggaaagaaaatcttgtctgatgatgtaacaacgtggcatagttctgaaactcctctccagtcttccttgaccttcctgcccctgtatgtcattcctgctaggtcaagagcacctcacagctgctgagccgtccgctatctgcagtggtgctgaaacgaccggagatactgacagatgaggtaccttacagtggagttgggactgtggttttgggggtgatgggtggggagggttacctgccagaaccaggaggtagaatgctgaggacagtcatcacaggctaaaattcatgaatggccaaggccatgggctttaggtggagatggaggacacttaatacgctgtatgctatagtgctccagcttttgccactggcagcacatgcccctgtgcactgctgctaactggtattacttggcctagtctactgacttcagttggaagcatttagtcctaggaagatgatctccttggggcagcaagaatagactagggcctcagtcttacacttcttgaccacacctgaatcttaaaggcatttgaagtctacatcctacgttaaaaggttctacttgccagcattttagggcgttaaacaattttctgtttgggggagaaacaatgggatttggcagcttaaagggttttaaatggtacaaaagttaccaaagcaaaaaactttaccttctacctgcctctttttcacagagcctcagcaagcttggcagtctcatgtcccccttaacctcaacttgtctccttaaccgcaaacttccaaaaccagcgcccatttcaaagggaacatcgaacaacagcagcccaagtttccattggaagctggggcttgccacaagttggggtggctggtttctggggctgggaattggaaactgtgtttggggagccctcatcattgggttatgccaggtaagataagttggaccctccactggttatctgatatgctttccaaaggtcagaaaatatttgggggtctagaactatactatcccacactgtagccactagctacatgttgtttgtttgtttgtttgttttgagacagtaacgctctgtttcccaggctggagtgcagtggcgcaatctcagctcactgtcacctctacctctgggttcaagcgattcttgtgcctcagcctcccaagtagctgggattacaggcacacacaatgacgcccacctaatttttgtggttttagtagagatggggtttcgccatgttggccaggctggtctcaaactcctgacctcaagtgatccacctgcctcggcctccctaactgccaggattacaggcatgagcccccgcgcttgacctgaattttagttttaattaattaaaaatacatagtttcagttttcagttcttcagtcacgctaaccatatttcgagtgctcagtagccagatgtggctagaggctaccatattcaacaatgcaaatatagaatgtttggctgggcacagtggctcactaatcccagcactttgggaggccagggcaggtgaatcgcttgaggtcaggagttcgagaccagcctggccaacatggcgaaaccccatctctactaaaaatacaaaaattacctgggtaaggggggcgtgcacctataatcccagctattcaggaggctgaggcagaagaatcgcttgaacccgggaggtggaggttgcagtgagctgtgagccgagatcatgccactgtactccagcctaggtgacagagtgagactttggggaaaaaaaaaaaagaaaaaaacaaatataggctgggcgaggtggttcatgcctgtaatcctgcactttgggaggtcaaggcgagtggatcacctgacgtcaggagtttgagaccagcctggtcaatatggtgaaaccctgtctctgctaaaaatacaaaaattagccaggcgttgtggtgggcgcctgtagtcccagctactcgggaggatgagacaggagaattgcttgaacccgggagacagaggttacagtgagccaagatggtgccactgcattccagtctgggcaacagagtgagaccatcaaaaaaaaaaaaatttatatatatatatatatatatatatatatatatatatatatatgtgtgtgtatgtatgtatgtattagaatgtttatatcattgtgtcattgaagaaagtttcatgaacagctttggtctagagcatgtgttggcaaactaaggcctaagggccaaatctgggccatagccaggttttgtatgattgagctaaaaataattttatggccgggtgtggtgccttacgcctataatcccagcactttgggaggccgaggcgggcggatcacgaggtcaggagttcgagactagcctggccaacatggtgaaaccccttctctactaaaaatacagaaattagccaggcatggtggcagatgcctgtaatcccagctactcaggaggctgaggcaggaaaatcacttgaaccctgaaggcggaggttgcagtgagtagagatcacgccactgcactccagcctgggcaaaagagtgaaactccatctcaaaaaaaaaaatagtttcgcatttttaaaaggcttcatttttgttttaaagcaaaagagactatatgcggcccacaaaacctaaaattatttacaatgtggccctttacagaaaaagtttaccttccctgttctagagactcagtgaacatagtggctttactgctattttttcccatctctgggaatttccctctgtcactcctgggaaaactggcactgcagccagcccctggtttctgacacctgggactgtttagtactcccagctctggataactcagttaaaaccaaattaatcctctagagaccaggaagttctcttaatgtcttttgagaaatagagttctttttaagaatttgtattaaacaagaagtctgactgctgctttattcactattctgttaaatgttggtgtcgatttaccttacccatcaagacttctggaggtatcagagtaagggaaatacagattatatatgggccttcaacactgggagtcctttatccatactacttcaactcataaaccccatagaccatttgtaacttcttttttttttttttttttgagactgagtctcgctgtctcccagactgaagtgcagtggcacaatctcagcccactgcaatctctgcctcccgggttcaaatgattctcctgcctcagcctcccaagtagctgggattacaggtgcccaccaccacgcccggctaattttttatttttttattttattttattttatttttttgagacagagtctgactctgtcacccaggctggagtgcaactgtgtaatctcagctcactgcaacctctgcctctcgggttcaagcaattctcttgcctcagcctcccaagtagctgggattacaggtacgcaccgctacccccagctaatttttgtattttttttctttcttttttttttttgagacagagtcttgctctgtcgcccaggctggagtacagtggctgcggtcttggatcactgcatcctctgcctcccgggttcacgccgttctcctgcctcagcctcctgagtagctgggactacaagcgcctgccaacacgcctggctaattttttgtatttttagtagagacagggtgtcaccgtattagctaggatggtctcgatttcctgacctcgtgatctgcccacttcggcctcccaaagtgctgggattacagacatgagccactgcgcccagcaatttttgtatttttggtagagacagggtttcaccaggttggccaggctggtctcgaactcctgacctcaagcaatctactcatctcggcctcccaaagtgctgggattacaggcgtgagccaccgcgcctggcctaatttttgtatttttagtagagacggggtttcaccatgttggccaggctggtctccaacttctggcttcaagtgatccgcctgctttggcctcccaaagtgctgggattacaggtgtgagccaccgcacccagcccatttgtagtttcttaaagccccagatcttctgactatttgaaatgagagaacataatctgtccctcttactcttgtcttctagaagagcggtgttccataaatccttaggattctgaggttatgccccagagactgtcttagagaataaaggggagaccaagccgttaaaatttccccactacttttgtaccattgcagtttggcttttagatgtttactatatgggagttctgcttaaagtttgaaaacactgctctagatagacccttccactctggatgcctcttccatcctatttgggccctggatattaagtgtctgggccaagaggtcttaatttgtggtaatgagatgggtgaaccattagtgaaggtcatgattatacctgggccatgttacaggattttagattgcctgctcccccttcattcagttcctgtagagcctttggggaatcagggcaagaatttgggcatgatggtgttaccctaaaagcttctttattatgtgagataatcttgaagagggggattctccctgagcccatcttagatatttatccttttctttgtgtgaactagaaattcagtcttttctcttctccttctaccaggaaccctttttctctgagcaacagctcttctcctacgcccattctgggctttgccctctcggaggccatggggctcttttgtctgatggtagcctttctcatcctctttgccatgtgaaggagccgtctccacctcccatagttctcccgcgtctggttggccccgtgtgttccttttcctatacctccccaggcagcctggggaacgtggttggctcagggtttgacagagaaaagacaaataaatactgtattaataagatgtttcttgagtctcctgtgtatatttcttttccacagttggctgagtgccttcgtgagagtacaaggcccgaagggtagtgatggtgctaaactcaacatggatttggctgagctc

SEQ ID NO: 368 - DNA, 561 bp, Homo sapiens
  SIMILAR (31)..(213): 1001254mologous to Homo sapiens HSPC272,accession number AF161390,Smith-Waterman Score=332.
  misc_feature (1)...(561): n = a,t,c or g
gactctgggacccgggacactgttctcaagctcctgcgcgagtggtatatgatcatctctcgagagatgtttaaccctatgtatgccttgttccgtacctcacctggtgatcgagtcacctacaccatcaatccatcttcccactgcaaccccaaccacctcagctacttcaagtttgtcggacgcattgtggccaaagctgtatatgacaacccgtcttctggagtgctactttactcgatccttttacaaacacatcttgggcaagtcagtcaagatatacagatatggagagtgaagattaccacttctaccaaggtctggtttatctgctggaaaatgatgtctccacactaaggctatgacctcaccttcagcactgaggtccaagaagtttggagtttgtgaagttcgtgacctccaaacccaatggggggcaacatcttggtaacagaggaggaataagaaggagtatgtacacctggtatgccagatgagaatgacaggagccatccgcaagcagtttgggnggcttccttaaaaaggttcctaatgngatca

SEQ ID NO: 369 - DNA, 530 bp, Homo sapiens
  SIMILAR (327)..(530): 1001254mologous to Homo sapiens HSPC272,accession number AF161390,Smith-Waterman Score=350.
  misc_feature (1)...(530): n = a,t,c or g
gctgaggctgatgccattatacaaatggtacgtgagggtcaaagggcgcggagacagcaacaagcagcaacgtcggagtctagccagtcagaggcgtctgtccggagggaggaatcacccatggatgtggaccagccatctcccagtgctcaagatactcaatccattgcctccgatggaaccccacagggggnagaaggaaaaggaagaaagaccacctgagttacccctgctcagcgagcagctgagntttggacgagctgtgggacatgcttggggagtgtctaaaggaactagaggaatcccatgaccagcatgcggtgctagagactcaccgcactgtgttaaaccagatcctacggcagtccacgacccaccttgctgatgggccttttgctgtcctggtagactacattcgtgtcctcgactttgatgtcaagcgcaaatatttccgccaagagctggagcgtttagatgaggggctccggaaagaagacatggctgtgcatgtccgtcgtgaccatgtgttt

SEQ ID NO: 370 - DNA, 587 bp, Homo sapiens
  SIMILAR (432)..(587): 751254mologous to Homo sapiens HSPC272,accession number AF161390,Smith-Waterman Score=191.
acacacacacacacaacagaagaagacttgaagtctatacacaggaggctagttctgactggtcacaggtctggattgtagactgtaggaaatgtaagcatccaaggagctgttgggaaaagcttacaaaacacagtggagaaaagcagaagagttgggaaaggcatccttttgtcctggatagctacagttttccccacccaaatatgggaagcttctttgcaagctcaatgtatgagaagtggaagggccaacctctagcctgtctctaaggaaagcagagttgcacccttatgtgatttttgtctcccttttatccagtcggagtctagccagtcagaggcgtctgtccggagggaggaatcacccatggatgtggaccagccatctcccagtgctcaagatactcaatccattgcctccgacggaaccccacagggggagaaggaaaaggaagaaagaccacctgagttaccccgctcagcgagcagctgagtttggacgagctgtgggacatgcttggggagtgtctaaaggaactagaggaatcccatgaccagcatgcggtgctagtgctacagcctgct

SEQ ID NO: 371 - DNA, 2597 bp, Homo sapiens
  SIMILAR (1483)..(2184): 821254mologous to Homo sapiens HSPC272,accession number AF161390,Smith-Waterman Score=946.
atgacccccccccacctccctcccagacgggcttcagatgatgaatttgagaatcttagaattaaaggccctaatgctgtacagctggtgaagaccacccctttgaagccctcacctctgcctgtcatccctgatactatcaaggaagtgatctatgatatgctgaatgctctggctgcataccatgctccagaggaagttggtttcacatccccaatgctgtttgatgagaggaagtatccctaccacctcatgctgcaaaaatttctctgctccggaggccacaatgctctttttgaaactttcaactgggctctgtccatgggaggtaaagttcctgtttctgagggattggaacactcagacttgcctgatggcacaggagaattcctagatgcctggcttatgctggtggagaagatggtgaatcccaccacggtgcttgaatctccacattcgctgcctgccaaattgcctggaggtgtccagaactttccccagttcagtgcactgcgcttccttgtggtaactcagaaagcagcctttacttgcatcaaaaacttatggaaccggaaacccctgaaggtatatggtggacgaatggctgaatcgatgctggccattctatgccacatcctccgaggagaacctgtgattcgagagagactaagcaaggagaaggaggggtctcgaggagaagaggatacagggcaagaggaaggtggctcccgccgggaacctcaagtcaaccagcaacaactgcaacagctcatggacatgggcttcacaagggaacatgcaatggaggcactgttgaacaccagcaccatggagcaggccacagagtaccttttaacccaccctcctccaatcatgggaggagttgttcgggatctcagcatgtctgaagaggaccagatgatgagagcaattgctatgtctctgggacaggatattccaatggatcaaagggcagagtcacctgaggaagttgcttgccggaaggaggaagaggaacggaaagctcgggaaaagcaggaggaggaagaggctaaatgtctagagaagttccaggatgctgacccgttggaacaagatgagctccacactttcacagatactatgttgccaggctgcttccaccttcttgatgagctgccagacacagtataccgtgtgtgtgacctgatcatgacagcaatcaaacgtaatggagcagattatcgtgacatgattctgaagcaagtagtcaatcaggtgtgggaagctgctgatgtattgatcaaagctgctcttcccctgacaacaagtgacacaaaaaccgtgtcagagtggataagtcagatggccacactgccccaggcctccaatttggctactagaatcttgcttttaacgctactttttgagattgaggtccgcagctggagttacccaccatttcaagataaggaccattgtaaaaaggaaaaggaaaattttgaagccattgctgcagctttggcagcagagcgggagagcaagcctcctgtccgagacacccgtgagagccagctggcacacagcaaggacgagcctcctccactctcccctgcccccttaaccccagccacgccttcctcccttgacccattcttctcccgggagccctcatctatgcacatctcctcaagcctgccccctgacacacagaagttccttcgctttgcagagactcaccgcactgtgttaaaccagatcctacggcagtccacgacccaccttgctgatgggccttttgctgtcctggtagactacattcgtgtcctcgactttgatgtcaagcgcaaatatttccaccaagagctggagcgtttagatgaggggctccggaaagaagacatggctgtgcatgtccgtcgtgaccatgtgtttgaagactcctatcacactgcttcacagtctctcactcacacaaatgactggatgtatcctgggttttctgcacagctcttttctgcttctgctttcttatgcaggtatatagtatttgaaggagaagaagggcaggatgctggcgggctcctgcgggagtggtatatgatcatctctcgagagatgtttaaccctatgtatgccttgttccgtacctcacctggtgatcgagtcacctacaccatcaatccatcttccccactgcaaccccaaccacctcagcttacttcaagtttgtcggacgctattgtggcccaaagctgtatatgacaaccgtcttctggagtgctactttactcgatccttttacaaacacatcttgggcaagtcagtcagatatacagatatggagagtgaagattaccacttctaccaaggtctggtttatctgctggaaaatgatgtctccacactaggctatgacctcaccttcagcactgaggtaggtcaggaaatcctaatcacagcacatcccagccaatctggaagatccaattcacaggttcaccttagaactagcactgcgtgaccttctcatagttctaaggaagcatcttgacttcttaaagctgtagcaggtgtttgtgagtgacatcacaaacaggaaaaaccaagaatttgca

SEQ ID NO: 372 - DNA, 2218 bp, Homo sapiens
  SIMILAR (10)..(1854): 781254mologous to Homo sapiens HSPC272,accession number AF161390,Smith-Waterman Score=2336.
atgccacagcttccaggtatcagtctccctgaaggtgtggacccctcttttctggctgccctgcctgatgacatccgtcgggaagttctacagaaccagctaggcattcgtccaccaacccggactgccccctccacaaatagctcagcgcctgcagtggtggggaatcctggtgtgactgaagtgagccctgagtttctggctgccctgcctccagccattcaggaggaagtactggcacagcagacagctgagcagcagcgaccagaactagcacagaatgccagctcagacacccttatggaccctgtgaccttaatccagactctgccctcagacctgcgccgtagtgtcctagaggatatggaggacagtgtgttagctgtgatgccacctgacattgcagctgaggctcaagccctgagacgagagcaagaagcccggcagcgacagctcatgcatgagcgtctgtttgggcacagtagcacctccgcactctctgctattctccgaagcccggctttcaccagtcgcttaagtggcaaccgtggggtccagtatactcgccttgctgtgcagagaggtggcaccttccagatggggggtagcagcagccataacaggccttctggcagtaatgtagatactctcctccgcctccgaggacggctccttctggaccacgaagccctttcttgtctcttggtcctactttttgtggatgagccaaagctcaatactagccgtctacaccgagtactgagaaatctctgctaccatgcccagacccgccactgggtcatccgcagtctgctctccatcttgcagcgcagcagtgagagtgagctatgcattgaaacacccaaactcactacaagtgaggaaaagggcaaaaagtcgagcaagagctgtgggtcaagtagccatgagaaccgtcccctggacctgctacacaagatggagtcaaagagctccaaccagctttcctggctctcagtatccatggatgcagccctaggctgcaggactaatatatttcagatccagcgttcaggggggcgtaaacataccgagaagcatgcaagcggtggctccaccgtccacatccatccccaagctgctcctgttgtctgcagacacgttttggatacactcattcaattggccaaggtatttcccagccacttcacacagcagcggaccaaagaaacaaactgtgagagtgatcgggaaaggggcaataaggcctgtagcccatgctcctcacagtcctccagcagtggcatttgcacagacttctgggacttattggtaaaactggacaacatgaatgtcagccggaaaggcaagaactccgtgaagtcagtgccagtgagcgctggcgaaaacaaggtgtcagaagcacaggctaattctggcagcggtgcttcctccaccaccactgccacctcaaccacatctaccaccaccaccactgccgcctccaccacgcccacaccccctactgcacccacccctgtcacttctgctccagccctggttgctgccacggctatttccaccattgtcgtagctgcttcgaccacagtgactacccccacgactgctaccactactgtttcaatttctcccactactaagggcagcaaatctccagcgaaggtgagtgatgggggcagcagcagtacagactttaagatggtgtcctctggcctcactgaaaaccagctacagctctctgtagaggtgttgacatcccactcttgttctgaggaaggcttagaggatgcagccaacgtactactgcagctctcccggggggactctgggacccgggacactgttctcaagctgctactgaatggagcccgccatctgggttataccctttgtaaacaaataggtaccctgctggccgagctgcgggaatacaacctcgagcagcagcggcgagcccaatgtgaaaccctctctcctgatggcctgcctgaggagcagccacagaccaccaagctgaagggcaaaatgcagagcaggttcctccggtttaggctcagctagcagcatccaggcagctgttcggcagctggaggctgaggctgatgccattatacaaatgtcggagtctagccagtcagaggcgtctgtccggagggaggaatcacccatggatgtggaccagccatctcccagtgctcaagatactcaatccattgcc

SEQ ID NO: 373 - DNA, 6896 bp, Homo sapiens
  SIMILAR (3848)..(4975): 951254mologous to Homo sapiens HSPC272,accession number AF161390,Smith-Waterman Score=1789.
atggtgtccccagaacccaagacaggacactcaataaggaattggctggatgagttaaaagatctcccaatattacatgcatactccaatctcccctcatccccggctgttgatctcgccatccatagctccaaggaaggtagaatggactggactgaaggtcaagtcacaggaccggttgttcgctcagcagctacaagtggagctggtagcactacctctggtgttgtgtctggcagcctcggctctcgggagatcaactacatccttcgtgtccttgggccagccgcatgccgcaatccagacatattcacagaagtggccaactgctgtatccgcatcgcccttcctgccccttcgaggctcaggaactggcaacggctcttctaggattcctcgggaatctgctccagaaatggccacggcagaatctctggtggaagagctctcagaggatgcagctggtggggcatccccaggagtggagctgcctgctctgggctgctcagaactgccagctgctgaagtgtcacccacagcctcctctaagaatttggaaactatttgtgagtatgcttattgtatggcaatgttaccggaaacgggtcttgatccataccccaagagagggttcttggatctcacacaagaaagaatttggacagacatccccccatccccaggaaatatccctaccacccatccactgatggtgcgccatgcagaccacagttctctgacactgggcagtggctcttcaacaactcgtctcacccagggcatcgggcgcagtcagaggaccctaaggcagctgacggccaatactggccacaccattcatgttcactaccctgggaatcgccagcccaaccctcctcttatactgcagaggttgcttggtccctcagctgctgctgacatccttcagctgagcagcagccttcccctacaaagccggggtcgggcccgcctcctgggtaggcaacgatgacgtccacatcatcgcccgttctgatgatgagctgctggatgactttttccatgatcagaggcacagctaccagccaagcaggaaccctgtccagcatccccacagccctgacccgctggacagaagaatgcaaagttctcgatgctgagagcatgcatgactgtgtttcagtggttaaagtgtccattgtcaatcacctggaattcctgagggatgaggagctggaagaaaggcgagagaagcgcaggaaacaactggctgaggaagaaacaaagataactgataaaggcaaagaagataaggagaacagggatcagagtgcacagtgtactgcatctaagtcaaatgactccactgaacagaatctctcagatgggacgcctatgcctgacagctacccaacaaccccatcttcaactgatgcagctacatctgagtccaaggagacccttggcactctgcaatcctcacaacagcaaccaacactcccaaccccaccagctttgggagaggttcctcaggagctgcagtctccagctggagaagggggcagctctacacagctattgatgcctgtagagccagaggaattgggtcccacaaggccaagtggggaagcagaaacaactcagatggagttatccccagctcccactataacctcactttccccagagagagctgaggattctgatgcactgacggctgtcagcagtcagctagaaggctctcctatggatacaagcagcctggcttcctgtaccttagaggaggctgtgggtgacacttcagcagctggcagttctgagcagcccagagcaggcagctccactcctggggatgccccaccagctgtggcggaagtgcaaggcaggagtgatgggtcaggggaatctgcccagccacctgaggacagctccccacctgcatcctctgagagctcttccaccagagattctgccgtggccatttctggagcagattcccgaggaatcctagaagagccgttgccttcaacaagcagtgaagaagaagatccccttgcgggtatcagtctccctgaaggtgtggacccctcttttctggctgccctgcctgatgacatccgtcgggaagttctacagaaccagctaggcattcgtccaccaacccggactgccccctccacaaatagctcagcgcctgcagtggtggggaatcctggtgtgactgaagtgagccctgagtttctggctgccctgcctccagccattcaggaggaagtactggcacagcagagagctgagcagcagcgacgagaactagcacagaatgccagctcagacacccctatggaccctgtgaccttcatccagactctgccctcagacctgcgccgtagtgtcctagaggatatggaggacagtgtgttagctgtgatgccacctgacattgcagctgaggctcaagccctgagacgagagcaagaagcccggcagcgacagctcatgcatgagcgtctgtttgggcacagtagcacctccgcactctctgctattctccgaagcccggctttcaccagtcgcttaagtggcaaccgtggggtccagtatactcgccttgctgtgcagagaggtggcaccttccagatggggggtagcagcagccataacaggccttctggcagtaatgtagatactctcctccgcctccgaggacggctccttctggaccacgaagccctttcttgtctcttggtcctactttttgtggatgagccaaagctcaatactagccgtctacaccgagtactgagaaatctctgctaccatgcccagacccgccactgggtcatccgcagtctgctctccatcttgcagcgcagcagtgagagtgagctatgcattgaaacacccaaactcactacaagtgaggaaaagggcaaaaagtcgagcaagagctgtgggtcaagtagccatgagaaccgtcccctggacctgctacacaagatggagtcaaagagctccaaccagctttcctggcttcttcagtatccatggatgcagccctaggctgcaggactaatatatttcagatccagcgttcaggggggcgtaaacataccgagaagcatgcaagcggtggctccaccgtccacatccatccccaagctgctcctgttgtctgcagacacgttttggatacactcattcaattggccaaggtatttcccagccacttcacacagcagcggaccaaagaaacaaactgtgagagtgatcgggaaaggggcaataaggcctgtagcccatgctcctcacagtcctccagcagtggcatttgcacagacttctgggacttattggtaaaactggacaacatgaatgtcagccggaaaggcaagaactccgtgaagtcagtgccagtgagcgctggcggtgagggggaaacctctccatacagcctcgaggcctctccactggggcagctcatgaacatgttgtcacacccagtcatccgccggagctctctcttaactgagaaactcctcagactcctttctctcatctcaattgctctcccagaaaacaaggtgtcagaagcacaggctaattctggcagcggtgcttcctccaccaccactgccacctcaaccacatctaccaccaccaccactgccgcctccaccacgcccacacccccgtacgtgcacccaccccgtgtcacttctgctccagcccgtggttgctgccacggctatttccaccattgtcgtagctgcttcgaccacagtgactacccccacgactgctaccactactgtttcaatttctcccactactaagggcagcaaatctccagcgaaggtgagtgatgggggcagcagcagtacagactttaagatgggtgtcctctggcctcactgaaaaccagctacagctctctgtagaggtgttgacatcccactcttgttctgaggaaggcttagaggatgcagccaacgtactactgcagctctcccggggggactctgggacccgggacactgttctcaagctgctactgaatggagcccgccatctgggttataccctttgtaaacaaataggtaccctgctggccgagctgcgggaatacaacctcgagcagcagcggcgagcccaatgtgaaaccctctctcctgatggcctgcctgaggagcagccacagaccaccaagctgaagggcaaaatgcagagcaggtttgacatggctgagaatgtggcaattgtggcatctcagaagcgacctttgggtggccgggagctccagctgccttctatgtccatgttgacatccaagacatctacccagaagttcttcttgagggtactacaggtcatcatccagctccgggacgacacgcgccgggctaacaagaaagccaagcagacaggcaggctaggttcctccggtttaggctcagctagcagcatccaggcagctgttcggcagctggaggctgaggctgatgccattatacaaatggtacgtgagggtcaaagggcgcggagacagcaacaagcagcaacgtcggagtctagccagtcagaggcgtctgtccggagggaggaatcacccatggatgtggaccagccatctcccagtgctcaagatactcaatccattgcctccgatggaaccccacagggggagaaggaaaaggaagaaagaccacctgagttacccctgctcagcgagcagctgagtttggacgagctgtgggacatgcttggggagtgtctaaaggaactagaggaatcccatgaccagcatgcggtgctagtgctacagcctgctgtcgaggccttctttctggtccatgccacagagcgggagagcaagcctcctgtccgagacacccgtgagagccagctggcacacatcaaggacgagcctcctccactctcccctgcccccttaaccccagccacgcctttcttcctttgaccaattcttttccggggagccctcatctatgcacatctcctcaagcctgccccctgacacacagaagttccttcgctttgcagagactcaccgcactgtgttaaaccagatcctacggcagtccacgacccaccttgctgatgggccttttgctgtcctggtagactacattcgtgtcctcgactttgatgtcaagcgcaaatatttccgccaagagctggagcgtttagatgaggggctccggaaagaagacatggctgtgcatgtccgtcgtgaccatgtgtttgaagactcctatcgtgagctgcatcgcaaatcccccgaagaaatgaagaatcgattgtatatagtatttgaaggagaagaagggcaggatgctgagcgggctcctgcgggagtggtatatgatcatctctcgagagatgtttaaccctagtgtatgccttgttccgtacctcacctgggtgatccgagtcacctaacaccatcaatccatctttcccactggcaaccccaaccacctcagctaatttcaagtttgtcggacgcattgtgggccaaagctgtatatgacaaccgtcttctgggagtgctactttactcgatccttttacaaacaccatcttgggcaagtcagtcagatatacagatatggagagtgaagattaccacttctaccaaggtctggtttatctgctggaaaatgatgtctccacactaggctatgacctcaccttcagcacttgaggtccaagagtttgggagtttgtgaagtttcgtggacctcaaacccaatgggggccaacatcttgggtaacagaggagattaaggaaggagttttgttacacctggtattgccagatgaggattgacaggggccttcccgcaagcagttgccggcctttctaggaaggcttctatgagatcatcccaaacgcgcctaatctccatcttcaactgagcatgagttagagctgcttatatcaggactgcccaccattgacatcgatgatctgaatcccaacactgaataccacaagtaccagtccaactctatttcagatccagtggttcctggaagaaacattgccgttcctttcgaatcaaaactgacccgtgcccaaagttccctcccagtttgttcacggggtaccttccaagggtaacccctggcaagggctttgcctgcccctcgaagggcatggaatggggctttcaggaagttttcaggttcccttcggaggtggacaggtcccacagatcgccctgccttcagctcacacatgttttaatcagctggatctgcctgcctatgagagctttgagaagctccgccacatgctactgttggctatccaggagtgctctgaaggctttgggctggcctaataaggccctgcccaactcccgtggggtttttttttaccattgttggacctggggaggggggagttaaaaaaaagaaccgggaaagaaattgtcaaaaaccaataaatgaaaatccaccaactcaccgtgtgtgtcccagctgccccatcttccccagcgctatcacctgttcctcttctcattctctccccgccgcctgtttcctcaccttctctccccggttccatgccgtccatgattccccaccccatgtgttttaaaaagggcagttaggctttggcaggggacctgtctgttcccaattgttttgaacagtgtgctcctcagattctgtgttcagaaggatttgctgcattgagacttgaaacctttggataggggaaaaaattatatatatatatatttttttgttctgtttgcatttcttaattttgtgcttggaatgtgttgatgtgcacaaccaaatattccaatccggaacaagattggcgtctgtgttgtggaggtttcaaataaagagccctcttcataaaaaaaaaaaaaaaa

SEQ ID NO: 374 - DNA, 1151 bp, Homo sapiens
  SIMILAR (169)..(624): 481254mologous to Homo sapiens ISCU2,accession number AY009128,Smith-Waterman Score=237.
  misc_feature (1)...(1151): n = a,t,c or g
atggcggcggctggggctttccgtctgaggcgggcggcatcggctctgctgctgcggagcccccgcctgcccgcccggagctgtcggccccggcccgactctatcacaagaagtcccccagacgtgagactcccactcgagaaacaactaaagaatgccataaatcaacgtggcacaaaaggcccctacattagatactatcctgaggttgttgatcattatgaaaatcctagaaacgtggggtcccttgacaagacatctaaaaatgttggaactcggactggtgggggctccagcatgtggtgacgtaatgaaattacagatttcaagtgggatgaaaaaggggaagatttgtgggatgctagggttttaaaaccttttnggctgtgggttccgcaattggcctccagctcattaagccacttgaatggggtgaaaggaaagaccggtggaggaagccttgactatcaaaaacacagattatcgccaatggagctctgcctttccttcccgtggaaacttgcacttgctcccatgctgggcttgaaggtggcattcaaggccgccctggctgattacaaaattgaaacaagaacccagaaaaagggagaggcagagaagaaatggagccctccccttggcgaagcctccagcaggcccacaccagctgttccccaaccggctgtgccagtcaccttagatgtttcaggaagccggcttccttctcccactgaaggagccctatgaggataaccggcacaataaccttgcctgttccaccgttatggacctcctcatggcaaggcaaaataccacagtttccattggttcctgaatcctgtggtttcctttcagccccactttttatcggccttaaccctagttaatgtatattttggaattgtgtgtatgacctcagaactgaaattgataatagnaagttgcaagttttgatagcccgtgaagtgcataagtatctaattttacctgaattgattttggggggaaattaccagtagaatgccttggtctgaatatttgatagaaccaattgttgtacataaaacagatctgcgcatatatatatatgtataaaaaataataaaataatggaagatgatggtgttctcttgtaaaaaaaaaaaaaaaaa

SEQ ID NO: 375 - DNA, 1184 bp, Homo sapiens
  SIMILAR (262)..(852): 421254mologous to Mus musculus putative,accession number AK012852,Smith-Waterman Score=273.
ttcggcacgaggaagcaccgtggctgctattatctgctctccgcgcctgacccctcccaggactcgtgatgccaaggccgcgtgcgagcgcttacgaagagtcggggttgagccccagctgagccgagggctcgcactcttctggtctcccaggcccaacccacctgaagaaatgagtggtggattggctccaagtaagagcacagtgtatgtatccaacttgcctttttccctgacaaacaatgacttgtacccggatattttccaaagtattggcaaaagtttgtaaaaggttaccaatcaatgaaagagtaaaagatacccaggaaagaagttaaaggggttgcatttattttatttttggataaagactctgcacagaaactgtgccagggccaataaacaacaaacagttatttggtagagtgataaaagcaagcattgctcattgacaatggaagagcagctgagttcatccgaaggcgaaactactttgataaatctaaagtgttatgaatgtgggggaaagtggacacttaaagttatgcctgtccaaaaaatatgctcggagaacagtgagcctcccaaagaagaaagaaaaaaagaaaaaaaagaaagctcctgaaccagaagaagaaattgaggaagtagaagaaagtgaagatgaaggggaggatcctgctcttgacagcctcagtcaggccatagcattccagcaagccaaaattgaagaagaacaaaaaaaatgggaaacccagttccagggagtcccctcaaacatcaggatgattccaagacgcacaaggataaagaaaagcacatatttccagtgatgaggaagaacttagtgattaaaatcttgccccagcacagtaataaaaatcaagatttgttagtaacaatcttgaagagctaattttaataaaaataagaaaaattaatactatcatgttatatactattattgtcatcccaagaaaaaagatattttaaaaatttatttgaaaagttcgattataagggctttattcatgcctgatttgtttacatgaggacttctgaaattaatccttaaaacaaacttcctgaagaccgaaaagttgaatgatttattgttacttatattaataaacttttcaagagaattttgtctttaaatatgggtgttttgtcatcatatttct

SEQ ID NO: 376 - DNA, 577 bp, Homo sapiens
  SIMILAR (152)..(442): 971254mologous to Homo sapiens preproapolipoprotein,accession number A14829,Smith-Waterman Score=493.
  misc_feature (1)...(577): n = a,t,c or g
gctctcctgacgggaagncaggctcggcatttctggcagcaagatgaccccccaaaaagcccttgggatcgagtgaaggactggcccactgtgtacgtgattgtgctcaagacagcggcagagactatgtgtcccagtttgaaggctccgccttgggaaaacagtaaacctaaagctccttgacaactgggacagcgtgacctccaccttcagcaagctgcgcgaacagctcggccctgtgacccaggagttctgggataacctggaaaaggagacagagggcctgaggcaggagatgagcaaggatctggaggaggtgaaggccaaggtgcagccctacctggacgacttccagaagaagtggcaggaggagatggagctctaccgccagaaggtggagccgctgcgcgcagagctccaagagggcgcgcgccagaagctgctgcccgtgctggagagcttcaaggtcagcttcctgagcgctctcgaggagtacactaagaagctcaacacccagtgaggcgcccgccgccgccccccttcccggtgctcagaataaacgtttccaaagtggaaa

SEQ ID NO: 377 - DNA, 1482 bp, Homo sapiens
  SIMILAR (870)..(4): 991254mologous to Homo sapiens Amino acid sequence of Smad1 interactor protein clone S1+19,accession number AAB07854,Smith- Waterman Score=1528.
ctagctgtcagacacttcttcctcctcctcctcatcctcgtcatctttcctgtctatttcagaagtgtccgacgactcatggagcaagacgtattctctgctactgaatccaaatttgagtacatccttttcttttagttcatagtatctctgtggctcaatacgtttgttgtttaagaaggttccattgcctgagccaaggtcaatgatgtagggcttcactcttcggccaactgtgccatcagcacgggtatattccacaagccgatattgaaagaccgcatgctgctttgaacaagacgggtgatcaattggaatgtctgcaatgcggcggtgtcgacccagtaggtacgcactctgtcgatgtatgtacatgactggaagcacctcatcatttttaaatgggtagagacgccaccgttttttggggatacgtgcttctgggggctcactatatttaatgactacaccccggaaagtgttggtgtcctcaagaagtgccccagaaagttcaaagcttggtttttctttagcgggcacctctttttctttgttgttgccaccaggccgaggaaccaactcctgagactcactgccgccaccaccaacgtcattcctctggcgatgctcccgtcgcctggcattataaaactcccgctcttcttcctgagcctgcaggttctgagtgtctcgatcccgtccctgaccctgcccactcccaggcctctcgttagacgttctcctttggtgggaatggccccggtgtctgtcccggtcactgttcctagctctcctgtgttcctgttctgatggttccctgtgctgccgatcctcccgtcctctccggggatgatcctcacgctcctcttcactgggccctctgactgtcccaaggcccccgccgccactccagcgccgtgcagccaccgccgcacagccaccgtggccaccaccatgacgactgcgcgtccccctcgcaggtgcgccagaactaccgccatcaaccgccagatcaacgtggagctctatgcctcctacatctacctgtccatgtcttactactttgaccacaatgatgtggctttgaagaactttgccaaatactttcttcaccaatctcatgaggagagggaacatgccaagaaactgatgaagctgcttcactttgactgttgagtggtgaggacttcggtttctcttactgcgaggagacttgcttcttctccctgaggccttgtttttctttttgggtggggaccggctaactcctcgggctcggttcccgcggtggcccgagcgggccggctcgctggtcggcggagacgggctaccaccggagtggtccggacggcggtgggcgggaggtgcgacttctgggctgagacgctcctgcttcaccaccacccccgccggcagcaccacgtccccgtcccggtgtcttcgccggctccctcgctcccgttcgctcttcaccgccttcat

SEQ ID NO: 378 - DNA, 558 bp, Homo sapiens
  SIMILAR (25)..(66): 1001254mologous to Homo sapiens preproapolipoprotein,accession number A14829,Smith-Waterman Score= 62.
ggaggtcccccacggcccttcaggatgaaagctgcggtgctgaccttggccgtgctcttcctgacggcctaaagctccttgacaactgggacagcgtgacctccaccttcagcaagctgcgcgaacagctcggccctgtgacccaggagttctgggataacctggaaaaggagacagagggcctgaggcaggagatgagcaaggatctggaggaggtgaaggccaaggtgcagccctacctggacgacttccagaagaagtggcaggaggagatggagctctaccgccagaaggtggagccgctgcgcgcagagctccaagagggcgcgcgccagaagctgcacgagctgcaagagaagctgagcccactgggcgaggagatgcgcgaccgcgcgcgcgcccatgtggacgcgctgcgcacgcatctggccccctacagcgacgagctgcgccagcgcttggccgcgcgccttgaggctctcaaggagaacggcggcgccagactggccgagtaccacgccaaggccaccgagcatctgagcacgctcagcgagaagg

SEQ ID NO: 379 - DNA, 404 bp, Homo sapiens
  SIMILAR (3)..(116): 1001254mologous to Homo sapiens start codon not included,accession number A11693,Smith-Waterman Score=185.
  misc_feature (1)...(404): n = a,t,c or g
agaaggccaagcccgcgctcgaggacctccgccaaggcctgctgcccgtgctggagagcttcaaggtcagcttcctgagcgctctcgaggagtacactaagaagctcaacacccagtgaggcgcccgccgccgccccccttcccggtgctcagaataaacgtttccaaagtgggnnnnnnnnnnnnnnnnnnnnnnnnnnnnnnnnnnnnnnnnnnnnnnnntaaaaaaaaannnnnnnnnnnnnnnnnnaaaggggggggcccctaaaaaaagcccccggggggcccccatttttcgggggggagaaaaaaaannnnnnnnnnnnnnnggggggagctataaaaacccctctgggggttggggggggacaacctcttttttgggggggaaaaaataaaaaaat

SEQ ID NO: 380 - DNA, 471 bp, Homo sapiens
  SIMILAR (181)..(456): 971254mologous to Homo sapiens preproapolipoprotein,accession number A14829,Smith-Waterman Score=463.
gaaggaggtcccccacggcccttcaggatgaaagctgcggtgctgaccttggccgtgctcttcctgacggggagccaggctcggcatttctggcagcaagatgaacccccccagagcccctgggatcgagtgaaggacctggccactgtgtacgtggatgtgctcaaagacagcggcaaagacagcgtgacctccaccttcagcaagctgcgcgaacagctcggccctgtgacccaggagttctgggataacctggaaaaggagacagagggcctgaggcaggagatgagcaaggatctggaggaggtgaaggccaaggtgcagccctacctggacgacttccagaagaagtggcaggaggagatggagctctaccgccagaaggtggagccgctgcgcgcagagctccaagagggcgcgcgccagaagctgcacgagctgcaagagatgctgacccactgggcgaggaag

SEQ ID NO: 381 - DNA, 1170 bp, Homo sapiens
  SIMILAR (455)..(1090): 531254mologous to Homo sapiens Human apolipoprotein A-1 variant "Paris" protein sequence,accession number AAW08602,Smith- Waterman Score=361.
aggaggtgcgtcctgctgcctgccccggtcactctggctccccagctcaaggttcaggccttgccccaggccgggcctctgggtacctgaggtcttctcccgctctgtgcccttctcctcacctggctgcaatgagtgggggagcacggggcttctgcatgctgaaggcaccccactcagccaggcccttcttctcctccaggtcccccacgggcccttcaggatgaaagctgcggtcctgaccttggccgtgctcttctctgacgggtgagccaggcgtcggcatttctggcagggaggatgaagcccccccagagccgcctgggatcgagtagaaggaacctggccactcgtgtaccgtggactgtgctcaaagaacagcggacagagacttatgtgtcccagtttgaagggctccgctttggggaaaacagctaaaccttaaagctcctttgacaactggggacagcgttgaccttccacctttcagccaagctgcgcgaacagtttcgggccctgttgacccagggatttcttggggattaacctggggaaaagggagacagaggggccttgaggcaagggaagatgaggcaaggatctttggaaggaagtgaaggccaaggttgcagcccttaccttggacgacttccaagaaagaagttggcaggaggagattggagcttttacccgccagaaggttggagccgcttgcgcgcaagaacttccaagaagggcgcgcgcccagaaagcttgcacgagcttgcaagaagaagcttgagcccactgggcgaggagatgcgcgaccgcgcgcgcgccccatgtggacgcgctgcgcacgccatttggccccctacagcgacgagctgcgccagcgcttgggcgcgcgcccttggggctttaagggaaaacgggggggccagaatgggccagtaccacgccccaggccaccgagcatctgagcacgctcagcgagaaagccaagcccgcgctcgaggacctccgccaaggcctgctgcccgtgctggagagcttcaaggtcagcttcctgagcgctctcgaggagtacactaagaagctcaacacccagtgaggcgcccgccgcccgcccccctttcccggggctcaggaataaaacgttttccaaagtggaaaaaaaaaaaaaaaaaa

SEQ ID NO: 382 - DNA, 529 bp, Homo sapiens
cagagaacgagttcaaagaatagcaaagaaagaaagaggacccagtgggcgaaagatgagagtgtacttttaccaaaagttatctaagcctgagcacttgaagtctgcacataaataaataaatgacaaaagaaagaaaaaaaggccagcgaggccgggagcaggtggccttcatctgcaactgtgtctctctcagcctccacagccacggggacaccctgcacctattcccacgggacaggctggacccagagactctggacccggggcctccccttgagtagagacccgccctctgactgatggacgccagctgacctggggtcagacccgtgggctggacccctgcccaccccgcaggaaccctgaggcctaggggagctgttgagccttcagtgtctgcatgtgggaagtgggctccttcacctacctcacagggctgttgtgaggggcgctgtgatgcggttccaaagcacagggcttggcgcaccccactgtgctctcaataaatgtgtttcctgtcttaaca

SEQ ID NO: 383 - DNA, 2934 bp, Homo sapiens
  SIMILAR (2565)..(2669): 801254mologous to Homo sapiens PRO2160,accession number AF119863,Smith-Waterman Score=131.
  misc_feature (1)...(2934): n = a,t,c or g
accacccattaatgtatttctgtacttaacatttgttacattggttcctatttctttatttaccaatattacctttctcatatcctttcatctaacagacctcagtgcccaggactggatgactcaaaacccctcacaacatcttgtcacctggcgctgcactcccactgctcattcatccatccacacacgcaatgtagactttttggcctttttttctttcttttgtcatttatttatttatgtgcagacttcaagtgctcaggcttagataaacttttggtaaaagtacactctcatctttcgcccactgggtcctctttctttctttgctattctttgaactcgttctctgtggtttatttttctatgccaggagcatatattatttgtatcagtcctaatgcttagcttacaatagtctgacatggtcctccttacagagttactcattactcatcctctagtctgttttttttttttaacctttctttgttgttttggttttttaaaaaaaacctttcccttctcccttttgatcacttgttccctaacttgcatcttttcattttgacgggcctcaaaatctatgtctcattctgcacttcactactcatacatccattctttctttcatttaggttctttttcattgtcaaatgtcagaggcatatatttgagttacacataccccttagtccataatcacctgatatcgctttgtgtgttgccctattacttagtgattcactggtttttttctatttatatattgattgcctagccatcaaagcggatgaaccatggtcttgtgtacacacactctcatcctggcttgcttacttctttacctatttacttgtttattcattctctcttgcttcactcattcattcatctggtcatttattatacaatgcaatagataccagtgaaacaacctctcaacaacaacagcaacaaaactcagaacattcacagtatctttggcattcctgcttcttctcactgagtcaccaaccaaggtacacacagcccacagtccagaaacacacacaaatggcggatgcagagcagagacacagtgaatgttaagtttactcccagatccttctggggctcgcgtcctaaacatactgggggcagatctgagatgagggcccacgttccccaggccccctgggcaagggcaagcgccgcctgttctgcccctctggaccgtggtgaatgaccatccccatgagaaacctgtttcaagaccccagaatacatagagacacacacatggtacatagtctcctggtgggaaacgacggacatggagttcatttttaaataggtggctttgtctgtggcaatataaaaatattttggcctttcaaggcaaatacaaaagaaactacccattaacatggctgagtgtctcagtcccaaacaataaagaacttgaagaggtttagccggaaactttgaagacagaaaatctgcccattatgttttccagacatttcgagggggcgagcggaggtcattggagcttgaagcccatttggaaggctggtccctcggcctgcgttttctccttggccctttgaagggccccccagctcacagggcacttccatcctagtctgccgatttcgagctggagaggggctggggtcccacattcgaggtccctttcccaacgttaggcattccaggttgaatttttccgcccaaaccaggaaggagaccgagaggcccgcccaggaaagaagacttgggtcccgggatggttgggccccatcagggcctcttccgcagcttccatccgcagttctttcagccgacccagccgggccaaggccccacgtgcccttttgtgaaccgtgccttcccacggagttagagcgagtccaggaagcaagtgggttgaagaggaaattggaggtgaggaaggaagacagcaaagtgtagacaggcctttcaagaagcttggctgatgcaaggagagcccgtggacaagggctgcctgggagtgctgttggagaataaataagccaagtaagccaagcaagaggggtgggaagggactgacctgtcaaaccttttcaacaaacatttgctgatcacctcctctaatgcccagatccctgcctgaggccttcttttattcttcatttaatttcttcacaacaaccctagggngggttgctcttcatcgaccccattcccccagaaaagggtaggggaggtctttcagagaggtgggggcgtgcctttggtgattcagtagcatgctcattccagaagcccaccccagggccttgggaagttttcgagcaggatgcctggccaaacccttggccccaggtccccctcctgagaattttcccaaagggaacccttcccattccaggaacatccataagggtgatgaacagagtccagtccgaacaaagactgaaccaaccccttggggagggaaacactcccagtttgctagcaggtgaacacaagcaaagacttataggaaagtactcatagagtcaaagtatgagcatagcaaaggtcagggcttaatgcccaatgccccctcactagggcattggtttaagtctttaggtaagagggacagctggctggtcaagttccggtcctcttcaatcctttgccatcctggtcctgggggtcagtgagtggctgctttgtatgttggtgggatccaggaatccgtgctcctagtgccctcgtgaggtgtagatgggcagcaggccccttggcagcagctcagcatggagaggaggtggtccttgaagtcaaggaggtggacggatgatgtcatccctgaggagagacccgggtgagggatcctctcgtgggcgctccagctctcctgaggagccgccgccaaggccagcgagccaaggcgcgctccctctctgctctccg

SEQ ID NO: 384 - DNA, 2394 bp, Homo sapiens
  misc_feature (1)...(2394): n = a,t,c or g
agcacaggaagtgacaacttagggagccccgtagggcgctgcaggccccggggaccccagcacgtgggtctaaagagagacggagtctagctctcctgccacccagagtggcttccatctcagcactctgtgggtctggtgatggaagatgcagtctctgctgatcacatgtgccctctgccagggcacctactgagaggtgcggtcctgggggtggaggcctgcctggcaggtgtgcgtgcctcgtacgtgtgttatgggcactggtctaggccaggtatgacacccactctcctgtgagatttcactttagtttttaaaaggtccagttctacagagtgagacctatctatctgagtactacatatgttttaagacttggttctttttttgagggatccttgaccctgggaagtctggagcaccctgagaagggggcaccatgtgtgcctttgcccacgtgtcctgaggggctgcttgtctgggagggagggagagaacattcagcagcaggtgcttttttatggccttttcttaaaataacctaagggggacacatccatcttgcagagaagtttacagaactccccttgaaaactgctgctgaggctcctgttaaattttctgtggcatcttttatgcgttggtaaaaactgcagtgtctttggacctgagagtggctactccgtggttttgtgacctgtaagcgtggggttcaggggtgtgtggccctgcagggtcccacgcctccctgagcactgactggaagtttcactggctggtggctgtcccttctcccatcagggtccccagcaaagttaactacacagaggacccaggggaaacgagctgtgtagccactgacttgctcgcgcggccgtggcctctgaggggcactcgccggttaagacagggtgggagtagtgctttccagttcagactctaacttctcccaaagtgtcctaagaaaatactggatcggctcatagatttatgctccttatgatgccctaacttgggaaggttgttctaggggacaggccgggcagtgttcccacaaacaactttagagttcgaaggccccagggccccgctgtctcttggccattagatacctttcggcaggtaagggactaccaatgcttacgtcaaaacagcagaatcggctttgcagagcactttggggagcagatattaacttatttttgtgttggacagaaatgaaatcttgcgatttttaatcgctatgataatacttccaaattttatgatttttctgaaggaaataatgcaaacattttaaatatgtttctccccctttccaaaaactgttaaactaatgagcaagtaacactaactttgaatgtctctacaatacccgttgataactcagtggagccaggctttggggtagcggccctggagcttgcagggtttctcgccactgggggctggaccacgcccccagctgtgaccgtgggtgtggctggctctcggccctgcccagctttttttctgaggacgtggtgacttcctgaacatcagcttcaatcctccatcattaatgtgaagcaaaacacaaaaaccgccccaattanaaaaggattccttgggcatccgaaaccagcatcttgcaccttaaacccataccccacccgtgttgcgcccacagggggggatggtcccaatgggccagcttaaaaatgtggtcacctgttgggggaaactctttcaggcaccttgaagtgagaacccaagctgtccgtcctcaggccggcctttcttccggcgacaccccgtccatggctggctgggtcccccttcgcagtgttggtctgtcttgacatctaaaccccccggcgtgtgcaagtgccccatcttccagggacttaccttattttcccagaatttaaaccctgttttttataattcaagttaaatgcaaatgactgtccagttgcccaaatatccttgatcctatgagtgtaagttgatgactgtttgtttagtccagtaggagtaaaaatgcctgtgtcccccacggggtgtccacagcccctcaccccatacccctgttgaggtgtgaaatgccccccgtcagaaattaaatacaaaccttaaatgtgccctattgggtgtcctaaaccttccatacaatgttaaggtcagattcccttttaggaatacctgggtgctgtcccccaggtttgatagttagacttaaaaacttgaaattcactttttggggggagggattttcctgaaatagagagttgagacttgccagttgggggaaaatagcatttaaaatggaaagctgtgtttggaaaattgtgtatgagtatttttgtattaaaaacattttaaaggcttttttcttaacttaaaaaaaaa

SEQ ID NO: 385 - DNA, 16177 bp, Homo sapiens
  SIMILAR (9341)..(9625): 621254mologous to Homo sapiens Human myelin oligodendrocyte glycoprotein gene,accession number AAZ29204,Smith-Waterman Score= 264.
  misc_feature (1)...(16177): n = a,t,c or g
cggacgcgtgggcggacgcgtgggataagttgttgtgcagctgggagagctacactaagttggtcatgatgcagaagctactcaaatgcagacggcttggcctggctcttgccctcatcctggatctggaatcctcagttcaaggtaagactcaggagtcttgttccccagccatcttctctgtaagccctgtggtccatgcaagtcattatattcattttaaggcatagaatgtataatattgtgagaaaggaggcaaagaagaaggatttggggtcgctgaaccctttaatatgagttctgttaagtttggtaccaagaaaaattaaactctgtggcgtgtgcagacttgtaaactcttacaatgattgaaatgcgctattttgggatgaaaatgtgaggtttataaattttaaaagctcaaaaaaggaatctagaaaatgactcctgtgcctgttgcatggaggagatggcacctttgactgttggggggtgtctgcctacccctaagtgtctacatcagccccaagttttagtgcgctgtgacggtgtcattgttattttaacactgggagacgttatattccaattggggtgaatctgactgtgtgtattttcttttcttttttttttttttaaagataaacttggttcttactgaaaactcaattatggttagacatagttcatgtaaaacctctcagattttaaagagaaggccaaataatttggtatttgtgctcttgctcagagaagcatcatattcggaaatatcttcctaggtttatctaccatttagtgttgtttagtcagactgaaacaacttaaaacctgtaatgactaagacaatgaaaatgataggcttgtaagaaaaatacaatttgttattctttggcaaataaggaatcatgtctaaataagacggaggtcatggcttgatagagagatggctgaacctatagtagaaaaacactaggttccgccaaatggtaagggaaatgttgagtcacaatgacacacatgtcctagatttgtttcgtgaaatgcgaccttttatttgtcatgaacttacttccggtggagatgaaatcttacagatgatcgcagagacattcattttatgttggaaatttataaaatcattttcttctagttatgctaatgctgaaaaaagagcaagtaatgtttctggaacgttattaatttatgtatttttaaaatataaaacattgtcaattgtagggaacaggcttcactgggatcttttagggaatatcttcagcttgatgaaataattcccgaatagccaagtggtctgacaagatcgagagtaatgaggcccatactttagtacagtcttgaatggccagatggtgctgggcataccccaaccagagatatgtaagtctttatgttgtcaaaatttcccagaaacatgaatttcccactaagattcattaaggaaaactagaatgaaaacaaaaacgttccttgtataatattcattagaaagaaatgaagaaggccgggcatggtggctcacgcctgtaatcccagcactttgagaggccaaggtaggcagatcatgaggtcaggagtttgagaccagcctggccaacatagtgaaatcccgtctctaccaaaaatacaaaaaaattagccgggcatggtggcacacacctgtcatcccagctactcaggaggctgaggcaggagaattgcttgaacctgggaggtggaggttgcagtgagctgagattgcaccactgtactacagcctaggtgacagtgcaagactctgtcagaaagaaagaaagagagagagagagaaagaaaggaaagaaagaaagagaaggaaagaaaataattcatcatgaaattgtatagaatactagcatttatgtcatgacctcgtaggtttagctctttgttagaaaaggaaaccatagaaagagacaagggagaaactgacaaactagggtgtttccgaaaaaaggctctcagtatcgggctcaagggcttgtgcccacatctgagcatgcagggaaatagatgtcccccactggctgcacatgtgagtgactgcggcacaaggctgtgatgtgaagagtcatgacaccatttcctcacacctccacgcaatgccagatatgattcgacaacattcttcctgtcttataaaaagggtttatctaacccgttggtttggcagatgaaatcaactaggcttttggcttgcttttactgagcatattcaaaaccatttcagggcactatagtggtttgctcgggttgccataacaaagtaccacggactgagtggcttaaataacagaaatgtatttcctgacagttctggagatgggagtccaagatcaaggtgctggcagggtcgatcgcattctgaggcctctctccttggcttatagatggcgccttctcccttgtctgcacatggcctttcctccatgcatccgtgtcttaataccatcttcttagagggtcaccaggcattggatcagggccaccctaatggcctcatcttaactacctatatctgcaatgaccctatttctgaacaatttcacattgtgagattctgtgggttagaactggaacatatgaatttggtggtggtatatttttattataagtcaaacccaagtaaagatgtggggtaagattgtgtttaccaagcacaaagaaatggaaatttggggatgtgtaactctggagagcacagatgactaatctatttaatgtagggctccaggggatttgatgaggcctgtgaatcttccacttttattgcctctcttttccaatgacacccataaagaaaaaaaatggaatatccatgaacaggtgcagccaaggaggccaggcccgccatgtgtccactgtatactgtctcctagctcacaggaatgatactgatccactccttgtgctgctctttgtaaagtgatttcacatccattctctggtaatcatcatcacattccctgtgatgaggaattagcaccaattatagaggagaaaactggatctgacatttctcatctcatttgctctatacattaacctcttgcaaaaaatttgtgagtcttgcccaagacccattacaactaattaacggctgaactggtcgtctgatttcaaggccagaattaactttctactgcagctcatggatcagaggttttctttatttaaacaaacaaacaaaaaatcctttgaccgtagcccttgctataacatttcccactgagttgagggagaaattgaaagtaaacttaggagctttttatagcttgtcaaaccatgcaagagtgggggaagcttatccatcttgtggaattgatagaccaggaggaagtaactccggcttagataatgctaccattttgaataaatcaaatggtcttcttttccccttcatggtagttgctgcttaagtttctctaacatgcctgcagtaagtttccattaagaataggaaattaggctcggtacagtggctcacgtctgtagtcttagcactttgggagaccgaggagtgtggatcacttgaggtcaggagttcaagaccagcctggccaacatggtgaaacccccatctctactaaaaatacaaaaattagccaggcatagtggcatgcacctgtaatcccagctactcgagaggctgaggcaggagaatcacttgaaccagggagatggaggttgcagtgagccaagatcatgccactgcactccagcctgggcgatagactgagactctgtctcaaaaaaaaaaaaaaaaaaaagaaaaaagaaaagaaaaaaaaaagaaattagtatattgtgattatgttgagggaaaagttagtaccataatataaaaaggtatggactattggagaaagttgtttgctttggtaacatttactcatagaaagtattttggtaaagcaggactcagggtggtgggggaggtgggcagtgagggataggattcaaataaaaaccattctttcccttggaatccactacacaattaaccaacaaatcccataagtggaccttttaggaagataacatttctatccatgagcatagccactataatcacaagacatttatctcaagcaagatagagtcaagatactctcacaacctcaggggctggaactgtaaattttcacatcctgccaacacccttgaatagctatgtcaagaatttagtgtctgtaacttgttctttattttaaagtacatttaacatcatcggccccaaattagataggcttttggagtgggatcccttctacttttgatttctttataaaattttaaaatagctttgttgagatagtgttcacataccatacagttcacccattaaaagtgttcaattcagtgattaggccaggtgtggtggctcatgcctgtaatcccagcattttgggaggccaaggcaagtggatcacttgaggtcaagagtttgagactagcctggccaacatggtgagaacttgtctctactaaaaatacaaaaattaactgggcatggtggtgtgcacctgtaattccagctacttgggaggctgaggcaggagaatcacttgaacctgggaggtggaggttgcagtgagctgagattgcaccactgcactccagcctggatgacggagcaagactctgtctccaaaaaaaaaaaaaaaaaaagtgttcaatgttttttagtatattcacagagtcatgcaaccatcactataattgcttctagaacattttcatcatcccccaaaagaaagccttcgttacgaattttaattagctgagattctgaactctgggggaattttgtattctagaaatattttttactaatatgctacagttgtatttgtcatgctggtgaaaagatgtggtctttcacctggatgctttctcattaagcattatttttctgtttagcttcctgtgtgagcaaacattttctcagcttgatactcagtgcatcagcggcttgcagaagagactgcctaggcctgctctgtccagtacggtagccacaagtcacttgtggctactgaacacttgaaatgtggccaaggcaaattgggacaggctgtgaatgcaaaatatacaagatttggaacccttagtatgaagaaaagaatgcaaaatatcccagtaataacttttacattgatgatatgttaaaggacaatatttgaatatgttaggttaaataaaattaatttcacctgtttctttttacttttaaaaatatggccgctggaacatttaaaactccctatgtggtttgctttgtgtttctattggacaaagttggtctagacagtacaaggtgtgaagacaccgccctctgctggagaagatgctggatttttatttcacctacaggaagagacgtctaagtagcaattagatgctaaactaatgctgcctcaggaaagaatcaaaagagaaagagtgaaaccaggccgggcgcggtggctcacgcctataatctcagcnactttgggaggccaaggcgaggggatcacgaggtcaggagatcgagaccttcctggctaaccccgtctctattaaaactacaaaaaattagccgggcatggtggcacgtgcctgtaattccagctagtcgggaggctgaggcaggagaatagcttaaacccaggtggcggagggtgcagtgagctgagatgtgccacagcactccagcctgggcaacagagccagactctatctcaaaataaggaaaaataaaaaagaaaagaaagaaagtccataaattgagactcctagagatactaaatggtagaatgggaatttgaatttaaatttataagatgttcactctcggagatcataggtcattgttgtcctcctccttttcatgacaggaactagcaatgaagagctctgactatgtgctaggtactactctgagaacctaacatttgtatctccttattaactctattactgccccatcctacagatgagaaaattgaggcacaggaagtttaagttggccaagatcacacagccagtaaggggcagacattgaaaggtcattttgcctgccttatccccagcctccaggcagtggcagagttagctcattttggacaaacagctctcccagaccagacattgtaagctatactcaggaatcataggaaagattatgatagaataatatatagttacaaagaaaagaaagaaaatccaatgggagaatatttactgttttctatattaaagtgtttaatgtttatgtttttagaggaatattgtttattatagcaatttagaaaacaaaatgagaaaaaaaatcaccaaagattctacctccagttatttttgtgtatttccttccatttttccccccatgtctgtttatataattgaaactattattcatgcaaagaggtattctgattttctcagttatttttatttatttttaattttgtaaataaacttttttcttctgagacagtctcgctgtgtcacccaggctgaagtgcagccgtgcaatcttggctcactgtgacctcccagtctcaagcaatcttcctgcctcagcctcctaagtagctgggactgcagatgtgtgctaccacatccagctaatttttaaaatcttttttctcttttttggtagaaatgggagtctctctatgttgcccagcctgtattgaactcctgggctcaagtgatcctcccacctcagtctcccaaagtgctgggatttcaggcatgagctaccacacccaacctaatttttatttttattttattaaaaaaaaaagtttttgcctacccgcctctcaccctctcactcatttttaagtataggtttttctacaatgccacattgtcttttccataaaaagtactttcggccgggtgtggtggctcacacctgtaatcccagcactttgggagactgaggcgggtggatcacctgaggtcaggagttcgagaccagcctggccaacatggtgaaaccccatccctactaaaaatacaaaaattagctggatatgattgtgggcacctgtcatcccagctactcgggaggctgaggcaggagaatcgcttgaacctgggaggcagaggttgcagtgagccgagattgtgccactgcatcccagccagggcaacagagcgagacttcatctcaaaaaaaaaaaaaaaaagtacttttcttcatttggttagtattctcttatgagttgatgccttgtaatttatctgaatgttttccattattttgtggtgagctttaaaactacccttcctgactttcaagaatcctagacatgctccttgttgctaggtaattattagttgcactcattagaataaagtatatgcttggagtggggaggagatgaactttttgaagggcggtgaagtatttctcaccaccaggcctttgtctttgctaaactgaggaaggaagattttatttcattagctaacaaagaacctcctatataggccgggcatggtggctcacgcctgtaatcctcacattttcagaggccaaggtgggtggattgcctgagctcaggagtttgagaccagcttgggcaacatggcaaaaccccatctctactaaaaatactaaaaattagctgggcgtggtggtgagtgcctgtaatcccagttactccagagggtgaggcagaaaattgcttgaacccgggaggtggaggttgccatgagccgagatcgtgacagtgcactccagcctgggcgacacagcaagactctctctcaataaaataaaataaaataaaataaaataaatacataaataaatctcctatataacctcataatatcagatttggagccttttccatagaaatgaaattcagaagaagctgagactcagatattccaagctgcctggtgctctgtgaatagaggagacttgttcttgtgaaatctgagtgcaaagacacaggacaaattgttatctacttttcattcctaaggatactgtatggccctaaaacacaagaactagaattctgtgataccacgggtactccacagtgtgttccttcccctttctgaacctgatttgtctcatctctatgaaaagatgtgggctttggggtcagatgtgggttggaatcctagcgcctgtgtggctgcaattttcttttgtgtaaaattgagataatagtacaaaagtaacaacagttaatattatcaagtgcttactgtgtgcctggcactgtgttaaattctctaagtgtattttctcatttaatttttgtgataggcttatgacactattagtatcttcatattacagtgagggttcagagaagttaaggttccataactagtcagcagacctgggacttcactccaggcagctgattccaaagcctattctaactttaaactgctactttttggagtgttgtaagaaggacaatttatataaaatgttggcacatagtgggtgctgctgttatatgaatgggcacaaaatctgtctacattttgccttttaccaaatttagaatctatttagttaaaaccttcttagggcgggtggagtgcagttgctcattcctgtaatctcagcacactgggaggccaaggcaggaggattgcttgagcccaggtgtttgagaccagcctgggcacatagtgagacccccatctctccaaaaaacaaacaaacaaacaaaaacaaaacaaaactagctgggcgttgtggtgcccctgtattcccagctactcaagaggctggggtgggagaatggcttgagcccaggagttcaaggttgcagtgagctatgatcacagtactgcactccagcttgggcagccgactgagaccctgtctcgaaaaaaaaataaaaataaaaacttcttaggacagagtgattagaagctctctagtagatacttagtaacaatgtgggttcctcgggcaggttatcctacgcagagagccaggtaccaatgggtgcgctgcaatccagacagtaattctgcaaactgccttgaagaaaaaggaccaatgttcgaactacttccaggtgaatccaacaagatcccccgtctgaggactgacctttttccgtaagtggacttttctctaattaattaattaattacttatttatttgagacggagtttcacttttcttgcccaggctggagtgcaatggcgcaatcttagctcactgcaacctccgcctcctgggttcaagcgattctcctgcttcagcctctggagcagctgggatttcaggcgcctgccaccatgcccagctaatttttttttttttttttttttgagacggagtctcactctgttgctcaggctggagtgcagtggcgcaatctcggctcactgcaagctccacctcctggattcacgccattctcccgcctcagcctcccgagtagctgggactacaggcacccgccaccacgcccggctaatttttttgtatttttagtagagacggggtttcaccttattagccaggatggtctcgatctcctgacctagtgatccgcccgccttgacctcccaaaatgctgggattacaggcgtgagccactgcgcctggcctaattttttgtattattagtagagacgggctttcatcatcttggccaggctggtctcaaactcctgacctcaggtgatccacccaccttggcctcccaaagtgttgggattacaagcatgagccactgtacccggccttttctctaattttaaagtgtctgtaatttcacaacctcttggcacagatgtgggagtgtttttcttcaagctgtccagagtgttttgcttcgagctcttgctttggtagtttggctcttactctgcagtacatggtaaaagtgtactgtatatactggcatatgacatgtgcgagtatacatgattcacctatgtttttgaaattttttttgtggatggtagagaggagcattgaggacttttcatcaacaggtattgaaaatgattgaacattgttttatttgtgtaaacagaacacactatatataaaaatccaataattaactgaatggataagcaaaatgtggtataagcatacaaaggaatattattgggtcataaaaagaatgaagtactgatacatgctacaacatagataaaccttggaaacattatgcagagcgaaggaaggccagacaccaaaagccacatattgtatgattccatttagatgaaatgtccagaataggcaaatccctagaggcagaaagtagattagtgggttacaggggctggggaaagggaggaataaggagtgactgctaatgggtatgagggttttttttggaggaggtgattaaaatgttcttctgccaggtgtggtggctcatgcctgtaatcccagcactttgggaggccgaggcgggaggattgtttgagcccaggagtttgaggccagcctgggcaacatagtgagaccctatctctatttcaaatacattttttatattaaaaaaatgttcttcaagtagttggtaattatttttaaaaatggccaggtgcagaggctcatgcctgtaatcccagcaccttgggaggctgaggtgggaggatcccttgagcccaggaggtttgggaccagcctgggccatacagcaagaccctgtctctacaaaaaatacaaaaattagctaggcatagtgatgtgcacctgtggtcccagctactcgggaggctgaggtaggagaatctcttgagcctatgttgagcctgcagtgaaccctatttatgccattgcactccagcctaggcaacagagtaagactctgtctcaaaaaaagaaaaaaaaaattagggaaaggaagaataattagccaagacttgtaaaacaaaaatcaaatctcttcttttgatcacataaaacttgctttaaacttgcaaaaaagacctgatataaattcataagtaacaaaaaattgaattatattagaaaccattaattcaatgaatactaaagctatgtaggatgtagcaaaatatacatattaagaaaaggattatcataaaagttttaatctccaggctcaaacctagaaaatcactctcctcaaagccagggttaatcatcatgctccaaaccaggtacatttcacatcactttgggatcctggcaactttctcttttgttttttttttttttttgagacagggtctcctctgtcacccaggatggagtgcagtggtgtgatcatagctcactgcagcctgcaactcctcaagtgatcttcctgcctcagcctcccaagtagcgggaccacaggcacacagcaccatgcccatctaattaaaaaaatttttttttgtagagacaggggtctctgtacatttcccaggctggtcatgtactcctaagctcaagcagtcctcccacctcagcctcccaaagtgccggaattacagtcatgagccaccattcccagcgctggtgactttctccatcactggtgactttctccatcactggtattcactgcattagtgatgacatcattacaatcttcaatatgcaactttgtagtcctactcttgcattcttactttaaagcctcagcattaagtttgaatgtaatattacagcatccttcattactttaaatcattggtttcaatagtaattcatttaaatctaaaatgttaggctgcagtggctcatgcctgtaatccccccagtttgggagactgaggtgggagaatcacttgaggccaagaatttgagaccagcctgggcaacacggcaagaccccatctctaaaaattagtggcccggcgcctgtgcctcacgcctgtaatcccaacactttgggaggccgaggcggatagcttgaggtcaggagttcaagatcagcctggccaacatggcggaaacccatttctactaaaaatacaaaaattagctgggcatggtggcacgcctgtaatcccagctattgagaggccgaggcaggcagactgggaggccaaggcaggcagattgctttgagacctgcctgggtaacatggagaaatcctgtctctacagaaaaatacaaaaattagccaagcatggagaaacctcgtctctatagaaagacacaaaaactagccatgcatgcctgtggtccagctactcgaaaggctgagatgggaggattgcttgatcctgagaggtcaaggctgaagtgagccatggtgtggcactgcactccagccagggtgacagactaaaaccttgtctcaaaataaataaacacatttaaaataaataaatacaattaaaactaaaattaaaaaataaaataaaatgttaagagaatagctcaaattctccaaaagaactcttgcacaccattcctcctcttctcaaatctctattttccttccccaaagccagtaactgcttctcaccctgaccctgtgctttctttcccgtcattgcgaaagaatggtccttgcttctgtgctgatcccaaacccttttgccctcagatcctcctgtccttccctggccctgctctgtattggctgtggggtgggggtggcggtggaactgacccctggggtctgcatttctcaggctcccagggctgtggctgactttggccaatgggaggcaaggacgggagactgagagcttgggaggaagggagagaggtatgtttcttctccttactccctgcctggggtggcaccttgggcaggactctgttttgcccatggcctcagctcccaccagatgcctctagtccctgggctcaggaaatagacaacctccttccactatcgctgtagcccaaggagggaagtattttttttctttctttctttctttccttttttttttttacagagtctcactcttgttgcccaggctggagtgcagtggtgcgatctcagctcactgccacctctgcctcccgggttcaagtgattctcctgcctcagcctccagggtgtgccactatgcccagctaatttttgtatttttggtagagacggggttttgccatgttgaccaggctggtcttgaacttctgaccccaaatgatctgcctgcctcgtcctcccaaagtgctgggattacaggcatgagccactgtgcctggccgaaggaaatattttcttgctattgctaatctctgggttacctcgctatcccccatttagcttcacttctcctccatcacctgtatgaggaattccctctgtgttaaatatctggagaagtttcctgattggaccctggctgttgcagcttccaaggccacctctctttgtggctggtatccttttcccatgcatcttctccaggacttccattctgcagttatctctctgaactcagtgtcttcttcccatcagtataggggtggactttagtatctcctatgtttaggcaacatctctcctttgactctgcgtcttctccagtggttgcccttctctgctcctcttcacaataacacctcctgaaagggccacccatgcctgccccctcctttcctcaccccctctgtggctggacttctgttcctacactccaccctggttgacaaagtcactgattacttctctattttcagcttacttgatccttaattgccttcaaaaacagctaactgggccatgcatgtaatcccagcacttcgggaggccaaggcaggaggatcacttgagcccaggagttcaggaccagcctgcctgggcaacatagtgagaccctatctacaaaaaatagaaaaattagccgggcgttgtgactcatgcttgtggtcccagctacaaaggaagctgaggtgggaggatggcttgagtccgggagggtgaggctgcagtgagccatgatcacgccactgcactccagcctgcacaacagaaggaggccctttctgtaaaaaaaaaaatggttgaccactccttccttgaaatgcttttttcttgaggcttccatgccctgccttatcctgtttcttcctacttctctggttgtgctttttcctctgctcagtatttaacatgttggtgtgaccctggctctggcctgggcccccttctctatctacgtgctttctctcgacgacctccatcggttgcatgggtttaactaccaaatctgtgattctagctccgacaccccaggctaaagtagccacctggtcactccctattacattggtcaatttcatttctctgtgccacctatgattttcctgatttatttattcacttttcattgtctgtcttccccactaaaataaaaacttcttgagaaggggcttcatcgatctgcctctgttctatcccaggccctcaaaacaaggaccagatattcaacaaatatttattgaatgcgtacatgaattaaaactctaattggttgtatgctggtggtttattattttcatggaggaaatgacttgtaggctgtgacactcagcttttgtctctgatgctttgttgccctgttctgtcaccgagggctgtcgtcattgctctggccattttgtgctctttgaatttctaatcatcacactcaacccagaaggcagccttacctttcagcactcttcagctgaatgagtgcaagttggaggcagggtcattttttgataggaaattgaatgtttatatgctggtaaatataaagcttagctttttacaaagaatttctcaaaagtgagctttgttgaagccctgtaaattgttagaacttttatggaaattttaatttaggaaaaaatgtcatctgtttgggctgacttagttgttagttgtttgtcctttcttttttttggtggagggtatggagttttgctcttgtaacccaggctggagtgcagtggcgcgatctcggctcactgcaacctccgcctcctgggttcaagcgattctctcacctcagccttccgagtagctgggattacaggcatgcaccaccacacttggctaatttttgtattttaagtagagaccgggtttcactatgttggtcaggctggtttcgaactcctgacctcaagtgatcacccaccttggcctcccaaagtgcttggattacagacatgagccaccacacccggccaagaggacttcttttaaaaatgatttcttgggccgggtgcagtggctcacacctgtaatcccagcactttgggaggctgaggtgggtggttcacaaggtcaggagtttgagatcagcctggccaatatggtgaaactccatctctactaaaaatacaaaaattagccaggcatggtggcgcacccctgttgtcccagctactcgggaggctgaggcaggagaatcacttgaacctgggaggtggaggttgcagtgagccgagatggcaccactgcactccagcctgggcaacagagcaagactctgcctccaaaaataaaaattaaaatgatttcttaagtaaatttcaaatatagaatgtatatgctagtgataacaaaattaacactgtttatgcaagtctgcaataggtagatgtgaagttgataggtgcaataagtataggcaaacacataggaacatttgacctgtttttttgttgattttaaaacattgaataattgggaagcttttaaatctcttaatttgagcaactagatggctgtatttatctccttatattaaaaaaactattataattatctttcccacatatcaaactccactggtttttttcccatttttctttcatacttcagaaagacgagaatccaggacttgaatcgtatcttcccactttctgaggactactctggatcaggcttcggctccggctccggctctggatcaggatctgggagtggcttcctaacggaaatggaacaggattaccaactagtagacgaaagtgatgctttccatgacaaccttaggtctcttgacaggaatctgccctcagacagccaggacttgggtcaacatggattagaagaggattttatgttataaaagaggattttccaccttgacaccaggcaatgtagttagcatattttatgtacgatggttatatgattaatcttgggacagagaatttatagaaatttttaacatctgaaaagaagnntagttttatcacttttttt

SEQ ID NO: 386 - DNA, 1251 bp, Homo sapiens
  SIMILAR (53)..(154): 851254mologous to Homo sapiens secretory granule proteoglycan peptide core,accession number J03223,Smith-Waterman Score=139.
cccacgcgtccggaagttggcgtgcagctgggagagctagactaagttggtcatgatgcagaagctactcaaatgcagtcggcttgtcctggctcttgccctcatcctggttctggaatcctcagttcaagggtatcctagcgcgcaaacccaggcaccaatgggtgcgctgcaatccagacagtagttctgctcactgcctcgaagaaaaaggccacatgttcgaactacttccaggtgaatccaacaagatcccccgtcttgaggactgacctttttccaaagacgagaatccagggacttgaatccgtatcttcccactttctgaggactactctggatcaggcttcggctccggctccggctctgggatcagggtcttgggagttggttcctaacgggaaatgggaacaggaattaccaactaagtagacgaaaggtgatgctttccaatgacaacccttagggtctcttgacaggaatctgcccctcagacagccaggacttgggtcaacatggattagaagaggattctatggtataaaaggaggattttcccacccttgaccaccaggcaaatggtagttaagcaatattttaatgtacccatggttaatatgattaattcttgggacaaagaattttataggaaatttttaaacatctgaaaaagaagcttaagtttttatcatcctttttttttctcatgaattcttaaaggattatgctttaatgctgttatctatcttattgttcctcgaaaaatacctgcattttttggtatcatgttcaaccaacatcattatgaaatttattaaattcccaatggccataaaatggctttaaagaatatatatatatatttttaaagtagcttgatgagcaaacatggggcgtagtatttcctaccctattttaacaactctgacttggattgtgaattataatgatatgccccttttcttataaaaacaaaactaaaaaatattgaaccacagcgaatttgtagagtgggggtatttgacatattttacagggtggagtgtactatatactattacctttgaatgtgtttgcagagctagtggatgtgtttgtctacaagtatgattgctgttacataacaccccaaattaactcccaaattaaaacacagttgtgctgtcaatacctcatactgctttaccttttttttctggaaaattggggaattttcaaatgttactatatattaaagcagaaatataacca

SEQ ID NO: 387 - DNA, 401 bp, Homo sapiens
aggcaggcaggtcagtgatgtgtcctaagggtccgaccgacctagatacccctctttgattcctcctcttgggattagtgtccatctctggaagcaggatccaggaggacgggaggggccgctgcggaccgcagtcgctccacctggaggagacaccagaaggaagacagcctgagggacgcagccatccccggctcctaccggcgccccgccccgcgcatgcgcacgcgcacagggagtcagctggctgcgcgggaggtcacgggaagtggggcggtgcccacacagctggagggaaggaggtgtcaggcggggagagacgcaaacggcgggaccagcagcgacggggaggcacacgatccgaggtccttttagtctcagaggatgggaagatcctggcg

SEQ ID NO: 388 - DNA, 2770 bp, Homo sapiens
  SIMILAR (2604)..(1804): 1001254mologous to Homo sapiens C33 antigen=type III integral membrane protein,accession number S48196,Smith-Waterman Score= 1413.
atggggctgaaggccgcccagaagacgctgttcccgctgcgctccatcgacgacgtggtgcgcctgtttgctgccgagctgggccgagaggagccggacctggtgctcctttccttggtgctgggcttcgtggagcattttctggctgtcaaccgcgtcatccctaccaacgttcccgagctcaccttccagcccagccccgcccccgacccgcctggcggcctcacctactttcccgtggccgacctgtctatcatcgccgccctctatgcccgcttcaccgcccagatccgaggcgccgtcgacctgtccctctatcctcgagaagggggtgtctccagccgtgagctggtgaagaaggtctccgatgtcatatggaacagcctcagccgctcctacttcaaggatcgggcccacatccagtccctcttcagcttcatcacaggttggagcccagtaggtgggaatcttatccatgacccacttcttcaaaaccctccatggtttacagaacccttttaagaactgtaagccttgtgaggttcggcaggtgttattttcctctttgcagttgggaaactgaagcccagagaggggaaatgatatgccaaagtcacacacggcatggcagggctggaagtgaagcctgatcacttggctccaaatcatcaacctcacctctgccccctcagcacccccacccttgccactgaacagctacaggagttctaagcatgagacacagagggcggcagcagatttagggggcaagaagatgaaattgggctgcatttgaggcagttaaacaaaataatggctatgaagatttttttttttttttttttttgagacagggtctcactctgtcccccaggctggagtgcagtggtgtgatcatggctcactgcagcctcagtctccctgggctcagagatcctccaacctcagcctcctgagtagctgagagtacaggcatgcaccgtggtgctggttaattttttgtattttttttgtagagatggtgtctcactatgtggcccagactggtcttgaactcttgggctcaagtgatctgcccgcctcagtctcccaaatgctgggattacaggtgtgagccaccgcaactggtggcctatgaaaattttttttttttttcagacggcgtctcactctgtcgcccaggctggagtgcagtggtgcaatctcggctcactgcaagctctgcctcctgctttcatgccattctcctgcctcctgcctcagcctcctgagtagctgggactacaggtgcccgccaccgcgcccggctaaattttttttgtatttttagtagagacggggtttcaccatgttagccaggatggtctcgatctcctgacctcgtgatccacccgcctcggcctcccaaagtgctgggattacaggcgtgagccaccgcgcccggccccctcctccccaatttttcatacagttgcccctatacaatatacacacccttgagggcaggtagaagtccagcccacctgcgccagggacgctgtggggagcatttttctctgagttgctaagagaaccctgatgggcggtgagcagaggaaccacagaacagccagggctcaaggctggcagcggataggccaggagagatcgctaggccccagaaagccccctactttcagtcagggtgggcaagagggtcttcgcagtgaagtgggaggcaggcctggaggagggagccagggagacccctgggagccctgaggttgggggccaggcagggagatggggatagcagctgcctcagtacttggggaccttgctgtagtcttcggaatgcacgtgccggcacaagcagatggacaggaccatccccaggagctcgaccatggccacacccacgcccacgccgaggatgatgcccaggttctcctgcagccacgcctgcaccttctccatgcagccctcctggtacacaggccagtcctcagggtggttgccactctgggtcctgttgccgggggcctcgcagaagcccttcctcacagaaaggctgttgtcctcttcccccttgacttcgcaggaacaggggtaggtgacctcagggcgattcatgagctcagcgttgtctgtccagttgtagaagctgacccagccgcagcacttcacctgagcctgcacgtagtcccaggcatcctgcaggctgtcctcgcgactgctgttgtagtctcgaatgagctcagtcacgatgccacccatctcctgcttcagcttgcccatgttgaagtagaagagggccccggccgtcacctgggcaatgaggatcaggagcaggaaagcaaagtacagccccagcaggcagcggacctcgttgacggcgccgatgcagcccaggaagcccatgagcatagtgactgcccccacgccgatgaagacataggcccccatcctaagcgagctggaggaggtttgcaggacagagatgaaactgctcttgtcggccaggatccacaccccgaagcccaggatcactgcgcccaggataaagaagatcaagttgaagaggaagagaaagtatttggtgactttgatacaggctgagcccatcccgccagtcctggagcttccttccacgaaaccagtgcagctggtcacagggcccacttctgcctgtgcccacgtgtcgtccacacagcagcagggaggactctgcgggttctgctttctgctccgcgctgcaggcccagcgtcacccgctcgtgcctcagtcggc

SEQ ID NO: 389 - DNA, 420 bp, Homo sapiens
  SIMILAR (66)..(95): 1001254mologous to Homo sapiens N-Acetylglucosamine kinase,accession number BC001029,Smith-Waterman Score=51.
tttcgtggaggtgtcaggcggggagagacgcaaacggtggtaccagcagcgacggtagcagcagcatggccgcgatctatgggggtgtagagggctgatcgggacagacaagtgtgtggagaggatcaatgagatggtgaacagggccaaacggaaagcaggggtggatcctctggtaccgctgcgaagcttggtggagttgtgctcatatctggaacaggctccaactgcaggctcatcaaccctgatggctccgagagtggctgcggcggctggggccatatgatgggtgatgagggttcagcctactggatcgcacaccaagcagtgaaaatagtgtttgactccattgacaacctagaggcggctcctcatgatatcggctacgtcaaacaggccatgttccactatttccaggtg

SEQ ID NO: 390 - DNA, 2817 bp, Homo sapiens
  SIMILAR (1920)..(1264): 1001254mologous to Homo sapiens M phase phosphoprotein 10,accession number X98494,Smith-Waterman Score=1092.
tcagtgctgcattccctttgccagccttttcttcttaaattgctgctcctgctgctcaatgatttccagtcccaggtgaaaggaacacaattttgtcacttcagtgtttgccagagggactatggggtctgggttgacccatctccttgggaacagcttaactgagaaatgcaaactaccttcctggctgccaatcacggcggaagggaacagccttaaaggttttcttcggcgctgacccagggcaaagagatccaggctcagaatttcttctccagcttcatcctgatgaagctgaggcactcctccgctctgggtggggccagcctcctccccatggactatagcgccaatgccattgccttctattcctacaccttttcctagggggctggtcccggctccacctactccaagctcagtggacactgggtctggaaggaaggagtcttttgcttcctttctcctgctcagatgtccttgactctcctctgagtctccctctttccaagccgcctcccctctacctaacacagtctccctgaagacaccacagtacaaaagctcaacttcccgcacctcacctttactcccagacatgggagagagatgacatgaagacccgaacgccacttggcaaaagatctgtggtccctggccatctcgactctcccctttgtgcctgtcagctgccatgggggtcagttgcacaagggcccagcaggtctgtgtgttttcccaagggactgccgcatggccaatgctgaggagaagctgatggacgaccttcccttctgaacaaaacccgttacaactacctgatcctcccctggtgaggtggctgccttctgacacaccagatgctctctttagcatggttggcccccacacaccaagcctgtcaaatttacagccttcaataaggctttggccaattaatgagcagctccctctcctaggaggaaggacgtctaaaggatgaggagggcagtagaaccccgtacgctctgccccctccctccacagttggaccgaaaggaagggggctttcagacaggcttgcccaggctggggtctgagtgtcactgtccagccaatggtcatcccgctcccatcctcaccttcttgcttaatgggtgagcccagctgctgccgcagctgccacccagcccatgtggacaagctggcctggccttcacacaggcctgggccacggcaagagcacagcaggatcagctcaggcagtgcctgaacaggaagggcctttatgaaggaagctttgccagttttggtcagctgttttaacttctccgaagctactgttttgctgtatttccctgcttgatctacactgctcttttcaagcagttttctccgcttctccttctcttttattttcatacgcttttgatatttctttttccttcgctctcgtttcttgtctgtagctgttttttcagcagctgtttttatatctccagctttatttttctccttgatctcctctggggccaggagagctgcatcactaacactcactggggctacttcctccatggttatggctggcagatttgacacaactttaatctctggtacaggcggtttagggataaagtggaagtttgagagggcatccaattttaagaagagggaatccatcatcttctgaatttctacatgttctggattttcttcttctgctgttttttgctggttgagtttgatgtactcctgttcataaatttcagcaaggctcaatttactcttctcatggtctaaggttaaacgctttttatattcatatgcatcctctttaggtttttctttacgtactacatcatcccaagcctgatctcttatcctctgtttaatgatatcttccagttgaagggtggtttcctctgtaatcacaggtgcagaagcccctccttcagatcgtactctgccactcctccgagagcttaagccgttgccgtagaggtcgccgtcgccacaacagtctcggccctccactgcttctttccctgaattggccttccggtgtatgatgagagaaagtttacacaatctcataggtttgaaaaacaggctcttctggtccacgtggtgtccttgagcagtcagaaatactccttgaggatgaacctttattaccaggatagcaatgggatgtaaggaagggttgatgaacttctctcgtctcacttcatgtctcaggtgttccttcagtgtgcagatgtcatgtagcagtaaggtgtaggatgccatttttgattgtggcctttggagaccatattcagggctaggtataatgactatcttttctatatctgctgctgagcttggtgctgtggacccactggtgaatgtgacatggttcttgtccttgaagggcacacagagagtggaaaaaacttgggcagtatggccgttttcatgatattgattcttcatatccatgagcatggaatgttcttctatttctttgtgtcctcttttatttcgttgagcagtggtttgtagttctctttgaagaggtccttcacatcccttgtaagttggattcctaggtattttattctctctggtagaattcagctgtgaatccgtctggtcctggactttttttttgcttggtaggctattaattactgccttaatttcagaacctgttgttggtctattcagagattcaacttcttcctggtttagtcttgggagggtgtatgtgtcaaggaatttatccatctcatttagattttctagtttatttgtgtagaggtgtttatagtattctctgatggtagtttgcat

SEQ ID NO: 391 - DNA, 494 bp, Homo sapiens
tattcccggttcgacgatttcgtctggagggaaggaggtgtcaggcggtgagagacgcaaacggcgggaccatcagcgacggtagcagcagcatggccgcgatctatgggggtgtagaggggtgagtgcggcccggcggagggagcctgggcccgaaggcggggcggaaggccgtggccagcctggcaagctggtggccttgatcctcggcgtccgggcactttgggcggcgggaccttgcggtgaagaggtgtgtgcacgcgcaggggcgccctggagcgcacagctgtatgccttacggggactctgcctgtgcaacagccacaccccgggttggggatcctttgtgtttcttggcggaaccacgcccctttcttccacgaaacacccactccgctgtcttcagctggagaagcagctcctttttcctattcctgacctcggacagagttttgcagaacaggtgtcaggtgtgaaattgctgagcgcgggca

SEQ ID NO: 392 - DNA, 639 bp, Homo sapiens
  SIMILAR (92)..(3): 601254mologous to Homo sapiens Human G-protein coupled receptor GRIR-1 encoding cDNA,accession number AAX89652,Smith- Waterman Score=80.
atggggatgaccacagcgtacatcactgatgccaccactccattcctgggagatgatgacacagctgaagtcagatgggcagatggccacaaatcggtcataggccatcagagtcaggagcatgtcttctatacatgcaaaaaggacaaagaaagacatctgtgtcaggcagcccgcataagagatgactctgctatgcgactgcatgtccacaatcatcttgggaactgtggccgaggtgaaaccaatgtcagcccaggacaggttggagaggaagaagtacatgggggtgtggaagtgggggtcagagctgccagccaggatgatgaacaggttcctcagcatcgtgaccagggcggggaagacaataatactgccctcagtatcgcgggaaatgtacgtcaccctgtgatatttttcctaatatccagagggagagagaatgatattactcccaatatcgtagaagtgtacagcccccctgtgatattgttcttaatatccgtgggatggccaattcctggctttggtcccactgaggactccgtggacagtgctgccagctcaggtccctactcctccccacctaattctgacaaggtgttctcatgctccttggaaacatcaagaccagactaa

SEQ ID NO: 393 - DNA, 729 bp, Homo sapiens
  SIMILAR (490)..(726): 601254mologous to Homo sapiens polyadenylate binding protein- interacting protein 2,accession number AF317675,Smith-Waterman Score=275.
atgaatggatccaatatggcaaatacatcaccgagtgtaaaatccaaagaggaccaggggttaagtgggcacgatgaaaaggaaaacccatttgcagagtacatgtggatggagaatgaagaggatttcaacagacagcctctgaatgaaatatatgttgttgaaaacataaaacaattttcactagctttgttaacactcactgacatgctcttaaccccagtgatcaggattgcaccagggctattagaagccagatgtctgagctgtgggtcagctgtgcactcctacattcaagagtttagcaaactcagagacaagtgttttcatggaaaatttgtgttaatgggaaaaggtgaggaaatttattttatgaaaggaagttgttttggtctaatgccctgtgttattgggtgtagatttgtgggaaacagcagctatatgcagacaggtcagcatggcatgcctcaaatgggaactcgggattggcaggatgtggaggaggaactgcaagagcaagacttcttggaccgctgcttccaagagatgctggatgaagaagaccaagactggtttattccatcacgagacctgcctcaggccatgggacagttgcaacagcagttaaatggactgtcagtcagtgaaggtcatgattctgaagatattttgagcaaaagtaacctgaacccagatgccaaggagtttattccaggagagaagtactga

SEQ ID NO: 394 - DNA, 712 bp, Homo sapiens
  SIMILAR (165)..(533): 601254mologous to Homo sapiens polyadenylate binding protein- interacting protein 2,accession number AF317675,Smith-Waterman Score=411.
cgcggccgcgtcgacgcttctcgggtgctgtgcttcacgttttggtactaaaggccgagactgttgtggcgacggcgacctctacggcaacggcttaagctctcggaggagtggcagagtacgatctgaaggaggggcttctggttagcccaggttccatcataatgaatggatccaatatggcaaatacatcaccgagtgtaaaatccaaagaggaccaggggttaagtgggcacgatgaaaaggaaaacccatttgcagagtacatgtggatggagaatgaagaggatttcaacagacaggtggaggaggaactgcaagagcaagacttcttggaccgctgcttccaagagatgctggatgaagaagaccaagactggtttattccatcacgagacctgcctcaggccatgggacagttgcaacagcagttaaatggactgtcagtcagtgaaggtcatgattctgaagatattttgagcaaaagtaacctgaacccagatgccaaggagtttattccaggagagaagtactgagccgagaaagctttgaggaagacttgtctgtccccacatctggggatagtaatgcacaaaatggtggagctgaagagggggatggggcgggcgaggggtgcacagcgggaaggggagtggtggtctcacgatactgtgactctgagtaactaatatgctcagtctaattctaagaa

SEQ ID NO: 395 - DNA, 2873 bp, Homo sapiens
  SIMILAR (321)..(223): 781254mologous to Mus musculus M12 odorant receptor,accession number AF283558,Smith-Waterman Score=135.
atcccagaatcctcaccccattcccagttaaaggcataacgaagaaagcaatattcacaaaggaaatgcggaaaggaataaaagcccatcaagcccacaaaaataatgtgactaagaggcaggatttgcagaagtagagatttaatgtggttgacctttctcacccacacaagaaaaaggatggagcagatcttgagataacagatcatgagattcgactgttctgctgagcagcctccgcagggtgctttgaatgtccctgtttctcaggctgtagatgaaagggttcagcatgggggtgaccacagtgtacatcactgacaccaccacaccattcctggggggtggtgacaccagctgaagtcaggtacacgccaatgcctgtttcataaaataagcaaacaactgccaggtgagagccacaggtggagaaggctttatacttcccatctgacgatggaattcttggaatggaggagacaattttatagtaagacaaaaggatccctgaaatgggaagaaaaccaaatatagggatatctaaaatacatgaatatgctattgatgatgctgtcagaacaggcaaggttgagaagttgagatgggtcacagaaaaaaaattatagatttccacattcttgaagaaggtgagttgtgtaacacaatccagctgtgcagctgggaatccaacaggctaaggaaaaaggacaccaaaactaagaagacacagaggtgaggattcatgatgactcggtagtgcagggggtgacagatgggcagatggccacaaatcggtcataggccatcacagtcaggagcatgtcttctatacatgcaaaaaggaccaagaaagatatccgtgtcaggcagccctcataagagatgactctggtatgagactgcatgtccacaatcatcttaggaaccgtggccaaggtgaaaccgatgtcagcccagcacaggttggagaggaagaagcacatgggggtgtggaggtgggggtcagagctgacagccaggatgatgagcaggttcctcagcaccgtgaccagatacatggacagggacagaccagccaggatgggctgcagttctggatcctctgtgatattgttcccaatatgcgaggggggagaggatgatactactcccaatatcgcaggggtgttcacatccccagtgacaattttcctaatatctccacactttggcatctctgtgaagtctacctggagatcttcaaagggggctgctccataagcttgtatgccgggtggaacggctggaccttgcctcgcatgatgctgtcggcagctgacacatcgctgcctcaccgttttggcaagggcctcactgagttctaaggcccgaatgaaagcaatgagttcagctttctgggctgaagtgccctggggcatcgatctggcttcaacaacagtgtccaggttatcacgcataccctgcacctctctctccttaggtgttgatgaagctgctcccatgcacgtatagttcccagtgtactgatgcccaagcttggtcccggatgtcaggtctgctagagtcaactgctgtcggcagatctgagctttcttcttggacaccttatacccacagtcctccaggtgtcggcgtagggcaatccgttcccttggcacacccgactgccgtggggtgtcccagcaaaagctcatcaacccttctaccaggatgagcagggccctttcctccttgtccggggcctcctgctctgagtcaccttgttttcttttgagctgagggcatttgttcttccactgtcctatttctttacaataagcacactggttatgctgcaaactctgacagccaagctgagtttcttttccagggccccccttcccttgcttctttggggggacagctctgattgctgcagtggggtccccttccacactgtggaagctttgttcttttgctctttgcaataaatcttgttgctgctcactgtttgggtccacactgcctttatgagctgtaacactcactgagaaggtctgcagcttcactccaggagggtccgcggcttcattcttgaagtcagtgagaccaagaacccaccaattctggacacacttatacacttggcactgggaggtcagggtttgcatgtcgctgtctagagcccggatctgctgcaccatgtccgtctcactgtcgatcagctgggccagagggcactctctaggcagcttgtccaggtaaacttccgggtcgaagtgcgccccgttcagatcagtggggtccagggggtcgggccccgcagggagtcccaacgcctccccttccgagaggcctttgtaaagctttagcatcctgtgtgccttccgccgacgctccgtgagcctcccgctcctgcccttctggggagtccccaggtccacatcctgggctaggcccagtgacagctgccgccgccataggtccaattgatcatggtggataagctttttgatgtgctgctggattcggtttgccggtattttattgaggatttttgcatcaatgttcatcaaggatattggccaaaaattctcttttttggttgtgtctctgccaggctttggtatcaggatgatgctggcctcataaaatgcgttagggaggattccctctttttctattgattggaatagtttcagaaggaatggtaccagctcctccttgtacctctggtagaattcggctgtgaatccatctggtcctgcactttttttgattcgtaagctattgattattgccacaatttcagagcctgttattggtctattcagagattcaacttcttcctggtttagtcttgggagggtgtatgtgttgaggaatttatccat

SEQ ID NO: 396 - DNA, 3114 bp, Homo sapiens
  SIMILAR (1907)..(2953): 681254mologous to Homo sapiens N-Acetylglucosamine kinase,accession number BC001029,Smith-Waterman Score=1022.
  misc_feature (1)...(3114): n = a,t,c or g
atgaatacatcacaattattagaaatagccaaccaggtgtttgtaaacagggctgcagtaagccttgaggaaaaccgcaaagagaatggacatcaggcccggcgaaacaccgacctggttgtcagctgcagcaatcagaggggtcaggagtcactggaaaagttgttaggccggtatttctacatctcgcatttgtcagccctcgccaaaaccatgaggcagcggtttgttacctgccgacaccataatgcgaggcaaggtccagctgttccgcccggcatacaagcttatgcagcagcccccattgaagatctgcaggccattaggaacaatatcacagcgggtgtttacacaccctgcgatattggaggtaatatcatcctctgccccctggcatattaccaacgatatcaaacaggggtggtgtacaccccttgtgatattgggagtattatcatcctctccacctccgggtgtccaagtcacacagagccacggaatctcacaggtgtctcagaattcctcctcctgggactctcagaggatccagaactgcagcctgtcctccctgggctgtccctgtccatgtatctgctcacggtgctgaggaacctgctcatcatcctggctgtcagctctgactcccacctccacacccccatgtacttcttcctctccaacccgtcatgggctgacatcgctttcacctcggccacagttcccaagatgattgtggacatgcagagtggtgtggtggtgtcagtgatgtacactgtggtcacccccatgctgaaccctttcatctactgcctgagaaacagggacattcaaagcgccctgtggaggctgcgcagcagaacagtcgaatctcatgatctgttccatcctttttcttgtgtgggtatccactgtcaggtctctgagcttgatgctgtcatgtcccttgacaccgcttccggggcttttcggtggatggcttttggggtggaagtggcagccccagcttaccagccatcatgctcatgtccgggatctcagtcctctggggaaggggccagaaaaggctggagcagccgaagtctttcggaaacagtatctgcggtatattcagggctgactcaggaaagaagatgccagccccagagtcccacctccaccgttggttccatcataatgaatggatccaatatggcaaatacatcaccgagtgtaaaatccaaagaggaccaggggttaagtgggcacgatgaaaaggaaaacccatttgcagagtacatgtggatggagaatgaagaggatttcaacagacaggtggaggaggaactgcaggagcaagacttcttggaccgctgcttccaagagatgctggatgaagaagaccaagactggtttattccctcacgagacctgcctcaggccatgggacagttgcaacagcagttaaatggactgtcagtcagtgaaggtcatgattctgaagatattttggtccatgggcgcaggtccctgagcccacagcttcgcgggggtctggccgagcatgcgtcacaacctacgcggccaagagcagtgcgcacgcgcaacctaacgcgggactgccagcaacttccgggcgtttacaggcaggcaggatccaggaggacgggaggggccgctgcggaccgcagtcgctccacctggaggagacaccagaaggaagacagcctgagggacgcagccatccccggctcctaccggcgccccgccccgcgcatgcgcacgcgcacagggagtcagctggctgcgcgggaggtcacgggaagtggggcggtgcccagacagctggagggaaggaggtgtcaggcggggagagacgcaaacggcgggaccagcagcgacggtagcagcagcatggccgcgatctatgggggtgtagagggggtgaggcacacgatccgaggtccttttagtctcagaggatgggaagatcctggcagaagcagatggactgagcacaattcactgtttgatcgggacagacaagtgtgtggagaggatcaatgagatggtgaacagggccaaacggaaagcaggggtggatcctctggtaccgctgcgaagcttgggcctatctctgagcggtggggaccaagaggacgcggggaggatcctgatcgaggagctgagggaccgatttccctacctgagtgaaagctacttaatcaccaccgatgccgccggctccatcgccacagctacaccggatggtggagttgtgctcatatctggaacaggctccaactgcgggctcatcaaccctgatggctccgagagtggctgcggcggctggggccatatgatgggtgatgagggttcagcctactggatcgcacaccaagcagtgaaaatagtgtttgactccattgacaacctagaggcggctcctcatggatatcggctacgtcaaacaggccatgtttccactatttccaggtgccagatcggctagggatactcactcacctgtataaggacctttgataaaatgccaggtttgctgggttttngcccggaaaattgcagaaggtgctcagcaggggagaccccctttcccgctatatctttcagggaaggctggggagatgctggggcagacacatcgtaggcagtgttgcccgagattgacccgggtcttgtnccccagggcaagaattggactccccatcctgtnccgtgggctctgtgtgggaagagctgggagctgctgaaggaaggttttcttttggcgctgaccccagggcagagagatcccaggctcagaactttcttctccaagctttcacccctgatgaaagcttgaggcaattcctccgctctgggtggggcccagccttaggggccaggcacatcgggcacctcctccccatggactatagcgccaatgcctattgccttctattcctacaccttttcctagggggctggtcccggctccacccccctccaagctcagtggacactgggtctgaaaaggaaaggagtcttttgcttcctttctcctttttacaaaaacaaaccttggaggaaattaaatgcactttatccactccccaaaaaaaaaaaaaaaaagtcgac

SEQ ID NO: 397 - DNA, 1873 bp, Homo sapiens
  SIMILAR (194)..(1204): 501254mologous to Oryctolagus cuniculus hnRNP-E1 protein,accession number AJ003023,Smith-Waterman Score=594.
  misc_feature (1)...(1873): n = a,t,c or g
gctcgccccctccgccgccgccgcccgcccctgcgactacgctgcggcctcccgcccgctcccgctcgctcccgcggccctcgctcgcctcgcgccggcagttttgggcctacacctcccctccccccgccagccgccaaagacttgaccacgtaacgagcccaactcccccgaacgccgcccgccgctcgccatggatgccggtgtgactgaaagtggactaaatgtgactctcaccattcggcttcttatgcacggaaaggaagtaggaagcatcattgggaagaaaggggagtcggttaagaggatccgcgaggagacgtggcgcgcggatcaacatctcggaggggaattgtccggagagaatcatcactctgaccggccccaccaatgccatctttaaggctttcgctatgatcatcgacaagctggaggaaagaatatcaacagctccatgaccaacagtaccgcggccagcaggcccccggtcaccctgaggctggtggtgccggccacccagtgcggctccctgattgggaaaggcgggtgtaagatcaaagagatccgcgagagtacgggggcgcaggttcaaggttggcgggggatatgcctgcccaactccaccgagccgggccatcaccatcgcttggcgtgccgaagtcttgtcaccgagtgtgttcaagcagattttgcctgggtcatgctggagacgctcttcccagttttccgcaagggaggagttcatggaccatttccgttaccagcccatgccggccagcttccccagttcatcttgcgcgggcggccaagattcggtgcagcgacgtggggggcttacccccatggccacccttgacctgggaagggaccacttttagatggcttattcgatttcaagggacaacacaccatttctccgctcgatctgggccaagcttgaaccagggtnggcaagccaacaagtctcaatgttcacatgatgcacggcggcacccggatttcgcgggaattgactcagcttctccagagggtgaaaggctattgggcaaagtttgaatgcatctactcnaaaacaccccatgaactcaccatttccaaataacttaatttggctgcataatcgggcgccaagcagacagcgatttaatgagatccgcccagatgtcgggggcccaggatcaaaaattggcccaacccagtggaaaggctcctctggtagggcaggttactattcactgggctctgctgcccagtaattagtctggcccagtatctaatcaatgcccaggctttcctctgagaagggcatggggtgcagctaggaacagtgtaggttccctcaataacccctttctgctgttctcccatgatccaactgtgtaggttcccctccaataaccccctttctgctgttcttccccccccatgatcccaactgtgtaaatttctgggtcagtgattcccaggttttaaataatttgtaagtgttccagtttctacacaactttatccatccgctaagaatttaaaaatcacattctctgttccagctgttaatgcctgggatccatatttagttttataagcctttccccggtttttagttttggtttggggtttttgggccccatgaattttatttctggtttgtcgataagaaatgtaagagtggaatgttaataaatttccagtttagttctgtaatgtcaagaatttaagaattaaaaaacgggattggttnnnnnnnnnnnnnnggggcggccgttttagaggatccttgggggggccttttaaaagatcccttggggggcccaattttaccgggggtggggaagaaaatattttctcctttttggggggggtttttaaaagt

SEQ ID NO: 398 - DNA, 457 bp, Homo sapiens
  SIMILAR (2)..(118): 921254mologous to Homo sapiens lysosomal acid lipase/cholesteryl esterase,accession number M74775,Smith-Waterman Score=193.
tgtcatactgaaggagctctgtggaaatctctgttttcttctgtgtggatttaatgagagaaatttaaatatgtctagagtggatgtatatacaacacattctccttgttcattttcacccaaatgaagtgtgaacgtgatgttttcggatgcaaactcagctcagggattcattttgtgtcttagttttatatgcatccttatttttaatacacctgcttcacgtccctatgttgggaagtccatatttgtctgcttttcttgcagcatcatttccttacaatactgtccggtggacaaaatgacaattgatatgtttttctgatataattactttagctgcactaacagtacaatgcttgttaatggttaatataggcagggcgaatactactttgtaacttttaaagtcttaaacttttcaataaaattgagtgagacttataagcccaaagaa

SEQ ID NO: 399 - DNA, 1016 bp, Homo sapiens
  SIMILAR (373)..(753): 441254mologous to Oryctolagus cuniculus ferritin heavy chain,accession number M63912,Smith-Waterman Score=149.
gtcgtcggggtttcctgcttcaacagtgcttggacggaacccggcgctcgttccccaccccggccggccgcccatagccagccctccgtcacctcttcaccgcaccctcggactgccccaaggcccccgccgccgctccagcgccgcgcagccaccgccgccggccgccgcctctccattagtcgccgccatgaagaccgccgttccacctcgcaaggtgcgccaagaactaccaccaaggactcaagagggccgcccatcaacccgccaggatcaaccctggaagctctacggcctcctacgttttaccctgtcccatgtcttacttacttttgacccgcgatgatggtgggctttgaagaacctttgcccaaatactttctttcaccaattctcaatgaaggaagagggaaaccatgctgagaaaacttgatgaaagcttgcagaacccaacgagggtggccggaatctttccttcaaggatatccaggaacccagactgctgctgactggggagagcggggcttgaatgccaatggagtgtgcattacatttgggaaaaaaatgttgaatcagtcactactggaactgcacaaaactggcccactgacaaaaatgaccccccatttgtgtgaccttcattgagacaacattaccctgaatgagcagggtgaaagccatcaaaagaatttgggtgaccacgtgaccgaacttgcgcatagatgggagcgcccgaatctggctcgcgcggaataatctctttgacaaagcacacccctggggagacagtgataatgaaagctaagcctcggcgctaaattttccccatagccgttgggggtgacttccctggtcaccaaggcagtgcatgcatgtttggggtttcctttaccttttctataagttgtaccaaacaccatccacttaagttctttgatttgtaccattcccttccaataaagaattttggtacccaggtgttgtctttgaggtcttgggatgatccagaatctatt

SEQ ID NO: 400 - DNA, 2703 bp, Homo sapiens
  SIMILAR (165)..(917): 691254mologous to Homo sapiens sterol esterase,accession number X76488,Smith-Waterman Score=840.
  misc_feature (1)...(2703): n = a,t,c or g
tttcgtggctgctctgattggctgaacaaatagtcccgaggggggtgggcatccgccctcccgacaaggcagaccaggccccctgcaggtcccctatccgcaccccggcccctgagagctggcactgcgactcgagacagcgttttcggcaggacagctccagaatgaaaatgcgggtcttggggttggtggtctgtttggttctctggaccctgcattctgaggggtctggagggaaactgacagctgtggatcctgaaacaaacatgaatgtgagtgaaattatctcttactggggattccctagtgaggaatacctagttgagacagaagatggatatattctgtgccttaaccgaattcctcatgggaggaagaaccattcttgacaaaggtcccaaaccagttgtcttccctgcaacatggcttgctggcagattctagtaactgggtcacaaaaccttggcaacagcaggctgggcttcattcttgctgatgctgcgattgacgtgtggatgggcaacaccagaggaaatacctggtctccgaaacataagacactctcagtttctcaggatgaattctgggctttcagttatgatgagatggcaaaatatgacctaccagcttccattaactttctttctgaataaaactgggccaagaacaagtgtattatgtgggtcattctcaaggcaccactataggttttatagccattttcacagatgctggagctggctaaaggattaaaaatgttttttgcctggggtcctgtggcttccgtcgccttctgtactagccctatggccaaattaggacgattaccagatcatctcattaaggacttatttcggagacgaagaatttcttccccagagtgccttttggaaggtggctggggtaccccacnttgccactcatgtcatacttgaaggagctctgtggaaatctctgttttcttctgtgtggatttaatgagagaaatttaaatatgtctagagtggatgtatatacaacacattctcctgctggaacttttgtgcaaaacatgtaacactggagccaggctgttaaattccaaaagtttcaagcctttgactggggaagcagtgccaagaattattttcattacaaccagagttatcctcccacatacaatgtgaaggacatgcttgtgccgactgcagtctgaaacggggggtcacgactggcttgaagatgtctacggcgtcaatatctaactgactcagatcaccaaacttggtgttccatgagagcattccggaatgggagcatcttgacttcatttggggcctggatgccccttggaggctttataataaaattattaatctaatgaggaaatatcagtgaaagctggacttgagctgtgtaccaccaagtcaatgattatgtcatgtgaaaatgtgtttgcttcatttctgtaaaacacttgtttttctttcccaggtcttttgtttttttatatcccaagaaaatggataactttgaagatgccccagttcactctagtttccaattaggaaacatactaggctattttttctttaattaggggctgggaatagggaagccagtgtctcaacccatagtattgtcctctttaagtcttttaaaatatcactggatgtgtaaaaagggtccttatatccattctgtttttaaaatttaaaatatattgactttttgcccttcataggacaaagtaatatatgtgttgggaattttaaaattgtgttgtcattggtaaatctgtcactgacttaagcgaggtataaaagtacgcagttttcatgtccttgccttaaagagctctctagtctaacggtcttgtagttagagatctaaatgacattttatcatgttttcctgcagcaggtgcatagtcaaatccagaaatatcacagctgtgccagtaataaggatgctaacaattaattttatcaaacctaactgtgaccagctgtgatttgacacgttttaattgctcaggttaaatgaaatagttttccggcgtcttgcaaaaacaaattgcactggattaaaacaaaaacaaaagtatgtttttaaatggctttggaagactggatacactcaaccatctatattcatgagctcctcaatttcatgggcagggccatagttctactttatctgggggaggcaactcccctgtggagactatacccactatttttttctgagattaaatgtactcttggagccccgctaactgtcgttattgatccacatctggttgtggaagcccaaaagccccggtggttgccccatgacgaacgtgtcctacgttcattttcaccccaaaatgaagtgtgaacgtggatgttttcggatgccaaactcagcctcagggattcattttgtgtcttagttttatatgcatccgttatttttaatacacctgcttcacgtccctatgttgggaaagtccatatttgtctgcttttcttgcagcatcatttccttacaatagctgtccggtggacaaaatgacgaattgatatgtttttctgatataattactttagctgcactaacagtacaatgcttgttaatggttaatataggcagggcgaatactacttagtaacttaataaagtcttaaacattttcaataaaatagagctgagacttataggcccaaaaaaaaaaaaaaa

SEQ ID NO: 401 - DNA, 611 bp, Homo sapiens
  SIMILAR (2)..(175): 861254mologous to Molgula oculata actin,accession number D85743,Smith-Waterman Score=250.
  misc_feature (1)...(611): n = a,t,c or g
caccttctacaacgagcttcgcgtcggctcccgagganaccccaccctgctcaccgaggcccccctcaatcccaaggccaaccgcgagaagatgacccagatcatgtttgagaccttcaacgtgcccgccatgtacgtggccatccaggcgtgcgtgtccctctacgcctccggaggaccaccggcatcgtgctggactccggcgacgcgtcacccacaacgtgcccatttatgagggctacgcgctgccgcacgccatcatgcgcctggacctggcgggccgcgatctcaccgactacctgatgaagatcctcactgagcgtggctactccttcgtgaccacagctgagcgcgagatcgtgcgcgacatcaaggagaagctgtgctacgtggccctggacttcgagaacgagatggcgacggcgcctcctcctcctccctggaaaagagctacgagctgccagacgggaggtcatcaccatcggcaacgagcgcttccgctgcccggagacgctcttccatcctggcctcgctgtccacctttcagcagatgtggataccaagcaggagtacgaagaagccggnccttcatcgtcaangcaaattgtttt

SEQ ID NO: 402 - DNA, 403 bp, Homo sapiens
  SIMILAR (101)..(397): 901254mologous to Bos taurus alpha skeletal actin precursor,accession number U02285,Smith-Waterman Score=461.
cggacgcgtgggcggacgcgtgggctcgcttcccttccgcggcgaccagggcccgagccgagagtagcagttgtagctacccgcccaaaaactagacacaatgtgcgacgaagacgagaccaccgccctcgtgtgcgacaatggctccggcctggtgaaagccggcttcgccggggatgacgcccctagggccgtggtcccgtccatcgtgggccgcccccgacaccagggcgtcatggtcgggatgggtcaaaaagattcctacgtgggcgacgaggctcagagcaagagagggatcctgaccctgaagtaccttatcgagcacgggatcatcaccaactgggatgacatggagaagaatgggccacaccttctacacgagcttcgcgtggtcccgaggagg

SEQ ID NO: 403 - DNA, 1605 bp, Homo sapiens
  SIMILAR (116)..(493): 731254mologous to Sparus aurata skeletal alpha- actin,accession number AF190473,Smith-Waterman Score=428.
cccacgcgttcgcccacgcgttcggcgccaagtgaagcctcgcttccctcccgcggcgaccagggcccgagccgacgagtagcagttgtagctacccgcccagaaactagacacaatgtgcgacgaagacgagaccaccgccctcgtgtgcgacaatggctccggcctggtgaaagccggcttcgccggggatgacgcccctagggccgtgttcccgtccatcgtgggccgcccccgacaccagggcgtcatggtcggtatgggtcagaaagattcctacgtgggcgacgaggctcagagcaagagaggtatcctgacccctgaagtacccctatcgagcacgggatcatcaccaacctgggatgacatggagaagatcttggcaccacaccttcttacaaacgagcttcgcgtgggcttcccgaaggaggacccccaacccttgcttaaccgaaggccccccttaaattccccaaggccaaccgcgaagaaagaatgaaccccagattatgtttgagaccttcaacgtgcccgccaatgtacgtggccatccaggccgtgcctgctccctctacgcctccggcaggacccaccggcatcgtgctggactccggcgacggcgtcacccacaacgtgcccatttatgagggctacgcgcctgccgcacgccattcatgcgccatggaccatggcgggccgcgactctcaccgactaccctgatgaagatcctcacgtgagcgtggctactccttcgtgaccacagctgagcgccgagatcgtgcgcgaccatcaaggagaagctgtgctaccgtggccctggacttcgagaacgagatggcgacggccgccatccatccatcctcccatggaaaagagctacgagctgccagacggggcaggtcatcaccatcggcaacgagccgcttccgctgcccggagacgcctcttccagccctcctttcatcgggtatggaagtcggcggggcatttcacgagaccaccttacaacagcatcatgaagtgttacattcgacatccaggaaggaccttttatgccaacaacgttcatgtcggggggcacccacgattgtacccctgggattcgctgacccgcatgcaagaaagagattcaccggcgctggcaccccagcacccatgaggatcaaggattcattcgcccccgccggagcgcaaaatactcggtgtggaatcggcggcttccatccttggcctcggttgtccacttcccagcagaagtgggatcaccaaagcaggagtacgaacgaggccggccctttccatcgtccaccggcaaatgcttctagacacactccacctccaagcacgcgacttctcaaggacgacgaatcttctcaattgggggggcggctgagctccagccaccccgcagtcactttctttgttaacaacttcccgttgctgccatccgtaaacttgacacagtgtttataacgtgtacatacattaactttattacctccattttgttatttttcgaaacaaagccctgtggaagaaaatggaaaacttgaagaagcattaaagtcattctggttaagctgcgaaaaaaaaaaaaaaaaaaa

SEQ ID NO: 404 - DNA, 406 bp, Homo sapiens
  SIMILAR (53)..(286): 921254mologous to Homo sapiens Human secreted protein encoded by gene 24 clone HSVBF78,accession number AAW78149,Smith-Waterman Score=349.
aagcccgaagctacctatctggaatggagctcccccagcaccgaacactgcgatgacttctgcgctgacccaggggctggagcgaatcccagaccaactcggctacctggtactgagtgaaggggcagggctggcgtcatctggggacctggagaatgatgagcatgcagccagtgccatgtctgagctggtcagcacagcctgcggtttgcggctgcaccgagggatgaatgtgcacttcaagcgcctgtctgtggtctttggagaacacacactgctggagacacgtgtcctgacagaaggtgtttgtggcgaataggcagaaccgagggcgggagcccattgatgtctgaacctgccagagggcgagggtcggagaaacggattgggtactgggcctgtgtga

SEQ ID NO: 405 - DNA, 583 bp, Homo sapiens
  SIMILAR (277)..(579): 851254mologous to Homo sapiens Human secreted protein encoded by gene 24 clone HSVBF78,accession number AAW78149,Smith-Waterman Score=389.
tcgcccacgcgtccggggcagcaaaggccttttggggtagcaaaggtgggatgtggaaggccaggggagcccgggggcgagagagggggcagatggaggctcgggaagatcagtattgaggaccatgtatgggggagggggccgggaagggacctggctggggaatgagaaaacctggggccatcgtcaacccatagacttgtgtttgcaggtgaagggtatcggtccgtccatccctctagcatgcttctcacgacttgcatctttacccactagacttctgcgctgacccaggggctggagcgaatcccagaccagctcggctacctggtactgagtgaaggtgcagtgctggcgggcagcaagtgtgaagacagaaaaagatggagccattaacagtcatctggggacctggagaatgatgagcaggcagccagtgccatctctgagctggtcagcacagcctgcggtttccggctgcaccgcggcatgaatgtgcccttcaagcgcctgtctgtggtctttggagaacacacactgctggtgacggtgtcaggacagagggtgtttgtggtaagaggca

SEQ ID NO: 406 - DNA, 533 bp, Homo sapiens
  SIMILAR (498)..(322): 981254mologous to Homo sapiens Human secreted protein encoded by gene 24 clone HSVBF78,accession number AAW78149,Smith-Waterman Score=285.
gtgggtgcacaagactccatgggcggggccacacgcacattggctgggatcaaagccaaagaagttctatagttccaggctcagagatttgaagatgagtggcctctgctagatctcctttctcttgccttctcattcacaaatttctgatacaagggagtcccaaagggaggaaagtggccagaccagagaccccaggagatggtaggaggctggaagaagagaagccgagaagccccttggaagtagccccccgctcccagtaccaccaccaagggcaggggcaggggctcaccagacaggcgcttgaagggcacattcaatgccgcggtgcagccggaaaccgcaggctgtgctgaccagctcagagatggcactggctgcctgctcatcattctccaggtccccagatgacgccagcactgcaccttcactcagtaccaggtagccgagctggtctgggattcgctccagcccctgggtcagtgcagaagtcatcgcagtcttcggtgctgggggagctccctaccaga

SEQ ID NO: 407 - DNA, 1446 bp, Homo sapiens
  SIMILAR (594)..(439): 861254mologous to Homo sapiens Human secreted protein encoded by gene 24 clone HSVBF78,accession number AAW78149,Smith-Waterman Score=207.
  misc_feature (1)...(1446): n = a,t,c or g
gtttttttttttttttttttggagaacaattaaactcatgtttattagggagtgagggagcacaaagggaggtctccttgcccttgttctccttaacaaagcttaaaagtcccnaaaccctgggcccgtccaggtaggggtggaaggtgggcaagaagaaggccctagttctaagaagcaagccaagacccgacagtggtcgcctgcctcaatcacagaggccccaggacccaaaatccgcttctccgaaccccttcgccctccggcaggctgcagacatcaattggcttcccgacctcgggttctgcctcttcaccacaaacacccttttgtcctggacaccgtcaccaagcagtgtgtgttctcccaaagaccactggaggagagacacaccagacaggcgcttgaagggcacattcatgccgcggtgcagccggaaaaccgcaggctgtgctgaacagctacagagatggcactggctgcctgctcatcattctccaggtccccagatgacgccagcactgcaccttcactcagtaccaggtagccgagctggtctgggattcgctccagcccctgggtcagcgcagaagtctagtgggtaaagatgcaagtcgtgagaagcatgctagagggatggacggcccgatacccttcacctgcaaacccaagtctctgggttgacgatggccccaggttttctcattccccagccaggtcccttcccggccccctcccccctacatggtcctcaatactgatcttcccgagcctccttctgcccccactctggccccgaggctcccctggccttccacatcccacctttgctaccccaaggggcctgtgctgcccctctggcccctgccctcagaccctctcttcacctcccttcgtctccgcccgacctgcagactacccgcagccccagaacaccctcccacagacccctccccagcattctcgtcgccatccctcccatttccatcccctcttcctccccgagcggataggaggtgagggtggagcgcaggcccaccagggggaaaccacacagactggggagcagagacgctgaacccccggcgggtcctctcgcgcatgcgtcctcactcaccatcgcagtcttcggtgctgggggagctccctaccagataggtagcttccggcttcaggccccggtcacgtgcttgcagccgctgcgctcctccttctgcttgcgccactggcctttagccccgcctctagcatgaggattggacagtggccacgtcgtcagacccaaccagccagtgcgaagcgctgtttcccggaggcgcacgttgattggtgatatcccctctttaacacccatctccccgcccctcagtgcctgagcgagaggaagacgcgggagcgtccgaggagggaaggatctgggaggggcgggagtaggccggggttgac

SEQ ID NO: 408 - DNA, 443 bp, Homo sapiens
  SIMILAR (38)..(274): 521254mologous to Homo sapiens subunit of coatomer complex,accession number X70476,Smith-Waterman Score=178.
cagaagcagcagatcccttctgacctacagagtatgaaacttgttccttgcataaaagaagcctttttgttgaagaatgggtgaaggaaacacttgctgttctgtgccagccaaacaatacccatttgtcaccccaattgaagagagaattctcatggaagagggaaaagccttccccccctcaagatctacagctaaacagaaacttgatggaaaccctgtttctcctactccggtttattggcctctcccccacaccaaacaaagaagaaaagcacctgaatctttgcccctttgagccgactggccatctggatggagcacgtgatacagctggaccaagttggttgcatcatcgattctgagaatgaaagggtttaatgttatctaggggttttcttcatttgattcacagtcctataaaagtgtgtgccaacttcaaa

SEQ ID NO: 409 - DNA, 5840 bp, Homo sapiens
  SIMILAR (2137)..(2817): 381254mologous to Rattus norvegicus beta prime COP,accession number AF002705,Smith-Waterman Score=253.
ggtgggtttatctcaaggcctgagtagccggtaacaaacgagggttcccgggattggaccgacgcaccatgcctctgcgacttgatatcaaaagaaagctaactgctagatctgatcgagttaagagtgtggatctgcatcctacagagccatggatgttggcaagtctttacaatggcagtgtgtgtgtttggaatcatgaaacacagacactggtgaagacatttgaagtatgtgatcttcctgttcgagctgcaaagtttgttgcaaggaagaattgggttgtgacaggagcggatgacatgcagattagagtgttcaattacaatactctggagagagttcatatgtttgaagcacactcagactacattcgctgtattgctgttcatccaacccagcctttcattctaactagcagtgatgacatgcttattaagctctgggactgggataaaaaatggtcttgctcacaagtgtttgaaggacacacccattatgttatgcagattgtgatcaaccccaaagataacaatcagtttgccagtgcctctttggacaggactatcaaggtgtggcagttgggctcttcgtcaccaaacttcactttggaaggacatgagaaaggcgtgaattgcattgattactacagtggtggggacaagccatacctcatttcaggtgcagatgaccgtcttgttaaaatatgggattatcagaataaaacatgtgtgcagacactggaaggacatgcccaaaatgtgtcttgtgccagctttcatcctgagttgccaatcattatcacaggttcagaagatggaacagtacgtatttggcattcaagcacctaccggcttgagagcacactgaattatggaatggagagggtatggtgcgtggccagtctaagagggtcaaacaatgtcgctttgggctatgatgaagggagcatcattgttaagcttggtcgggaggaacctgccatgtccatggatgccaatggaaagataatttgggccaagcattcagaagtccagcaggccaacctaaaagcaatgggagatgctgaaattaaagatggtgaaagattgccactggcagtaaaggatatgggcagttgtgaaatataccctcagactattcagcacaatcctaatgggcggtttgtggtggtgtgtggtgatggggagtatatcatctacacagcaatggcattgagaaacaagagctttggatctgctcaggagtttgcatgggcccacgattcttcagagtatgcaataagagagagcaacagcattgtaaagatatttaagaactttaaggaaaaaaaatcatttaaaccagattttggagcagaaagtatctacggcggcttcttattgggagtcagatctgtaaatggcttagccttctatgactgggacaatacagaactcatacgaagaattgaaattcagcccaaacatattttctggtctgactctggagagctagtctgtattgctactgaggaatcattttttatccttaagtatctgtcagaaaaagtcttggctgcacaggaaacacatgagggagttactgaagatggcattgaagatgcctttgaggttcttggtgagattcaggaaattgtgaaaacagggctttgggtaggcgattgcttcatttacacaagttctgtgaacagattaaattattatgttggaggagaaatagtcaccattgcccacttggacaggacgatgtatctcctaggctacattcctaaagacaacaggctttatctgggggataaagaattgaacatcattagctattccctgctggtttcagtcctggaataccagacagctgtcatgcggagggactttagcatggctgataaggtccttcctaccattccaaaagaacagaggaccagagttgcacactttttggaaaagcagggcttcaagcagcaagctcttacagtatccacagatcctgagcatcgttttgagcttgctcttcagcttggagagttaaaaattgcataccagttagcagtggaagcagagtcagaacagaagtggaaacaacttgctgaacttgccattagtaaatgtcagtttggcctagcccaggagtgcctgcatcatgcacaggattatgggggccttgctgctttttggccactgccctttgaaaatgcctataatggtgaaccagcctagccagagggttcggagaagagatggccaaaaataattggccttccatggcctcctttttaccgggccagggtggtggcctgcctgaggctctaaattaggaactggacggctggccagaagctgccttcttggcccgaacttacttaccccagtcaggtttcgaggggtagtgaaactctggagagagaatctctcaaaagtcaatcagaaagcagcagaatcccttgccgcacccaacagagttagtaaacacctgttcccctgtattaaaaggaggccttttttgttgaagaattgggtgaaggaaacacatgttgattttggggccagccaaaacaatacccaccttgtcacgcccaaatgaaagagagaaatgctcatggcagcgggcaaaagactttcagcccctcaagatctacagcctcaacaggaaccttgatggggaaccctgctttctccctacctccggttattgtggccctccccacaacagccaaccaagaaaagaaaagagtttaccccgaacctagaagtagatttggataaatttggaaattagaggatattgccacaaccagatatcaatctggatgaagattattttggaggattgactggaatggctttccatttaccctgactaaaccggatcaattattatatatcaggtattgattgctaccctgacccacagtgctttgggacctatgagaaacttcttagatttttatatgtaaatgctgtggacccactgggagcacaaatgccccacatcatcttaagaagaggtttatgtgcagacatttaaatcactggtgttttccttggttaactaaaacagacatggggctttgatttttttcatactattagacccatatctcataaaacctttttgaattaatgaaggtacttgtttcctttctcaatatatgaatataggcttctagttttagaaggctgagccgaaactacaccttgcctagggatcagccccactgtcttttctttgtataactaaatctgcattttcaaatgttgtcaatcacatttttcttagagctgaatatccaggctgtaattctctaaaccctttttcttgacctcattgcatcattccacaggtcttgccccgattttgtctagcagctacccatttctggagtcaggatgtgaaacctctgttcctctgacctcattaagctgggggtctgtctaagttaacgtttgccctatttggtaacacaaaaacacaccagactttttaaccgtacgctcatctaacatgatttgagaaattcataaccaggcactcaaatatccttgtagcctacgaaaagtgagtagggtaataatttttgctttgtagggagaactacaaattgatatcttttaatctagccattttttaacatttagctcaatattaacagagaaagtgggtaggtccagtatttagtaaaataaatgtatttttaaaatatttttaggaagctgcagaatggcgactgagtgcttcttgataagtctgcagtgttagttccatataggctccctttccgtgcttctgtttttgcaaagaccttgattaaatttatttccctcagcagcctgatccttggccccttgagccgactggccatctgggatggagcacgtgatacagctgggaccaagttggttgcatcatcgattaaatctctctgaatctgggtcaatcagcaaaccatcaatctttttattatttacaaaataccacaccatttccaccaaagtatcttgttgaacgtaaaaggtcatattttccacgtttatctatatcttcataggtcttgtgatgaacctatccacataaaatgcaactcttcagaaacatgaaaataagaagtatgcagcattattcaacgtacactgattagcatgagtgctgcccaagcaagtaaaaccaggtctacttacagttgcctccatatcattaaccaattggtatgatttaaaccattcctagtacaacccaccttaggtgggaaggaggattctattaagaaagaattttggccaggcacagtggctcatgcctataatcccaacactttgggaagctgaggtgggaggactgcttgagcagtcctcatctctaggaaaattttttaaaaaattagctgggcatggcaggccacagaataagaccctgtctttaaaaaaattaaaagagaagaatttgtctaaatgacagcaagtctgtgccttctccactgtagaagtatgtggcagcctgaagcaaaataccaaacatttatagccatattaagtactttttggcaggccaactacaatttattaagcaccgattatgcatatagagaccactggaaataatgtagcacccacttcttggtcactatggcagaaaagaaatcaagtattttttcactactctccctttcccctatccctccccccatcaactaccctattctaccagctagcccattccatcttattaactaaaggtccttcagtcctccttccagattgatcttcctaaatgaaggttctgatgggggcattcctctgttcaaaaggctttcaaaggtctgctgactgaattccagattcctcagcctagcatctgaggtcacctatgatgtggctacatccaccttcctaacttaatctttaatcactcccctacatatgcatggcatatataagcaaaccagatcactggccgtttctcaagcctccttttttcctgcctgttgcttatactgttctctctacctgaaacacctcacccagctccacctgccacaacatttcctgcacttctagaaccctcctttacacccctatgaaggctttcttcaaagaatttgtaatcttctcttagtgtctagcattttaggcctgaggagataattatttgtatacttactagcacctttccccacagccatatccggactgctggctttggcacagcatactctatcctagttcgtggcatcacctatactacccaagataataccttacacatagaaggtactaatgaatacttactgagctgtaagacaaacacactgtacttcagcaaaattttagtaaataatttgattcctatacggtaaactgaaaagagaataggctttgtcatcaaacttgggtcctaaccctaccacttagtagctatgcaactttcagcaagctacttaactctacaagcttaaattccctcatctttaatcaagggttgttgtgattataaaatatatatctggcacacaactgtactcaatagattttcaggtatttctcttccctttcccctgtatcaaaacttacaacgaaattcattgagctagattaaaaatcttactcataaccatacttaagcctatattttagaaactaaaatctactcaccctgatatactctgtggaatctggctcaaactgggcaaagcagagattgaggacatcaacatgcctgtcctggctatacatagtctaaaaccacacagcagagttagcatcacatgagaacactgaagttcagcacctgtcctgatgtcatgacaggcctgcccacccacatactggccactctgtgctccc

SEQ ID NO: 410 - DNA, 1101 bp, Homo sapiens
  SIMILAR (58)..(342): 431254mologous to Homo sapiens transformation-related protein,accession number L24521,Smith-Waterman Score=170.
aacatgggaaaatattttattttattttattttatttttatttttttatttttttgagacggagtctcgctctgtcaccccaggttcggactgcggactgcagtgtgcgcaatctcggctcactgcaagctccgcttcccgggttcacgccattctcctggcctcagcctcccgagtagctgggactacaggcgcccgctatccgcgcccggctaatttttttttgtattttttagtagagacaggggtttcaccttgttagccagggatgggtctcgatctcctgaactcatgatcccaccccgcctcggccttccaaagtgctgggattataggcgtgagccaccgcgcccggtcgagaccttttttttaaaagcagagaatgtaagagtgaactatatctaagaaactgctaaatactgtaattgtataagcccatctagtaaatgagaacaattcttaaaaatgaaaataaaattctttaagttttcctcaccaaattatagaaaataaaagaaaatccaatcaaacaaaccctctatgggactcaatagtatgatctaggaatattacagtttgaaaaagaaagtcaccaaagatgatagttcacaacaatgattggtctctctttccactttcccaggcaagacaaactaaaacctaccgcagcaaaaaaatattatcataaacctactagtgcatagaaaaaaataaattcttagtccatacatattctttataggcttgcttcttagtttttgaaggataactaattatatgttataaaattaagaacatctcaatatattctctctaaatggctaaaagttaattactaaccaaaatcaaaggccatccgatggtaagaacagaattatgagtgtcaaagttttacaggcacttcaaattaacaaggtattaatgaaaacacaaagtggaaacctggttctacagatctataaagttcctttaagacaaatgaaccataataagaatcattcataaaacaataaaaagctcctgtacccacaggcctgattatttaatacattctaattgtttatacacagactatttaaacaagtcaagcggacgcgtggg

SEQ ID NO: 411 - DNA, 509 bp, Homo sapiens
  misc_feature (1)...(509): n = a,t,c or g
ggcacgaggaanaannnnnnnnnnnnnnnnnnnnnnnnnnnnnnnnnnnnnnnnnnnnnnnnnnnnnnnnnnnaanaagacctgtactttgaacaattgctttgctgagatgttgttaatttgtagctttgccccagccactttgnnnnnnnnnnnnnnnnnnnnnnnnnnnnnnnnnnnnnnnnnnnnnnnnnnnnnnnnnnnnnnnnnnnnnnnnnnnnnnnnnnnnnnnnnnnnnnnnnnnnnnnnnnnnnnnnnnnnnnnnnnnnnnnnnnnnnnnnnnnnnnnnnnnnnnnnnnnnnnnnnnnnnnnnnnnnnnnnnnnnnnnnnnnnnnnnnnnnnnnnnnnnnnnnnnnnnnnnnnnnnnnnnnnnnnnnnnnnnnnnnnnnnnnnnnnnnnnnnnnnnnnnnnnnnnnnnnnnnnnnnnnnnnnnnnnnnnnnnnnnnnnnnnnnnnnnnnnnnnnnnnnnnnnnnnnnnnnnnnnnnnnnnnnnnnnnctgtctctgctt

SEQ ID NO: 412 - DNA, 490 bp, Homo sapiens
  misc_feature (1)...(490): n = a,t,c or g
gggaacaantttgagacctgattacgtgtggnggaatccnnnnnnnnnnnnnnnnnnnnnnnnnnnnnnnnnnnnnnnnnnnnnnnnnnnnnaaaaagacctgctctttaaacaattgctttgctgagatgttgctaatttgtagctttgccccagccactttgccccagccactttgannnnnnnnnnnnnnnnnnnnnnnnnnnnnnnnnnnnnnnnnnnnnnnnnnnnnnnnnnnnnnnnnnnnnnnnnnnnnnnnnnnnnnnnnnnnnnnnnnnnnnnnnnnnnnnnnnnnnnnnnnnnnnnnnnnnnnnnnnnnnnnnnnnnnnnnnnnnnnnnnnnnnnnnnnnnnnnnnnnnnnnnnnnnnnnnnnnnnnnnnnnnnnnnnnnnnnnnnnnnnnnnnnnnnnnnnnnnnnnnnnnnnnnnnnnnnnnnnnnnnnnnnnnnnnnnnnnnnnnnnnnnnnnnnnnnnnnnnnnnnnnntgtggaa

SEQ ID NO: 413 - DNA, 403 bp, Homo sapiens
  misc_feature (1)...(403): n = a,t,c or g
tttaactccccctcttcttaagagaattttaatgaagctgagataagaggcatatttacttgcagtttgccccattgttaccctggattcctccgagcgcacaagcttaccgcaaggctgactgtggatgtacttgggaatctctcgtcggctgtcctcaatgctcacgttcttagcataccttcaccctagagaaaggcccccacatcgggcgccagannnnnnnnnnnnnnnnnnnnnnnnnnnnnnnnnnnnnnnnnnnnnnnnnnnnnnnnnnnnnnnnnnnnnnnnnnnnnnnnnnnnnnnnnnnnnnnnnnnncaacagtgggcccaggggaccggcatcagcataccaaggacctgcaccagcaccggcctctgagttccctcagtttttattatt

SEQ ID NO: 414 - DNA, 447 bp, Homo sapiens
  SIMILAR (3)..(137): 841254mologous to Homo sapiens cytochrome c-like polypeptide,accession number S80864,Smith-Waterman Score=197.
  misc_feature (1)...(447): n = a,t,c or g
ataaatctggcctacgtgcacatccaggcatagtaccttcccttgaacttaattatgatatagactattttgctcacatgttttttgatgactttctccttattatcaccctgctctcctactacatttctttttgctgaaataatgaaaatcatattcaataaaaactgagggaactcataggccggtgcctgtgcaggtccttggtgtgctgagtgccggtcctctgggcccactgatgannnnnnnnnnnnnnnnnnnnnnnnnnnnnnnnnnnnnnnnnnnnnnnnnnnnnnnnnnnnnnnnnnnnnnnnnnnnnnnnnnnnnnnnnnntctctggtgcccaacatggggcccttctctagggtgaaggtactcttaaaacgtgagcattgtggacagccgaccagagaatcccgagttcgtacacagtcagccttgtggtac

SEQ ID NO: 415 - DNA, 612 bp, Homo sapiens
  SIMILAR (346)..(609): 511254mologous to Homo sapiens unnamed protein product,accession number AX088212,Smith-Waterman Score=198.
atggcctcttgggatgagaaagatctgaccgtcccccagccagacacccgtaaagggtctgtgctgagctaccttcaccctctgatagatcttgtccagacccaaggtctggatacatctatacacactgaagactcccagatgggtatcttcagctcagagctatctcctcacttcagatttgcatatccagctgtcttctcagcctctccacttggtgtctacttgctgggaggtgtggagggagaggcaccggtgggaaccggggccaacgggagttccgggtgggcatggtctcagtgggcccgcactcagcggctggccgtcccacaagccccaggcagcagggctccggacctgcagcccgccatgcctgagcctccccacgcccccagctcccccatctgggctcctgcgcaagggagcctccctgacaagtgccgccccctgctccatggtgcacagtcccatcaccacctaagggctgaggagtgcaggctcagggcactggactggcaggcggctccacctgtggccctggtgcgttatccattgggtgaagccagctgggctcctgagtctgatggggacttggagaatctttatgtctag

SEQ ID NO: 416 - DNA, 690 bp, Homo sapiens
  SIMILAR (166)..(687): 1001254mologous to Homo sapiens RCL,accession number AF040105,Smith-Waterman Score=901.
atggcctcgtgggatgagaaagacctgaccgtcccccagcccgacactcgtaaagggtctgtgctgaggtgtggactcagcagccgggctctgcgctgggccgggcggggtcacgtggccgcgggctggcgccccctggcgccggagagcgcgggcggctggggaatggctgctgccatggtgccggggcgcagcgagagctgggagcgcggggagcctggccgcccggccctgtacttctgcgggagcattcgcggcggacgcgaggacaggacgctgtacgagcggatcgtgtctcggctgcggcgattcgggacagtgctcaccgagcacgtggcggccgccgagctgggcgcgcgcggggaagaggctgctgggggtgacaggctcatccatgagcaggacctggagtggctgcagcaggcggacgtggtcgtggcagaagtgacacagccatccttgggtgtaggctatgagctgggccgggccgtggcctttaacaagcggatcctgtgcctgttccgcccgcagtctggccgcgtgctttcggccatgatccggggagcagcagatggctctcggttccaggtgtgggactatgaggagggagaggtggaggccctgctggatcgatacttcgaggctgatcctccagggcaggtggctgcctcccctgacccaaccacttga

SEQ ID NO: 417 - DNA, 975 bp, Homo sapiens
  SIMILAR (16)..(327): 911254mologous to Homo sapiens ADP-ribosylation factor-like protein 2,accession number L13687,Smith-Waterman Score=485.
atgtcaccacctggcagagaacagggacttctccttaacctgctgcgccccagtggcctggacaatgctggaaagacaaccatcctgaagaagttcaatggggaggacatcgacaccatctccccaacgctgggcttcaacatcaagaccctggagcaccgaggattcaagctgaacatctgggatgtgggtggccagaagtccctgcggtcctactggcggaactactttgagagcaccgatggcctcatctgggtagtggacagcgcagaccgccagcgcatgcaggactgccagcgggagctccagagcctgctggtggaggaggtgggcagctcctaccctttgtgtacatggcggtttttctcctatctcagaattgaacaaatgtacaatctggttttataccgagacattcagttcccagatttttgcttcaattctaacactgactggagcaaaggtctcaaaacccatgccaggtttgggaacaccagtctccacgtggcccacactgacagtaccaataccaccaattttgtggacgtctggaggggcagaaccaagagcttggcctgcttgctccagctctcaagtctgacttgcatctacactgcgggcaagatgcggctgcaagaccgcatcgccacgttcttcttcccaaaaggcatgatgctcaccacggctgcgctgatgctcttcttcttacacctgggcatcttcatcagagacgtgcacaacttctgcatcacctaccactatgaccacatgagctttcactacacggtcgtcctgatgttctcccaggtgatcagcatctgctgggctgccatggggtcactctatgctgagatgacagaaaacaagtacgtctgcttctccgccctgaccatcctgatgctcaacggagccatgttcttcaaccgcctgtccttggagtttctggccatcgagtaccgggaggagcaccactga

SEQ ID NO: 418 - DNA, 1926 bp, Homo sapiens
  SIMILAR (1926)..(718): 971254mologous to Homo sapiens putative p150,accession number U93563,Smith-Waterman Score=2131.
tcaaacatcctcctttagctctgagaagtttgttattaccgatcgtctgaagccttcttctctgaactcatcaaagttattctccgtcatctttgttctgttgctggtaaggggctgtgttccatcccccagctcaacacccgtgaagggtctgtgctgaggaggattagtaaaagaggaagtcctcttgcagttgagatagaggaaggccactgtctcctgcttgcccctgggaactgaatgtctcggtataaaacccgattgtacatttgttaaattctgagataggagaaaagcctcccttctccccactatcaccctgctcttctgccgcattcctcttgctgagatagtgaaaatagtaattaataaatactgagggaactcagagaccggtgccggtgcaggtcctgcatatgctgggctggtcccctgggcccacttttctttctctatactttgtgtcttacttcttttctcagtctctcgtcccgcgtggtcctcttcttccatgttctcactgtcaccaatctggtaaaggctcttcattctcttctttcttgtaatagcgacctcattgttcttgctccacctttcatccaaagcctcagcgaggctccatttgactgttgtaagatcagaatgagcatgcagacccactgagttgactggcaaagctttactatggataaccacagatgcaaccgcatgctgtgtcgacttccacaatggttgaactagtttacagtcccaccaacagtgtaaaagtgttcctatttctccacatgctctccagcacctggtgtttcctgacttttgaatgattgccattctaactggtgtgagatggtatctcatagtggttttgatttgcatttctctgatggccagtgatgataagcattttttcatgtgttttttggctgcataaatgtcttcttttgagaagtgtctgttcatgtccttcgcccactttttgatggggttgtttgtttttttcttgtaaatttgtttgagttcattgtagattctggatattagccctttgtcagatgagtaggttgcgaaaattttctcccattttgtaggttgcctgttcactctgatggtagtttcttttgctgtgcagaagctctttagtttaattagatcccatttgtcaattttgtcttttgttgccattgcttttggtgttttggacatgaagtccttgcccatgcctatgtcctgaatggtaatgcctgtgttttcttccggggtttttatggttttaggtctaacgtttaagtctttaatccatcttgaattgatttttgtataaggtgtaaggaagggatccagtttcagctttctacatatggctagccagttttcccagcaccatttattaaatagggaatcctttccccattgcttgtttttctcaggtttgtcaaagatcagatagttgtagatatgcggcgttatttctgagggctctgttctgttccattgatctatatctctgttttggtaccagtaccatgctgttttggttactgtagccttgtagtatagtttgaagtcaggtagtgtgatgcctccagctttgttcttttgccttaggattgacttggcgatgcaggcccttttttggttccatatgaactttaaagtagttttttccaattctgtgaagaaagtcattggtagctttatggggatggcattgaatctgtaaattaccttgggcaatatggccattttcacgatgttgattcttcctacccatgagcatggaatgttcttccatttgtttgtatcctcttttatttccttgagcagtggtttgtagttctccttgaagaggtccttcacatcccttgtaagttggattcctaggtattttattctctttgaagcaattgtgaatgggagttcactcat

SEQ ID NO: 419 - DNA, 678 bp, Homo sapiens
  SIMILAR (297)..(407): 831254mologous to Homo sapiens cytochrome c-like polypeptide,accession number S80864,Smith-Waterman Score=154.
agaattatggagaccaagaagtcctgcaatcttccacatgcaagctggcaacccaggaatgttggtggtgcactttgaaggcctgagagccagagagccaatggtgtagattctggtccaaatttgaagaccgtcccccagcccgacacccgtaaagggtctgtgctgaagtggattagtaaaagaggaaagcctcttgcagttgagatagaggaaagccactgtctgctgcctgcccctgagaactgaatgtctcggtataaaacctgattgtacatttgttcagttgtacacgtccagtcatagtaccttcccttgaacttcattatgacatagattctattgctcacatgtttgttgctgaccttctccttattatcaccctgctctcctactacattcctttttacttgggcttccaaaatgctgggattacaggcataaaccaccgtgcctggttctattagtacttttataaacagcatcgcgaaggtctgcagcttcacttctgaagccagcgagaccatgagcccaccgggaggaacgaagaactccagatgcgctgccttaagagctctaacactcaccgcgaagatctgcagcttcactcctccagggtccgtggcttcattcttgaagtcagtgagaccaagaacccaccaattccggacccacaac

SEQ ID NO: 420 - DNA, 611 bp, Homo sapiens
  misc_feature (1)...(611): n = a,t,c or g
ggaactggtgggttcttggtctcactgacttaagaaagaagccgcggaccctcggaaactcctggagggcaaaggcatgcctgccatcttcatcattggattaccaccacccaacactatcgggggacctgccctgataatcagtctacaggtgtatccagcagctccagagagacagcgaccagcangaaggggccatgatgatggaggtggttttgtcaaaacgaaaatggggatatgtagggaaaagaaagagagatcagactgttactgtgtctacatagaaagggaagacataagagactccattttgaaaaagacctgtactttaaacaattgctttgcttgagatgttgttaatctgtagctttgccccagccactttgccccaaccactttgacccaatctgggagctcattaaaaacatgtgttgtattgaattcaaggtttaaggcatgtagggctgtgccaggaccgtgccttgttaaccaaatgtttgcaagcagtatacttgggtaaaagtcatcatcattctcttgtcccaataaaccaggggcacaatgcactgtggaaagccgcagggacctctgcccttgaaagctgggtatta

SEQ ID NO: 421 - DNA, 1640 bp, Homo sapiens
  SIMILAR (1537)..(1403): 931254mologous to Homo sapiens Human TANGO 129 (T129) protein,accession number AAY41110,Smith-Waterman Score=235.
cctcactctcctagcccaggactttctgctaccccttccctttatagacctgctggaagaggagggggacgcacatctgctctagggccctgtacagaggcaagggtgtggctaattaccaaggaatggggccaggggtgacgggcacaggcccctcccctctgccaagcccagcctctgatgatacagagaatcccgtgggctcctaggatccagccagggcaggcacgggggtcggggcatccttcaggggagcaacatggcagcagggccaggggcggggctcagcctgctcctgtacacagtgcccgccggccacgtgcctcctcactggggcagacgctcccacctccaggccttggtctttgctgtctcgtctgctgggccattgcttctcggtcctcacagtcccagctgcagctccacctcctccaggaagccttcggaacctcccagggcagggccgcagtgtccttagactagaccgcccctcagatgaccaggttgctctcacttagccggaccacatagcggttctcctcggccttgttctctgctgggggcttcagccactttgtacggcttccgccacttcctagcagggcctgctgctcaggggggaggccaggctgtggggagtcagggagatcaccccacgagggcccagcctccgtgatggtcttcacctcagacaccattgaacttgtccgctgctcaggaattcgagccacgcggaacctgcccacagacaagatggtgatctcgccctgacgccctgccttggccccggccttgggaaccctggtcgggttaggcagaaggctgggaacaggagtagtggcggctacagcctcaggggacagcagcacctcgggccacttcttctggctacagcgggagcagcaggggccagagagcgaggccaggccctgcacggtgtggagatggtggcggtgcgggcagatgtgtggcacgttcgggggcgctggcggcagcttggacacaggcctgtggctcgtctgcaccagctgtttgctgtggtactctttcagcagctcctccagggccgcagcattctctttcttctctgtgatcaagcgcaccaggaccccaatggtgtcctcattggcatcctcagtccggtaggcagggttgattccactgcctccacctccagggccgggcccgacctccttgtgcgccgtgcagtggtagcccttccgcttgaggaggttgcacaccaggatgcccaacagccccatgaggcagaagacagggacgatggcgatgaccgcgtactgggcggctgtctcctctgggccacctgcccgggtgccgttcccaggctgccgtgtctcaccaccgctgctggcccctgctgccacctccacgccacgtcgggcccgccgcccccactcaggtcgggctcctccccaggtgggcactgccaaagggttgttgatgtcagggtggcgagaggccagggcagcagcataaggaagcaggacaggggccggcacagcagacttggcttcatcctcaggcccctggtggtcgccggcccagccacactggatggggaggaggggccccaggggggtagcagagaaggaacttggcttagaggccactcctcccat

SEQ ID NO: 422 - DNA, 1752 bp, Homo sapiens
  SIMILAR (585)..(1175): 561254mologous to Homo sapiens cytochrome c-like polypeptide,accession number S80864,Smith-Waterman Score=448.
ggagaactagaccaggaggcactggtgtgaccctggagtagatggaactgtttgtgcatgtgtctttcttaccttccattctcataaagaattagcacattccccacatacaccctggccagactgtgtctttgggactgcagcactaaggtgtgtttttgtttgttaacttattcccagtgcctgtgttgaccagggaggctttggggaataaaggtacataaaggtcttggagcctgggatgagcctgtggtcaaggagatgggcaggcagtgtccttgaaatttgggaatgtgactcacactctgcctgtaggggggaagaaaagagagatccagactgtttaccggggtctatgttaggaaaggggaaggacagaagagactgcattttgataaagacctgcactttaaacaattgctttgctgagatgttgttaatttgtagctttgccccagccactttgccccagccactttgacccaaccactttgatccaatctggagctcacaaaaacatgtgttgtataaaatcaaggtttaaaagggacctagggctgtgcaggacgtgccttgttaacaaaatgtttacaagtagtatacttggtaaaagtcattgccattctctagtctcaataaaccaggggcacaatgcaccgtggaaagccgcaggagcctctgcccttcagagcagggtattgtccaaggtttctccccatgtgatagtctgaaatatggcctcatgggatgagaaagacctgactgtcccccagcctgacacccgtaaagggtctgtgctgaggtggattagtcaaagaggaaagcctcttgcagttgagatggaggaaggccactgtctcctgtctgcccctgggaactgaatgtctcggtataaaaccccgattgtacatttgttcaattctgagataggagaaaaaccggccctatggtgggaggtgagacatgttttgcagtaatgctgccttggttaattcctttaactcccactgagatgtttggggtggagagaaacataaatctgggcttacgtgcacatcccagtcatagtactttccccttgaacttaattatgatatagattcttttgctcacatgttttttttgttgaccttctccttattatcaccctgctctcctactacattcctttttgctgaaataatgaaaaataataatcaataaaaactgagggaactcagaggccggtgccagtgcaggtccttggtgtgctgtgtgtcggtgcccctggacccactgatgtttctctatactttgtctctgtgtcttatttcttttctcagtctctcgtcccacccaactagaaatacccacaggtgtggaggggcaggccaccccttcagtgagggaaagaatcagtgcctaataaatgtaggcacctaccccaccactccaacttgtgctgtctgaagccttgggcacaatgggcaattcgtgagagtaaggaagtggtggggagggacaagagagagaatcatgaggaactgtgcttagttttgggaaggaggcagccccagaaaagggcactcctccccgtgggcttggaagtgtcactttttacatgacagtgtaagatatttggttgaattgtgtgtgtgtgtttgtgtttgcatatatgtctatattacatgtacatgtagattatatataatatacaatgtactttttccacgtgtatgtataatcaacaataaaatgttttaaaattgagat

SEQ ID NO: 423 - DNA, 1078 bp, Homo sapiens
  SIMILAR (66)..(914): 441254mologous to Homo sapiens 3-methyl-adenine DNA glycosylase,accession number L10752,Smith-Waterman Score=410.
  misc_feature (1)...(1078): n = a,t,c or g
gcacgagggctgctgggctccgcgccggggtccgagtcccacgaagccccggcccgagccgccggatgcccgcgcgcagcggggcccagttttgccgacggatggggcaaaagaagcagcgaccagctagagcagggcagccacacagctcgtccgacgcagcccagggcacctgcagagcagccacacagctcgtcgaaatccagcccaggcaccttgccccagggagcgctgcttgnggaccgcccaccactccgggcccataccgcaggcatctatttctcaagcccaaagggccaccttacccgactgggggtcggagttcttcgaccagccggcagtccccctggcccgggcatttctgggacaggtcctagtccggcgacttcctaattggcacagaactccgagggccgcatcgttgggagaccgaggcattaccttggggccagaggactgaagccgccccacttcaagggggttggcccggcaagaccccccgcaaaccgaggcatgtttcattgaaagcccggggaccctgggtcgtgtacatcatttacggcatgtacttctgcatgaacatctccagccagggggacggggctttgcgtctttcttgcgagcactggaagcccctggaaagtcttggagaccaatgcgtcagcttcgcagccaccctccgggaaaggcacccgccaagcccgtgtcctcaaaggaccgccgaagctctgcagtgggcccctccaagctggtgccaggcccctgcccatcaacaagagcttttgaccagaagggaccttggcacaggatgaagctgtatggctggagcgtggtcccctggagcccagtgagccggctgtagttggcagccaccccgggtgggcgtcggccatgcaggggagtgggcccggaaaacccctccgcttctatgttccggggcagcccctgggccagtgtggtcgacagagtggctgagcaggacacacaggcctgcgcaaagggcctgcccagacaagattttttacattgtttaaaaacccgaataaatgttttatttctggaaaaaaaaaaaaaaaaa

SEQ ID NO: 424 - DNA, 654 bp, Homo sapiens; identical to SEQ ID NO: 244
  SIMILAR (24)..(449): 1001254mologous to Homo sapiens alpha globin,accession number V00488,Smith-Waterman Score=733.
  misc_feature (1)...(654): n = a,t,c or g

SEQ ID NO: 425 - DNA, 666 bp, Homo sapiens
  SIMILAR (187)..(465): 411254mologous to Papio cynocephalus anubis alpha-1 globin,accession number X05289,Smith-Waterman Score=81.
  misc_feature (1)...(666): n = a,t,c or g
atcgagaccatattccatgtggnggaattccacagactcagagagaacccacccatggttgctgtctcctgcccgacaaagaccaacgtcaaggccggcttggggtaaggtcggcgcgcacgctgtgcgcagtatgtgtgcggaggccctggagaggatgttcctgtccttccccaccaaccaagacctacttcccgcacttcgaccttgagccacggtttctgcccaggttaaagggccacgggaaagaaggtggacgacagcgctgaccaaacgccgtggccaacgtgggacgacatgcccaaacggcgttgtccgccctgaagcgacctgcacgcgcacaagctttcgggttggacccggttcaacttcaaagctcctaaagccacttgccttgctgggtgacccttggccgcccacctccccggccgagtttcaaccccttgcggttgcaaggcttccctggggacaaatttcctggggtttttgttgaagcaaccttgcttgaactttcaaataacctttaaagttggaagcttcggttgggcaatgctttctttggccctttgggcttccccccagcccctcctcccctttcctgcacccgtacccccgtggtctttgaaataaagtcttgagtgggcggcaaaaaaaaaaaaaaaaaaa

SEQ ID NO: 426 - DNA, 574 bp, Homo sapiens
  SIMILAR (1)..(327): 981254mologous to Homo sapiens DAZ associated protein 2,accession number BC002334,Smith-Waterman Score=574.
cctgggaatccagtatacctcaagaccttgcatcttcctcaggctccaccctataccgatgctccacctgcctactcagagctctatcgtccgagctttgtgcacccaggggctgccacagtccccaccatgtcagccgcatttcctggagcctctctgtatcttcccatggcccagtctgtggctgttgggcctttaggttccacaatccccatggcttattatccagtcggtcccatctatccacctggctccacagtgctggtggaaggagggtatgatgcaggtgccagatttggagctggggctactgctggcaacattcctgtaaaagaagatcaagatcacgaccgagagcagggtgaggaagacaacggtgataacaacttggaaaggagagggaaaatgtagagatgtttcaggattgaggatgtctcagtagttcctggagtcatctgatttagtcactgttttcgtaaagatcctcttgttttcattaactagtgtccacttccatccaaacccatgttcccccaccaaccccaatttccatggcacataataaaaaaaaaaa

SEQ ID NO: 427 - DNA, 2163 bp, Homo sapiens
  SIMILAR (185)..(610): 391254mologous to Homo sapiens DAZ associated protein 2,accession number BC002334,Smith-Waterman Score=149.
gggggtgacacggaagtagctccgaacaggaagaggacgaaaaaaataaccagtccgcgacgccgatacattccggacccgcaaccaccatgaacagcataggttaatatccaacacagcctgacctaccctgtgcagtctcctgggaatccagtataccctcagacctttgaatctttcctcaggctccaccctatacccgatgctccacctgcctactcagagctctatcgtccgagctttgtgcacccaggggctgccacagtccccaccatgtcagccgcatttcctggaagcctctctgtatcttcccatggcccaagtctgtggctgttgggcctttaaggttccacaatccccaatggcttattatccagtcggtcccatctaatccaaccttggctccacaagtgcttggtgggaaaggagggtatgatgcaggtggcaagattttggagctggtgctatatggtggcaacatatccttctccaccttcctgggatgccctccccaatgctgctcagcttgcagtcatgcagggagccaacgtcctcgtaactcagcaggaaggggaacttcttcatgggtggttcagatggtggctacacccatctggtgaggaaccaaggccacctttgtgcccgggaaaagacatcacatacccttcagcacttctcacaatgtaactgctttagtcatattaacctgaagttgcagtttagacacatgttgttggggtgtctttctggtgcccaaactttcaggcacttttcaaatttaataaggaaccatgtaatggtagcagtacctccctaaagcattttgaggtaggggaggtatccattcataaaatgaatgtgggtgaagccgccctaaggattttcctttaatttctctggagtaatactgtaccatactggtctttgcttttagtaataaaacatcaaattaggtttggagggaactttgatcttcctaagaattaaagttgccaaattattctgattggtctttaatctcctttaaagtctttgatatatattacttgttataaatgggaacgcattagttgtctgcccttttcctttccatcccttgccccacccatcccatctccaaccctagtcttccatttcctcccgccagtctccaattgaaatcaatgggtgcaggacagaaagccagtcaggactaatttccttcctttcctcgcacttctccccactcggtcatcttttaactagtgttttcacaaggatcctctgaaaccctctctgtgccccaagtcacagatgcccattaacttctgctttcgtatctcctcagggcaaaagtgggaggggtgccttatggggccctcctcataggttggtctctggcatacacgaacctaacccaaatttgctttgggtgccagaaaaactgggcctatgtttggaaccaaggatgtcgtccaacctgtactgtgaaccaaccagtggggtttaaaaatatgaggggccaaggaggaggatgccattccaaaaagcttggattgatgtgttcaagagctaaattaagggggagttttcagatccaaaaaactgggttacccatttttttgcccagagtgtctggatgccggcccactcattcgggctccccccagaattcccttagactggggttaaatggggtccatattggtgaatgtctcacctacaaaaatgacttgagtcccagtgaaatctccattaggggtttaagaatatttccagggatccctaatggtttttgatttttgttttctgaaattgggattttattttattttaatcttataatttcagttcatcctaaattgtgtgttctgtacgatgtgatgtttgactgtaccatttgactgttatgggaagttcagcgttggtatgtctcttctctacactgtgggtgcaccttaacttggtggaatttttatactaaaaaatgtagggattaaagactattttgaagatttgaataaagtgatgaagttgcattacacctcactgcaaggattctttacttagcttgtttttagatttcttctatatatattttatttatatcccatctagaattcagctaggtgctgctgctgctctgtttcctttgatgacgctttgaaataaaggcaggagtac

SEQ ID NO: 428 - DNA, 367 bp, Homo sapiens
  SIMILAR (1)..(366): 861254mologous to Homo sapiens profilin II,accession number L10678,Smith-Waterman Score=585.
ggcacgaggagctacgtggataacctgatgtgcgatggctgctgccaggaggccggcattgggggctactgcgacgccaaatacgtctgggcagccacggccgggggcgtctttcagagcattacgccaatagaaatagatatgattgtaggaaaagaccgggaaggtttctttaccaacggtttgactcttggcgcgaagaaatgctcagtgatcagagatagtctatacgtcgatggtgactgcacaatggacatccggacaaagagtcaagcattggttatagtcatgggaaaggaaggtgtccacggaggcacacttaacaagaaagcatatgaactcgctttatacctgaggaggtctgatg

SEQ ID NO: 429 - DNA, 2922 bp, Homo sapiens
  SIMILAR (1639)..(2595): 881254mologous to Mus musculus putative,accession number AK004922,Smith-Waterman Score=1495.
  misc_feature (1)...(2922): n = a,t,c or g
atgaagcttctggaggaacaatctggcagcaccatttgctgttcagccatattcgctgtactgcagcctccgctgctgatacccaggcaaaaagggtgtggagtggacctccagcaaactccaacagacctgcagctgagggtcctgactgttagaaggaaaattatcaaacaaaaaggacatccacaccaaaaccccatctgtacttcaccatcatcaaagaccaaaggagatgagtatgatgtatgtgccatttgtttggatgagtatgaagatggagacaaactcagaatccttccctgttcccatgcttatcactgcaagtgtgtagacccttggctaactaaaaccaaaaaaacctgtccagtgtgcaagcaaaaagttgttccttctcaaggcgattcagactctgacacagacagtagtcaagaagaaaatgaagtgacagaacatacccctttactgagacctttagcttctgtcagtgcccagtcatttggggctttatcggaatcccgctcacatcagaacatgacagaatcttcagactatgaggaagacgacaatgaagatactgacagtagtgatgcagaaaatgaaattaatgaacatgatgtcgtggncaatgcgaagggctcgaagatggccggttggcagagctacgtggataacctgatgtgcgatggctgctgccaggaggccgccattgtcggctactgcgacgccaaatacgtctgggcagccacggccgggggcgtctttcagagcattacgccaatagaaatagatatgattgtaggaaaagaccgggaaggtttctttaccaacggtttgactcttggcgcgaagaaatgctcagtgatcagagatagtctatacgtcgatggtgactgcacaatggacatccggacaaagagtcaaggtggggagccaacatacaatgtggctgtcggcagagctggtagaggtgatgcgtgtcaccaccccatggaagatttgatggacatggacatgagccctctgaggccccagaactatcttttcagttgtcaacaaaaggccgacaaagattatcactttaaggtgaataatgatgaaaatgagcaccagttatctttaagaacggtgatttcagggactggagcaaaggataaattgcatattgttgaaacagaggcaatgaattatgaaggcagtccgattaaagtaacactggcaactttgaaaatgtctgtacagccaatggtttctgggggccttgaaataacaccactggtgatcttacggttgaagtgtgcttcagagccagtgcatattagtggacagcacttagtagctgtggaggaagatgcagagtcagaagatgaagaagaggagtatgtgaaactcaagtttatctggaaagcgatctgcccccggaggtggcagaaaagttccacagaaaaaaaggaagaagagaaatctaaaagtctggaaaacatatttgcgctaataatcgatgaaaatttccttggctttgttagagatctagacatccaaatccaagaagctcaaagaacacctgggaaattcatcacaaaaagaacaccctctaggcacataatcatcaggttacttaaagtcaagacaaaggaaagaatcttaagagttgtgaggcaaaagcatcagctcaacgctgttcggcaggaagtaaaatctctttgtggcttggaagcctctcatgttcctgcagaggaagctctttctggggctggtgagccctatgacatcatcgacagcagtgatgagatggatgcccaggaggaaaacatccatgagagaactgtctccagaaaaaagaaaagcaagagacacaaagaagaactggacggggctggaggagaagagtatcccatggatatttggctattgctggcctcctatatccgtcctgaggacattgtgaatttttccctgatttgtaagaatgcctggactgtcacttgcactgctgccttttggaccaggttgtaccgaaggcactacacgctggatgcttccctgcctttgcgtctgcgaccagagtcaatggagaagctgcactgtctccgggcttgtgtgatccgatctctgtaccatatgtatgagccatttgctgctcgaatctccaagaatccagccattccagaaagcacccccagcacattaaagaattccaaatgcttacttttctggtgcagaaagattgttgggaacagacaggaaccaatgtgggaattcaacttcaagttcaaaaaacagtcccctaggttaaagagcaagtgtacaggaggattgcagcctcccgttcagtacgaagatgttcataccaatccagaccaggactgctgcctactgcaggtcaccaccctcaatttcatctttattccgattgtcatgggaatgatatttactctgtttactatcaatgtgagcacggacatgcggcatcatcgagtgagactggtgttccaagattcccctgtccatggtggtcggaaactgcgcagtgaacagggtgtgcaagtcatcctggacccagtgcacagcgttcggctctttgactgtcaggcaccgtgtatgaaatctaacaatgcgctcatcgtcatcctcggcaccgtcaccctggatgctgtaggcataggcttggttatgccggtactgccgggcctcttgcgggatatcgtccattccgacagcatcgccagtcactatggcgtgctgctagcgctatatgcgttgatgcaatttctatgcgcacccgttctcggagcactgtccgaccgctttggccgccgcccagtcctgctcgcttcgctacttggagccactatcgactacgcgatcatggcgaccacacccgtcctgtggatctacccactagtcaattcaccatcttgttga

SEQ ID NO: 430 - DNA, 1885 bp, Homo sapiens
  SIMILAR (53)..(490): 481254mologous to Homo sapiens profilin II,accession number L10678,Smith-Waterman Score=245.
acatcattacgccaagcttggcacgagggcagtgcgaagggctcgaagatgtgccggttggcagagctacgtggataacctgatgtgcgatggctgctgccaggaggccgccattgccggctactgcgacgccaaatacgtctgggcagccacggccgggggcgtcgtttcagagcattacgccaatagaaatagatatgattgtaggaaaagacccggaaaggtttcttttaccagcggtttgactcttggcgcagaagaaatgctcagtgatcagagatagtctatacgtccgatggtgactgcacaatggacatccgggacaaacagtcaaaggtggggagccaacaatacaatgtggcttgtcggcagatctgggtagagcattggttattagttatggggaaaggaaaggtgttccaccggaggcacactttaacaaggaaagcatatgaaactccgctttatacctgaagggaggtctgatgtgttaagcagcctctccccatctacctaggcaactgtctttcatcaacaaccctaattatgggtcacaatgctacccaaactgtaggatggtagctaatttttctttacctattttctaaatgtcatggattcctgtttgcccaatgggatcatttgtatgtttaaccactgtatggtaaaccaacccttatctgggcaacataattgcagcacaataatgatttgcatgataccttgaaatctcgggggagggggcatgccaagttggggcatcactttgtcttaggcaattaatggggatattgattacttaaaattaagtttaatatttaagcaaggtgccggttgtacaatctctgatccagtgtcttttcagcactttgagcatttacttggctcatttagtcttccttttgtagcgcatggttgggaggaaaaagtgcatgcatcattccttcactcttctctttttcccgccccccccttcccttcgcacataggcatttgggttgcttccatctttttttatggcagtgcctgtttttttttttaaccaatttaaaattccctttttgtttgatgaggctattgaggagctggcagtagttttgcttttaggactgggcgttgcacttgagcagagacaaacctttattcatagtgtctccaggacatatgaagaggtgcaatggcaaaacaagagcaaaaagcacttctccccattgaccttacagtaaccatactgattgaatccccaggggacattccatcattgcaatagctcagatttttcttccttttttctttgcacaccagcctctacctccttaggtaaaaatggtaaaaaggctgcccattatgggacattagggtatccccaaccataacccatctgggagtgtgtcccagtttgtttctttcatagggaccaaatttttatttgccagcttgagttttttataggaagttgcatttatgggggaccgggctgtcttgtgagaaattttttctcatatgtattctgtgccatactattcgttaaaatgaactgttgctattgtgagatggattttaaactgaccctattaagggtttcctttccgaaatggcacctactttagggtattcctagtatttgccttctattgtttgggccttgtggataatgtacgagatttaaaaacaaatcttgttgctgatttgtccatttctttccctgcactttgttacatctgggatacagttctaactccatctgatttaataatggcatttaaaaaaatgccaataactattaaacaccttgtttacagacagatgaaataaatttattccaaccaaaaaaaaacggacgcgtgagtcgacccaggaatccagacgtactgcaggcgtcgat

SEQ ID NO: 431 - DNA, 486 bp, Homo sapiens
  SIMILAR (296)..(418): 951254mologous to Homo sapiens cytokeratin 18 (232 AA),accession number X12876,Smith-Waterman Score=196.
catgtgtctgttcactggtatccactgagcactgggccgttgctccgtgggtgctcctgtgtcttcaagggagtaacagttacagaggtctcccccttgaagaaagcaaactaagtattgtccctagctgtacttagtatgcaaatgaagtttggccttgagtttcccttttctggaggaagaggctgagggtgatttggagataaaggtagaggtcaggaggctttttccctctacctttcttgtctcccttctactccacggggctgtttataacttgggcttggtcttctgttacagtcttggtgatgccttggacagcagcaactccatgcaaaccatccaaaagaccaccacccgccggatagtggatggcaaagtggtgtctgagaccaatgacaccaaagttctgaggcattaagccagcagaagcagggtaccctttggggagcaggaggccaataaaaagttcagagttcaaaaaaa

SEQ ID NO: 432 - DNA, 533 bp, Homo sapiens
  SIMILAR (531)..(109): 561254mologous to Homo sapiens Neuron-associated protein,accession number AAB01395,Smith-Waterman Score=335.
tttttttttttttttttccttaatttgggggaggatatattccaacttgggggaagggtgaaggcattttagctctgaagctcaatcatgacatttctagagagttctgcagtgcccccgcattggacaggacaggatggaagagtgtgctggactggctggattccccagtgtcaagctggcagcgctcctgaggttcttgagtgtttatcaactcagcaggtcaaaagtctgcagacactgggtggagcagcagtaagccacaaaactaacatttgtcttcctttcaccaagctgtggtaggtatgatacagccctctcatagccaattcctgatgaaaaggaaagcagcttcacctcggaaacttgaatgggagcaccacagccactgcacccgatgactttattgtacagatgagatgggaagcctttcaggtgagtgttgttatccacgtatacatactgtagttctcgagatcgacctaaatcaagtggcaaaaatgcaagacggtttccagcccatgggagctcat

SEQ ID NO: 433 - DNA, 1482 bp, Homo sapiens; identical to SEQ ID NO: 377
  SIMILAR (870)..(4): 991254mologous to Homo sapiens Amino acid sequence of Smad1 interactor protein clone S1+19,accession number AAB07854,Smith- Waterman Score=1528.

SEQ ID NO: 434 - DNA, 1110 bp, Homo sapiens
  SIMILAR (61)..(1107): 881254mologous to Homo sapiens keratin 18 precursor,accession number M26326,Smith-Waterman Score=1532.
atgggccaccatcgtcggcaaagcctgagtcctgtcctatctctctcctccccggacagcatgagcttcaccactcggtccaccttctccaccaactaccagtcactgggctctgtccaggcgcccagctacggcgcccggccggtcagcagcgcggccagcgtctatgcaggcgccgggggctctggttcccggatctccgtgtcccgctccaccagcttccggggtggcatggggcctgggggcctggccgcggggatggctgggggtctggcaggaatgggaggcatccagaacaagaagaccatgcaaagcctgaacgaccgcctggcctcttacctggacagagtgaggagcctggagactgagaaccgtaggctggagagcaaaatccgggagcacttggagaataagggaccccaggtcaaagactggagccattactgcaagaccatcgaggacctgagggctcagatcttcgcaaatactgtggacaatgcctgcatcgttctgcatattgacaatgcccgtcttgctgctgatgactttagagtcaagtatgagacacagctggcgatgcgccagtctgtggagaacgacatccatgggctccgcaagctggagacagagattgaggctctcagggaggagctgctcttcatgaagaaccacgaagaggaagtaaaaggcctacaagcccagattgccagctttaggttgaccgtggaggtagatgcccccaaatctcaggacctcgccaagatcatggcagacatccgggccaaatatgacgagctggctgggaagaaccgagaggagctagacaaatactggcctcagcagtttgaggagaacaccacagtggtcaccacacagtccgccgaggttggagctgctgagatgacgctcacagagctgagacgtacagtccagtccttggagatcgacctggactccatgagaaatctgaaggccagcttggagaacaacccgagggaggtggaggcccgctactcccttcagatggtgcagctcatcgggatcctgctgcacctggagtcagagctggcacagacccgggcagagagacagcgccaggcccaggagtaa

SEQ ID NO: 435 - DNA, 1651 bp, Homo sapiens
  SIMILAR (273)..(971): 481254mologous to Homo sapiens keratin 18 precursor,accession number M26326,Smith-Waterman Score=336.
  misc_feature (1)...(1651): n = a,t,c or g
ggaggccnnnnnaactgaaactgaggccctcagcagccgcattcccggtcgacccacgcgtccggtcgtccgcaaagcctgagtcctgtcctttctctctccccggacagcatgagcttcaccactcgctccaccttctccaccaactaccggtccctgggctctgtccaggcgcccagctacggcgcccggccggtcagcagcgcggccagcgtctatgcaggcgctgggggctctggatcccggatctccgcgtcccgctccaccagcttcaggggcggcatggggtccgggggcctggccacgggagtgagccgggggtcatggcaggaatgggaggcatccagaacgagaaggagaccatgcaaagcctgaacgaccgcctggcctcttacctggacagagtgaggagcctggagaccgagaaccggaggcttggagagcaaaatccgggaagcacttggagaagaagggaccccaaggtcagagactggagccattacttcaagattcatcgaggaccttgagggctcagatctttcgcaaatacttgtggaacaatgccccgcatccgttctgcaagaatcgacaatgccctgtcttgcctgctgatgactttaagagtcaagtatgaagacagaagctggcccatgtgcccagtcttgtggagaaccgacatccatgggctccccaaggtccatttgatgacaccaattatcacaccgacttgcagctggagacagagatccgaggctctcaaaggaggagctgctctttcaatgaagaaggaaccacgaagaaggaagttaaaaggccttaagacgccaaattacgcagctctgggatgaacgcgtggaggttagattgcccccaaatctcaggacctcgccaaagatcatggcagacatccggggcccaaatatgacgagctgggctcgaaaaagaacccgagagggagcctagacaagtacttggtctcagcagatttgaggagagcaccacaggtggttcaccacaaaaatctgctgaggttggaagctgttgagacgcacgctcacagaagcttgaaacgtacagttccagtccttggaagatcgaccttggactccatgaagaaatctgaaaggccagctttggagaacaagcttaagggaaggttgaaggcccgcttacgcccttaccagattggagccagctccaacgggatccttgcttgcaccttgagtcagagcttggcacagacccgggcaagagggacagcggccaggcccagggagtatgaggccctgctgaaccatcaagggtcaagctggaggctgagatcgccaccttaccgccgccttgctggaagatggcgaggactttaatcttggtgatgccttggacagcagcaactccatgcaaaccatccaaaagaccaccacccgccggatagtggatggcaaagtggtgtctgagaccaatgacaccaaagttctgaggcattaagccagcagaagcagggtagcctttggggggcagggaggccaataaaaagttcagagttcaaaaaaaaaaggggagataccatgatcacgaaggtggttttcccagggcgaggcttatccattgcactccggatgtgctgacccctgcgatttcccgtcgacgc

SEQ ID NO: 436 - DNA, 444 bp, Homo sapiens
  SIMILAR (54)..(365): 981254mologous to Homo sapiens Similar to dynamitin (dynactin complex 50 kD subunit),accession number BC000718,Smith-Waterman Score=532.
  misc_feature (1)...(444): n = a,t,c or g
ccgtccccatagagccngccttcgtgaanttttgacccgcgctgcaggaattcggcacgagcaggaatgagccagatgtttatgaaactagcgacctacctgaggatgatcaagcggagttcgatgcggaggagctgacaagcacaagtgtggaacacatcattgtcaatcctaatgctgcctatgacaagttcaaggacaagagagtggggacaaagggacttgatttctcagatcgtattggaaaaaccaagaggacaggatatgaatctggagaatatgagatgcttggagagggtctgggagtgaaggagacaccccagcaaaagtaccagcgcctactgcatgaggtccaagagctgactgtaatactgtacaactgtttctgaccattaaatgctgttgtactctgnnnnnnnnnnnnnnnnnnnnnnnctcccggca

SEQ ID NO: 437 - DNA, 485 bp, Homo sapiens
  SIMILAR (225)..(431): 981254mologous to Homo sapiens Similar to dynamitin (dynactin complex 50 kD subunit),accession number BC000718,Smith-Waterman Score=339.
gcccgggacccgaacccagcctctcccctacccgaacaccggccccggctccaccgaggcccgggtcccccagcccgtctcgccgccgccatgcgaccgctaaatacgccgaccttcccggcattgcaggaatgagccagatgtttatgaaactagcgacctacctgaggatgatcaagcggagttcgatgcggaggagctgacaacacaagtgtggaaccatcattgtcaccatcaagcagctgcacgagcaagccatgcagtttggtcagctcctgacacacttggataccacccagcagatgattgctaattccttgaaggacaataccaccctcttgacccaggtgcagacaaccatgcgtgaaaacctggccacagttgaggggaactttgccagcattgatgaacggatgaagaagctgggaaagtgagcacatttgggagctggagaacaggggttatcctacccctgtgaactctgt

SEQ ID NO: 438 - DNA, 447 bp, Homo sapiens
  SIMILAR (12)..(329): 981254mologous to Homo sapiens Similar to dynamitin (dynactin complex 50 kD subunit),accession number BC000718,Smith-Waterman Score=541.
aggggaactttgccaggaatgagccagatgtttatgaaactagcgacctacctgaggatgatcaagcggagttcgatgcggaggagctgacaagcacaagtgtggaacacatcattgtcaatcctaatgctgcctatgacaagttcaaggacaagagagtggggacaaagggacttgatttctcagatcgtattggaaaaaccaagaggacaggatatgaatctggagaatatgagatgcttggagagggtctgggagtgaaggagacaccccagcaaaagtaccagcgcctactgcatgaggtccaagagctgacaactcatgtccaatactgctttgcctggtgtggggaaggattgggtcttgtcccccaacacagcttctgtggctgactgtaatactgtacaactgtttctgaccattaaatgctgttgtactctgaaaaaa

SEQ ID NO: 439 - DNA, 1317 bp, Homo sapiens
  SIMILAR (187)..(1314): 961254mologous to Homo sapiens Similar to dynamitin (dynactin complex 50 kD subunit),accession number BC000718,Smith-Waterman Score=1840.
atggcggaccctaaatacgccgaccttcccggcattcccatcctccgcccaagggctcccgccgctcgttctccgatcggcctcagcaccccccgaactcttctgacccgactgggccgggccgccggacggcaccaggccccctttccggcagtcgcggtagctcggcccagaaatcgactccgggccaggaatgagccagatgtttatgaaactagcgacctacctgaggatgatcaagcggagttcgatgcggaggagctgacaagcacaagtgtggaacacatcattgtcaatcctaatgctgcctatgacaagttcaaggacaagagagtggggacaaagggacttgatttctcagatcgtattggaaaaaccaagaggacaggatatgaatctggagaatatgagatgcttggagagggtctgggagtgaaggagacaccccagcaaaagtaccagcgcctactgcatgaggtccaagagctgacaactgaagttgaaaaaatcaagacgacagtgaaggagtcagccacagaggagaagctgacccctgtgttgctggctaaacagctggcagccctgaagcagcagctggttgcttcccacctggagaagctgctgggaccagatgctgcaatcaaccttaccgaccccgatggcgccctggctaagcgcctactactgcagctggaagcaacaaagaacagcaaagggggatcagggggaaaaaccactgggacccccccagatagcagccttgtcacttatgaactacattctcggcctgagcaggacaagttctctcaagctgccaaagtcgcagaacttgaaaagcgcctgacagagctggagacagctgtacgttgtgatcaggatgctcaggagactgtagagctgttgcaagcaaaggtgagcgccctagaccttgcagttttggatcaagtggaggctcggctacagagtgtcctgggaaaggtgaacgagattgccaagcataaagcctctgtagaagatgcagatacacaaagcaaggtgcaccagctatatgaaactatacagcgctggagccccattgcctccaccctccctgagctggtgcagagacttgtcaccatcaagcagctgcacgagcaagccatgcagtttggtcagctcctgacacacttggataccacccagcagatgattgctaattccttgaaggacaataccaccctcttgacccaggtgcagacaaccatgcgtgaaaacctggccacagttgaggggaactttgccagcattgatgaacggatgaagaagctgggaaagtga

SEQ ID NO: 440 - DNA, 410 bp, Homo sapiens
  SIMILAR (77)..(190): 971254mologous to Homo sapiens dynamitin,accession number U50733,Smith-Waterman Score=195.
tttcgtttttcccctacccgaacaccggccccggctctttcgttgtccgggtcccccagcccgtctcgccgccgccatggcggaccctaaatacgccgaccttcccggcattgccaggaatgagccaggtgtttatgaaactagcgacctacctgaggatgatcaagcggagttcgatgcgtttgcacaagtaagaccattcaatgcttcttctctgcatgtttttttcatctgccatctcgcatgcaatgctctgccactgtgctattgttgtagctaatcgttttaaattccagtgagtccctggctgggtcactgaggggcctgctggccttatgtttaaagatcattaatcaagggttagaaacagctatgatccatgaatcattgtctcttccccttgtgaggtc

SEQ ID NO: 441 - DNA, 2013 bp, Homo sapiens
  SIMILAR (578)..(1360): 361254mologous to Homo sapiens dynamitin,accession number U50733,Smith-Waterman Score=173.
  misc_feature (1)...(2013): n = a,t,c or g
agacttcctgctcatctgccgctccctttgccgccgccttagcccgggacccgaacccagcctctcccctacccgaacaccggccccggctccaccgaggcccgggtcccccagcccgtctcgccgccgccatggcggaccctaaatacgccgaccttaccggcattgccaggaatgatccagatgtttatgaaactagcgacctacctgaggatgatcatgcggagttcgatgcgtttgcacaagagctggaggagctgacaagcacaagtgtgggaacacattcattgtcaatcctaatgctgcctatggacaagttcaaggacaagagagtgggggacaaagggatttgattttctcagatcgtattgggaaaaaccaagaggacaggatatgaatctggagaatatgagatgctcggagagggtctgggagtgaaggagacaccccagcaaaagtaccagcgcctactgcatgaggtccaagagctgacaactgaagttgaaaaaatcaagacgacagtgaaggagtgcagccgcagaggagaagctgacccctgtgttgctggctaaacagcctggcagccctgaagcagcaggctgggttgcttcccacctgggagnaagctgctgggaccagatgctgcaatcaaccttaaccgaccccgatgggcgccctgggctaaggcgcctactactgcaggctggaagcaacaaagaacagcctagggggatcaaggggaaaaacccctgggacccccccagataggcagccttgtcacttatgaactacattctcgggcctgagcaggacaagttctcttcaagcttgccaaagtcgcagaaacttgaaaagcgccttgacagagctgggagacagctgttacgttgttgattcaggatgctcagaatcccctttctgcaggtctacagggagcctgtctcatggagactgtagagctgttgcaagcaaaggtgagcgccctagaccttgcagttttgggatcaagtgggaggctcggcttacagagtgtcctggggaaaggtgaacgagatttgccaagcattaaagcctctgttaggaaggtgcaggttacacaaaggcaaggttgcaccagcttattattgaaactattacagcgctgggagcccctttgccttccaccctccctggagctgggtgcagaagacttgtcacccatcaaagcagcttgcacgaagcaagcccatgccagtttggtcagctcctggacacactttggataccacccagccgatgaattgctaatttccttggaaggacaaataccaaccctctttgaccccaggttgcagacaaaccattgcgtgaaaacctggcccaccagttgaagggaaactttgcccaacaatgaagaaacggatgaaaaaagctggggaaaagtgaagcacatttggggaagctggaagaaccagggggttaatcccctacccccctgtgaaactctgtttaaccagcttacatatgggtttccccctttacctataactcctagcatcccccatccccatttgacacttggggggcaaaggggttccttctttgcatgtgggggtttattacccttcccctggatggaatacagagtgggtaagctaaggggttgggttatcatcagaagggtgggtttccccctcaggccctggggggataaaggacgttggggcccagccacatggccaacttcatgttccaatactgctttgccctggtgtggggaaggattgggtcttgtcccccaacacagacttctgtggctgactgtaatactgtacaactgtttctgaccgattaaatgctgttgtactctgtgtggcctctgctgtgtttcctggggaggaagcagcactaggatatagatattcattcgtcataacaggcaatctaagccactctatactacaagagatggatttaaattgtaaccaatatcttaccaaagaactaaataaaaaatgggtccagagccagaaa

SEQ ID NO: 442 - DNA, 4632 bp, Homo sapiens
  SIMILAR (733)..(3759): 1001254mologous to Homo sapiens dJ37C10.3 (novel ATPase),accession number AL049569,Smith-Waterman Score=5185.
atggcgccgccgctcgcagccggtccctcccctcccctgcacccctcagccgcgggattggaagccgggcgcttgtgcaagagggtcctggggccgtgcggggacggggaggccaccccacgcccacttaatcggatcccaccccgagtgacggatgtccagctctgttgtgtccaagagacagacattcattcattcagtcagtcggtcaatcagtgtttcctgacccctgagcacatggcagacagcagccctctcgtgggcagcacgcccaccggttatgggaccctgacgatagggacatcaatagatcccctcagctcctcagtttcatccgtgaggctcagcggctactgtggcagtccatggagggtcatcggctatcacgtcgtggtctggatgatggctgggatccctttgctgctcttccgttggaagcccctgtggggggtgcggctgcggctccggccctgcaacctggcccacgccgaaacactcgttatcgaaataagagacaaagaggatagttcctggcagctcttcactgtccaggtgcagactgaggccatcggcgagggcagcctggagccgtccccacagtcccaggcagaggatggccggagccaggcggcagttggggcggtaccagagggtgcctggaaggatacggcccagctccacaagagcgaggaggcgaagcgggtgctgcggtattacctcttccagggccagcgctatatctggatcgagacccagcaagccttctaccaggtcagcctcctggaccatggccgctcttgtgacgacgtccaccgctcccgccatggcctcagcctccaggaccaaatggtgaggaaggccatttacggccccaacgtgatcagcataccggtcaagtcctacccccagctgctggtggacgaggcactgaacccctactatgggttccaggccttcagcatcgcgctgtggctggctgaccactactactggtacgccctgtgcatcttcctcatttcctccatctccatctgcctgtcgctgtacaagaccagaaagcaaagccagactctaagggacatggtcaagttgtccatgcgggtgtgcgtgtgccggccagggggagaggaagagtgggtggactccagtgagctagtgcccggagactgcctggtgctgccccaggagggtgggctgatgccctgtgatgccgccctggtggccggcgagtgcatggtgaatgagagctctctgacaggagagagcattccagtgctgaagacggcactgccggaggggctggggccctactgtgcagagacacaccggcggcacacactcttctgcgggaccctcatcttgcaggcccgggcctatgtgggaccgcacgtcctggcagtggtgacccgcacagggttctgcacggcaaaagggggcctggtgagctccatcttgcacccccggcccatcaacttcaagttctataaacacagcatgaagtttgtggctgccctctctgtcctggctctcctcggcaccatctacagcatcttcatcctctaccgaaaccgggtgcctctgaatgagattgtaatccgggctctcgacctggtgaccgtggtggtgccacctgccctgcctgctgccatgactgtgtgcacgctctacgcccagagccgactgcggagacagggcattttctgcatccacccactgcgcatcaacctggggggcaagctgcagctggtgtgtttcgacaagacgggcaccctcactgaggacggcttagacgtgatgggggtggtgcccctgaaggggcaggcattcctgcccctggtcccagagcctcgccgcctgcctgtggggcccctgctccgagcactggccacctgccatgccctcagccggctccaggacacccccgtgggcgaccccatggacttgaagatggtggagtctactggctgggtcctggaggaagagccggctgcagactcagcatttgggacccaggtcttggcagtgatgagacccccactttgggagccccagctgcaggcaatggaggagcccccggtgccagtcagcgtcctccaccgcttccccttctcttcggctctgcagcgcatgagtgtggtggtggcgtggccaggggccactcagcccgaggcctacgtcaaaggctccccggagctggtggcagggctctgcaaccccgagacagtgcccaccgacttcgcccagatgctgcagagctatacagctgctggctaccgtgtcgtggccctggccagcaagccactgcccactgtgcccagcctggaggcagcccagcaactgacgagggacactgtggaaggagacctgagcctcctggggctgctggtcatgaggaacctactgaagccgcagacaacgccagttatccaggctctgcgaaggacccgcatccgcgccgtcatggtgacaggggacaacctgcagacagcggtgactgtggcccggggctgtggcatggtggccccccaggagcatctgatcatcgtccacgccacccaccctgagcggggtcagcctgcctctctcgagttcctgccgatggagtcccccacagccgtgaatggcgttaaggatcctgaccaggctgcaagctacaccgtggagccagacccccgatccaggcacctggccctcagcgggcccacctttggtatcattgtgaagcacttccccaagctgctgcccaaggtcctggtccagggcactgtctttgcccgcatggcccctgagcagaagacagagctggtgtgcgagctacagaagcttcagtactgcgtgggcatgtgcggagacggcgccaatgactgtggggccctgaaggcggctgatgtcggcatctcgctgtcccaggcagaagcctcagtggtctcacccttcacctcgagcatggccagtattgagtgcgtgcccatggtcatcagggaggggcgctgttcccttgacacttcgttcagcgtcttcaagtacatggctctgtacagcctgacccagttcatctccgtcctgatcctctacacgatcaacaccaacctgggtgacctgcagttcctggccatcgacctggtcatcaccaccacagtggcagtgctcatgagccgcacggggccagcgctggtcctgggacgggtgcggccaccgggggcgctgctcagcgtgcccgtgctcagcagcctgctgctgcagatggtcctggtgaccggcgtgcagctagggggctacttcctgaccctggcccagccatggttcgtgcctctgaacaggacagtggccgcaccagacaacctgcccaactacgagaacaccgtggtcttctctctgtccagcttccagtacctcatcctggctgcagccgtgtccaagggggcgcccttccgccggccgctctacaccaatgtgcccttcctggtggccctggcgctcctgagctccgtcctggtgggccttgtcctggtccccggcctcctgcaggggccgctggcgctgaggaacatcactgacaccggcttcaagctgctgctgctgggtctggtcaccctcaacttcgtgggggccttcatgctggagagcgtgctagaccagtgcctccccgcctgcctgcgccgcctccggcccaagcgggcctccaagaagcgcttcaagcagctggaacgagagctggccgagcagccctggccgccgctgcccgccggccccctgagaaaaggaaagaaagaaccgctggttgtggaagccagccatggcccagagctcagcagtgtaggagaggagggtgcgggcctgagagaggcagcaggcttggctggagaggcagaaggaaaaccaaggcaggagagtgtcctggaagctgggagaaggcagagggagatcgaggcttactttctggctgaggggcctagggacgcaggggagtcgggggtgggggaggccgcagctgtggaagaggccagagctgtcctctctgacaccaccccggcctgcctctttgttgccatgagagctgcctacctcttcctgctattcctgcctgcaggcttgctggctcagggccagtatgacctggacccgctgccgccgttccctgaccacgtccagtacacccactatagcgaccagatcgacaacccagactactatgattatcaagaggtgactcctcggccctccgaggaacagttccagttccagtcccagcagcaagtccaacaggaagtcatcccagccccaaccccagaaccaggaaatgcagagctggagcccacagagcctgggcctcttgactgccgtgaggaacagtacccgtgcacccgcctctactccatacacaggccttgcaaacagtgtctcaacgaggtctgcttctacagcctccgccgtgtgtacgtcattaacaaggagatctgtgttcgtacagtgtgtgcccatgaggagctcctccgagtcccagccccaccgccttacccgccggctccagctctgccctgcccagaacgctgcgtcatgacagtgtacgcgcgcatgcgtgttgtgggaattgcacgggagatggaaggcttcagggacacagctttctga

SEQ ID NO: 443 - DNA, 1178 bp, Homo sapiens
  SIMILAR (317)..(697): 561254mologous to Homo sapiens microfibril-associated glycoprotein,accession number U19718,Smith-Waterman Score=301.
  misc_feature (1)...(1178): n = a,t,c or g
tggagaaagcgagagccttgnngctgatagcttgaggaccctcgcaggnaaccccgggncgacccacgcgtccgcccacgcgtncggcggagtgacccggacagctgtcctctctgacaccaccccggcctgcctctttgttgccatggagagctgcctacctcttcctggctattcctgcctgcaggcttgctggctcagggccagtatgacctggacccgctgccgccgttccctgaccacggtcagtacacccactatatggaccagatcgacaacccagactactatgattatcaagaggggactcctcgggccctccgagggacagttccaagttccacgtcccagcaggaagtccaacagggagtgattcccagccccaaccccagagcccaagggaatgcagagctcggagcccacagagcctgggcctcttgactgccgtgaggaacagtacccgtgcaacccgcctcttactccatacacaggccttgcaaagcagtgtctcaacgaggtctgcttctacagcctccgccgtgtgtacgtcattaacaaggagatctgtgtttcgtacagtgtgttgcccatgagggagctcctccgagcttgacctctgttcggggacaagtttttccaaatgtgggcgttgatgggccagcagcggcctgttgccaatccgtgggcggcctcctgtgcccaggagctgtgggagcttctaagggtggtgcttgcatcctgagtcctggcccctcctggggaatttggggccctcgggccctgccctgacatggtgcttttttcccccaatccccaatgttcctttttattctgtaaaaagttaagtggacttgcagccctgggggttgcaggctgcggtgcctcaggccccttcctttcaagcctgtggcccacctctggggcacaatgggggctccccaactgcccagtctgcccctcgggttgggggagtatcccaaggcctctctgtgggactctgggcccctgacgggctttcctcagcccgtttttgaaggacagacagtcccccgaggtaaggctacatcccccccacccaaagctggtctgcttggatttcctaacagcccccgtgggcatggaccacctttattttatacaaaattaaaaaaacaagtttttacaaaaaaaaaaaaaaa

SEQ ID NO: 444 - DNA, 737 bp, Homo sapiens
  SIMILAR (342)..(383): 641254mologous to Homo sapiens Human oncofoetal ferritin 1 protein sequence,accession number AAY53271,Smith-Waterman Score=45.
gttaagtttcaaggatcaagtttcagttttctattttagaatagaaacattactcttgggttcaatccagtagctcatctgccccccagtctccttaggcactgattccttcatgctgtgctttgagaaaggaagcctaggctgacgagaccatcttgcctccctgtagatcgtcacagctacctgtctctggggatccctagtattaacacattcagtgttcccctttcagtcttactactttgaccgcgatgatgtggctttgaaggactttgccaaatactttcttcaccaatctcatgaggagaggggaacatgcttgagaaacttgatgaagctgcagaacccacgagggtggcctaatctttcttcaggatatcaaggtgaacaaaagatcctaggggtgtcatacttcatcatctggcagtgttcgggtatcagaaatcacttaaactagcaattgcccttataaagtgatgatacactgggcttttgccttttgtgcttttttaggcttaccatctaaactaaattaggcaaatagtaatgtcccttttgccaaaacgtggtggttagagatgatgggcttgctgacttctaggttagttggtagagatgcattaacctattctcattcagaaaccagactgtgatgactgggagagcgggctgaatgcaatggagtgtgcattacatttgggaaaaaatgtgaatcagtcactactggaactgcacaa

SEQ ID NO: 445 - DNA, 459 bp, Homo sapiens
  misc_feature (1)...(459): n = a,t,c or g
gcatcaactcttaagtttttatgagacatcagtcctgttgtaaattcagaatctgagcagtggtcattttatgaatcagtaaattactgccttacccataacaactttgactgttaaatgttttgtttttttttaaagcccatcgccgaagcaccattcaagttcgacatggaattggatgacttgcctaaggaaaaagctcaaagaactaatttttgaagagactgctagattccagccaggatacagatcttaaatttgtcaggacaagggctcagaggactggacgtgctcagacatcggtgttcttcttcccagttcttgacccctggncctgtctccagcccgtcttgggcttatccactttgactcctttgaggccgttttggaaggggccggtttctgggtagttgttggctttnatgcttttcaaaggattttctttcagtcccagagaat

SEQ ID NO: 446 - DNA, 839 bp, Homo sapiens
gctactacctagggcaccttaaagtcaagtgacaagcccccctatttgcaacttcaccctttgaccccataactgtttccccccagagcaggagcttgtggaaatacccttggctgatgttgcagcctgcagcaagtgccttccgtctccggaatccttggggagcacttgtccacgtcttttctcatatcatggtagtcactaacatatataaggtatgtgctattggcccagcttttagaaaatgcagtcatttttctaaataaaaaggaagtactgcacccagcagtgtcactctgtagttactgtggtcacttgtaccatatagaggtgtaacacttgtcaagaagcgttatgtgcagtacttaatgtttgtaagacttacaaaaaaagatttaaggggccagctacacctcgaccatttggttaaaaaaagtacaaaggttgcagtgctgagctgtgggcggtttctggggatgtcccagggtggaactccacatgctggtgcatataacgcccttgagccacttcaaatgtgggtgtttcagtaaccacgttccatgcctgaggatttagcagagaggaacactgcgtctttaaatgagaaagtatacaattctttttccttctacagcatgtcagcatctcaagttcatttttcaacctacagtataacaatttgtaataaagcctccaggagctcatgacgtgaagcactgttctgtcctcaagtactcaaatatttctgatactgctgagtcagactgtcagaaaaagcttagcactaactcgtgtttggagctctatccatattttactgatctctttaagtatttgtg

SEQ ID NO: 447 - DNA, 3132 bp, Homo sapiens
  SIMILAR (334)..(1350): 411254mologous to Homo sapiens 41kD protein kinase,accession number Z11694,Smith-Waterman Score=421.
acataatttctggagccctgtaccaacgtgtggccacatattctgtcaggaaccctgtgtgatcatggtctggatctgcaacacgggccaggccaaagtcacagatcttgagatcacaggtggtgttgagcagcaggcaggcaggcaatcggtccgagtggctgtcggctcttcagctctcccgctcggcgtcttccttcctcctcccggtcagcgtcggcggctgcaccggcggcggcgcagtccctgcgggaggggcgacaagagctgaggcgcggccgccgagcgtcgagctcagcgcggcggtagcggcggcggcccaggcagccaacgatggcggcggcggttgtcggcgggcgcgggccggaagtatggtccgcgggcacgctgttcgacgtggggccgcgctacaccaacctctcgtacattcggcgagggcgcctcacgacatgtgtgtgctctgcttatgataatgtcaacaaagttcgagtatgctatcaagaaaatcagcccctttgagcactcagacctactgccagagaaccctgagggagataaaaaatcttactgcgcttcagacatgagaacattcattggaatcaatgacattattccgagcaccaaccaatcgagcaaatgaaaggatgtatataatagtacagggacctcatggaaacagatctttacaagctcttgaagacacaacaccttcagcaatgaccaatatctggtattttctctaccaaatcctcagagggttaaaatatatccattcagcttaacgttctgcaccgtgaacctcaagcctttccaacctgctgctcaacacccacctgtgatctcaagatctgtgactttggcctgggcccgtgttgcagatccagaccatgatcacacagggttcctgacagaatatgtggccacacgttgggtacagggctccagaaattatgttggaattccaagggctacaccaagtccattggatatttggtctgtaggctgcattctgggcagaaatgctttcttaacagggcccatctttccaggggaagcattatctttgaccagctggaaccacatttttggggtattcttgggatccccatcacaagaaggacctgaattgtataattaaattttaaaagctagggaactatttgctttcttctcacacatcaaaaataatggtgccattggaacatgcttgtccccaaaatgctgactccaaaagctctgggactttattgggccaaaattgtttgacattcaaccccacacaagaggattgaagtagaacaggctctggccccaccccatatctggagcagtattacgtacccgagtgaccgagcccatcgccgaagcaccaattcaagttcgaccatggaaattggatgacttgcctaaggaaaagctcaaaggaactaattttttgaagagacttgctagattcccagccaggggtccagattttaaattttgttcagaccaaggggtccgagggcttggacgtgctcagacatcggtgttcttcttcccagttcttgacccctggtcctgtcttccagccctgtcttggcttatccactttgactcctttgaacccgtttgggagggggcggtttctgggtagttgtgggttttatggcttttcaaagatttctttcagtccaggaggattcctcctggggcagccctgttgttgtgttcacccattggtgaccttgcgggcagtatgtacttcagtgcaccttactgcttactgttgctttagtcactaattgctttctggtttgaaagatgcagtggttcctccctctcctgaatccttttctacatgatgccctgctgaccatgcagccgcaccagagagagattcttccccaattggctctagtcactggcatctcactttatgatagggaaggctactacctagggcactttaagtcagtgacagccccttatttgcacttcaccttttgaccataactgtttccccagagcaggagcttgtgggaaataccttgggctggatgttgcagcctgcagcaagtgcttccgtctccggaatccttggggagcacttgtccacgtcttttctcatatcatggtagtcactaacatatataaggtattgtgctattggcccagcttttagaaaatgcagtcatttttctttaattaaaaaggaagtactggacccagcagtgtcactctgtagttactgtggtcacttgtaccatatagaggtgtaacacttgtcaagaagcgttatgtgcagtacttaatgtttgtaagacttacaaaaaaagatttaaagtggcagcttcactcgacatttggtgagagaagtacaaaggttgcagtgctgagctgtgggcggtttctggggatgtcccagggtggaactccacatgctggtgcatatacgcccttgagctacttcaaatgtggtttatacctcgcagatacaagaatctttatgaatatacaattctttttccttctacagcttagctccgtcttttcaaccacgaacatttaaaacccgacctactagcactgttctgtcctcaagtactcaaataatttctgatactgctggagtcagactgtcagaaaaagctagcactaactcgtgtttggagctctatccatattttactgaatctctttaagtatttgttcctgccactgtgtactgtggagttgactcggtgttctgtcccagtgcggtgcctcctcttgacttccccactgctctctgtggtgagaaatttgccttgttcaataattactgtacccctcgtcatgaactgttacagcctttcctgtgccagagatgactgtcccaagtgcccacatgccctacgattgaaatgaaaacttctattgttacctctgagttgtgttcccacggaaaatgctatccagcagatcatttaggaaaaataattctatttttagcttttcatttctcagctgtccttttttcttgtttgatttttgacagcaatggagaatgggttatataaagactgcctgctaatatgaacagaaatgcatttgtaattcatggaaaataaatgtacatcttctatcttcacattcaaaaaaaaaaaaaaa

SEQ ID NO: 448 - DNA, 517 bp, Homo sapiens
  SIMILAR (102)..(200): 1001254mologous to Homo sapiens Human secreted protein encoded by gene 157 clone HLTED27,accession number AAW74884,Smith- Waterman Score=180.
ggggaacaagatggcggcgccgaaggggagcctctgggtgaggacccaactggggctcccgccgctgctgctgctgaccatggccttggccggaggttcgggggaccgcttcggctgaagcatttgactcggtcttgggtgatacggcgtcttgccaccgggcctgtcagttgacctaccccttgcacacctaccctaaggtagggcccgtccggagcgggctgcgacccttcccttgcagcccatttctcggctccccacacgtatgtcggctctggcaacctggctgttaaatcggcccttcaatcgctgtctcccatctgtgtagctcctgttttcctccctaatcctgcctgcaccccatttctgctgtcattaccggaagtttgtcctgcactaccctgtgataggctgggggacacaaagatgagaaagacgcgatccctttcctctgggagcttgccgggctgcaggggagtcgagcactcggaggaggataggggaggatatggatgat

SEQ ID NO: 449 - DNA, 2119 bp, Homo sapiens
  SIMILAR (605)..(1396): 361254mologous to Homo sapiens Secreted protein clone bm41_7 polypeptide sequence,accession number AAY02282,Smith-Waterman Score =168.
  misc_feature (1)...(2119): n = a,t,c or g
aaatgcgggcggaaggcgcgctgagggcggctgtagttttccgagaccaactttcccgacagcaccgtgcgcctcccgcctacggagaactacatgccccagcctgccccgcgaagggaagaagtcaggaggccccgcttcgcgctaacgcttgcgatggttgaattcccctcctcacgccagcctaggagaagaagttcgtagtcccagaggtgaggcaggaggcggcagtttctggcgggtgagggcggagctgaagtgacagcggaggcggaagcaacggtcggtggggcggagaagggggctggccccaggaggaggaggaaacccttccgagaaaacagcaacaagctgagctgctgtgacagaggggaacaagatggcggcgcgaaaggggaagcctctgggtgaggacccaactggggctcccgccgctgctgctgctgaccatggccttggccggaggttcggggaccgcttcggctgaagcatttgactcggtcttgggtgatacggcgtcttgccaccgggcctgtcagttgacctacccctttgcacacctaccctaaggaagaggagttgtacgcatgtcagagaggttgcaggctgttttcaatttgtcagtttgtggatgatcggaattgacttaactcgaactaaattggaatgtgaatctgcatgtacagaaggcatattcccaatctgatgagcaatatgctttgccattcttgggttgccagaattcagcttgccatttcgctgaaactgagacaagaacaactttatgttccccgatggccaaaaatggcacctacttttttcctctaacttctgggtgagggttcattctgggagttgacatgatgggactccgcacagaggcttcataacctcttcatggactttttatcttcaagcccgatgacggaaaaatagttatattcccagtctaaagccagaaatcccagtacgcaccacattttggagccagggagcctacaaattttgaggagaatcatctcttaagcaaaatgtcctcagatctgcaaatggggaaattccaccaagcgcaccagggaattttcttgaagaatgaagaaagggatggcctttttaaaaagccttctattttaaactctgggtggattttaactacaaactcttgtcctctccggtgatggtattgctttgggatttgttgtgcaactgttgctacagctgtggagcagtatgttccctctggagaagctggagtaactatgggtgacttggagtttatgaatgaacaaaagctaaaccagatatccagcttccttctcttgtgggttggttagatctaaaactgaaggatcatgaagaagcagggccctcctacctaccaaaagtgaatcttgctccattcctggaaatttaagcatttttccttttaaaaagaccagtggtaatagacatctaaaattccactcctcataggagcttttaaaatgggttccattggatataggccttaaggaaatcacctataaaatgcaaactaaagttactcaaatctgtgaagactgttatttgctataactttattgggtattgtttttgtaagtaaatttaaagaggtgggatgtttgggattgtaattaattattttacctaatatcctgtagcctattttgttttttgcctttggttattgtttttttccccttttccttagctatgagctgatcattgctccttcctcacctcctgccatgatactgtcagttaccttagttaacaagctgaatatttagtagaaatgatgcttctgctcaggaatggcccacaaatctgtaatttgaaatttagcaggaaatgacctttaatgacactacattttcagggaactgaaatcattaaaattttatttgaataattnnnnnnnnnnnnnnnnnnnnnggggcggccgttttaaaggatccttggggggcccaaagtttacccgggcttgcaacgtcaaagctttttccctatagggggccgaattataacctacctgggaatttttggaaaggaccttaactttgggggggggacatattgggacaacctacctacggagttttaaggctctaagggaaat

SEQ ID NO: 450 - DNA, 529 bp, Homo sapiens
  SIMILAR (76)..(528): 961254mologous to Mus musculus putative,accession number AK007729,Smith-Waterman Score=749.
  misc_feature (1)...(529): n = a,t,c or g
gggggcccagtagcggaccgtgttgggagggagctgggttttcattttgtctgcaggaagtactagccggacatcatgagtggctggggggtattgagcgggagactaaatccagcggccagggagaaggacgtggaaagattcttcaagggatatggacggataagagatattgatctgaaaagaggctttggttttgtggaatttgaggatccaagggatgcagatgatgctgtgtatgagcttgatggaaaagaactctgtagtgaaagggttactattgaacatgctagggctcggtcacgaggtggaagaggtagaggacgatactctgaccgttttagtagtcgcagacctcgaaatgatagacgaaatgctccacctgtaagaacagaaaatcgtcttatagttgagaatttatcctcaagagtcagctggcaggatctcaaagatttcatgagacaagctggggaagtaacgtttgcggatgcacaccgacctanattaaatgaaggggtgggtgagtttg

SEQ ID NO: 451 - DNA, 401 bp, Homo sapiens
  SIMILAR (3)..(227): 981254mologous to Homo sapiens SRp40-1,accession number U30826,Smith-Waterman Score=349.
cctctaggtctcgtagccgatcccgttcccgtagtcgcaaatcttacagccggtcaagaaccaggagcaggagccggagccggagcaagtcccgttctgttagtaggtctcccgtgcctgagaagagccagaaacgtggttcttcaagtagatctaagtctccagcatctgtggatcgccagaggtcccggtcccgatcaaggtccagatcagttgacagtggcaattaaactgtaaataacttcgcctgggggcctttttttaaaaaacaaaaaccacaaaaattcccaaaccatacttgctaaaaattctgggtcaagggtgtcctccactctttaacagctgctggacagacacattagagcagctgtttgttattgataataaaatattataaaact

SEQ ID NO: 452 - DNA, 785 bp, Homo sapiens
  SIMILAR (303)..(347): 931254mologous to Rattus norvegicus RNA binding protein,accession number AF020683,Smith-Waterman Score=74.
gagtggcgtagacgagttaagtcctggtctgcgtggaggtcgacgactccgtcgcagactacggacctgtctgggtctcagccgccaaagaccccgtccggtagtcattgctattatctcgattgaattactttctaataggaagtactagccggacatcatgagtggctgtcgggtattcatcgggagactaaatccagcggccagggagaaggacgtggaaagattcttcaagggatatggacggataagagatattgatctgaaaagaggctttggttttgtggaatttgaggatccaaaaggatgcagatgatgctgtgtatgagcttgatggaaaagaactctggtagtgaaagggttactattgaacatgctagggctcggtcacgaggtggaagaggtagaggacgatactctgaccgttttagtagtcgcagacctcgaaatgatagacgaaatgctccacctgtaagaacagaaaatcgtcttatagttgagaatttatcctcaagagtcagctggcaggtttgttgaaatacagttttgagttattttgatgtggctttttaaaaaagttaatgggtagctaatgttgtattgttttattaaaagtagttttaaattaatggatttaatggaattgtaattttaaacatttaattaaatgtaatttgggggatattttgaactttaatattagtgatcaaatgtaaatgttttgaggatatttttcttgttttttaaaatcaatttttaaccaaatattaaaccctttatttgcc

SEQ ID NO: 453 - DNA, 1621 bp, Homo sapiens
  SIMILAR (1212)..(1379): 751254mologous to Homo sapiens SRp40-1,accession number U30826,Smith-Waterman Score=173.
  misc_feature (1)...(1621): n = a,t,c or g
gggttatcctaatcgttgtcttggtcactcttggttgggcctggttgactttgccagtcagctcctacagtgatcagttggccacctctagatctgtgtttgccggtctagacgttatcggtgcacttccttgaagtgccaggttgcagcgatcccagagcgttgataacgtgatctgatccctaagttgagacctgtcttcctgtaacgcttccgaataagaggtccggtcgaaaagagttgaaagatacgaaattaggtggtcgttggaatcctgatcgcagtaaagtggtccttggtaactgctcgagtagaacatgtctgcatccgccaatagtccgctaatagggagggctgtgcgattaaaggcttccatcgattgggtagtgtccttcaagtgggtggcgaagagccagtcgggcatatgtcatgaaggtttctccgaccgattaatggtttgctgcttgactagcctagggaaataataataaaggtaaagtaaacttttttaatgacatatggggcacaaaataactggtgtcttgtaaatgttctgtttttttaaataaaacttctctactttagtctttactttaaaaatatgtactgtttccttttttgttgtttttttgtttgtttttttttcttttgtactgagctcagcatagactaatactaccttaatgttaaaatctgaatttcttttagcattttgcttaaaagcaatatgctatttgcttattccgtgccctgacatagataatttttgaattctgatagaatacaagtgtggtaaatgccatgtttgtactttatctaacatcttctctttcagtagtcttgttttttttatatcatgtgattgtttgtgtgtcccctttcctcttctttgcttaacacaattatcttgtgttaaggatctcaaagatttcatgagaccagctggggaaagtaacgtttgcggaatgcacaccgacctaaatttaaatgaaggggtggttgagtttgcctcttatggtgacttaaagaatgctattgaaaaacttttctgaaaaggaaataaatgggagaaaaataaaattaattgaaggcagcaaaaggcacagtaggtcaagaagcaggtctcgatcccggaccagaagttcctctaggtctcgtagccgatcccgttcccgtagttcgcaaatcttacagccggtcaagaagcaggagccaggagccggagccggagcaangtccccgttctgttaagtaggtctccccgtgcctgagaagagcccagaaaccgtggttcttcaagtagatctaagtctccagcatctgtggatcgccagaggtcccggtcccgatcaaggtccagatcagttgacagtggcaattaaactgtaaataacttgccccggggggcccttttttttaaaaaacaaaaaccacaaaaattcccaaaccatacttgcttaaaaattctggtaagtatgtgcttttctgtggggggtggggatttggaagggggggtttgggttggggctggatatctttgttagatgttgggaccaccaaggggttgttgaaaactaattgtattaaatgtcttttgataagcaaaaaaaaaaaaaaaaaa

SEQ ID NO: 454 - DNA, 1946 bp, Homo sapiens
  SIMILAR (501)..(542): 1001254mologous to Homo sapiens SRp40-1,accession number U30826,Smith-Waterman Score=73.
ggcgtagacgagttaagtcctggtctgcgtggaggtcgacgactccgtcgcagactacggacctgtctgggtctcagccgccaaagaccccgtccggtaggtgagtggctcactttgagggcaagccttctcggatcgaggcttcttcatggccgctcagatcgtgagcggccggggctgctctctttgcggaggatggcgtctaatgagcgcagttgattcgaggaagtactagccggacatcatgagtggctgtcgggtattcatcgggagactaaatccagcggccagggagaaggacgtggaaagattcttcaagggatatggacggataagagatattgatctgaaaagaggctttggttttgtggaatttgaggatccaagggatgcagatgatgctgtgtatgagcttgatggaaaagaactctgtagtgaaagggttactattgaacatgctagggctcggtcacgaggtggaagaggtagaggacgatacttctgaccgttttagtagtcgcagacctcgaaatgatagacggtatgtgaagggtggatggctgcattgaacaattattggtaggggtagccatttaagattcaggagtcattagcagtgatgattttgggacctgccgtataatctgttcttctattcccacgttagccaattgttcttgatgaatctatatgagtcatagaacacaaatctattgacggaagtcattagaatggcttgtgatatctgatggcttgaacttgcccacagttgaacacaagtgctgtcattgcatttcttccattgtgaatacgaattttcttcctcagaaatgctccacctgtaagaacagaaaatcgtcttatagttgagaatttatcctcaagagtcagctggcaggatctcaaagatttcatgagacaagctggggaagtaacgtttgcggatgcacaccgacctaaattaaatgaaggggtggttgagtttgcctcttatggtgacttaaagaatgctattgaaaaactttctggaaaggaaataaatgggagaaaaataaaattaattgaaggcagcaaaaggcacaggtcaagaagcaggtctcgatcccggaccagaagttcctctaggtctcgtagccgatcccgttcccgtagtcgcaaatcttacagccggtcaagaagcaggagcaggagccggagccggagcaagtcccgttctgttagtaggtcctccccgtgccctgagaagagcccagaaacgtggttcttccaagtagaatctaagtctcccagccatctgtggaatcgcccagaggtccccggtccccgatcaaggtcccagatccagttggaccagtggccaattaaacctgtaaaataaccttcccctgggggcctttttttttaaaaaaacaaaaacccacaaaaattccccaaacccatacttgcctaaaaattctggtaagtatgtgcttttcctgtgggggtgggaatttggaaaggggggttgggttgggcctggatatcctttgtagatgtggacccacccaaggggttgttggaaaactaaattgtattaaatgtcttttgaataagccttctgctcacatttttgtgaatgtctgaagtaatatagtttgtgaatattgccagagctcttttaaaaacaaaagccaaattaaatttttttgtactagaaaaaaatttgaacattttagttcttggttataaaaatgttaattcaggatttagtttaatgccttaatttaacttaattaatagctttggacacttaaaagagctctaaatttgcttgtacataaaggcttaatttgttttccttgttagggtcaagggtgtcctccactctttaacagctgctggacagacacattagagcagctgtttgttattgataataaaatattataaaactaaaaaaaaaaaaa

SEQ ID NO: 455 - DNA, 1020 bp, Homo sapiens
  SIMILAR (358)..(828): 521254mologous to Homo sapiens apoferritin H chain,accession number X00318,Smith-Waterman Score=251.
gtcgtcggggtttcctgcttcaacagtgcttggacggaacccggcgctcgttccccaccccggccggccgcccatagccagccctccgtcacctcttcaccgcaccctcggactgccccaaggcccccgccgccgctccagcgccgagaagccaccgccgccggccgccgcctctccttagtcgccgccatgacgaccgcgtcccacctcgcagggtgcgccaagaactaccaccaaggactcaagaggccgccaatcaaccgccaagatcaaccctggaagctctacggcctcctacgttttaccctgtcccatgtccttactaactttgacccgcgcatgatgttggcttttgaaagaacttttgccaaatactttcttcaccaattctcaatgaaggaagagggaaaccatgctgaagaaacttgatgaaagctgcagaacccaacgagggtggcccgaattcttccttccaggatatcaaagaaacccagacttgtgatgaactgggaagagcggggcttgaatgccaatggaagtgtgcattacatttgggaaaaaaatgttgaatcaagtcacctactggaactgcacaaaactggccaactggacaaaaatgaccccccattttgtgtgaccttcattgagacaacattaccctgaatgagcagggtgaaaggccatcaaagaatttggggtgaccacgtgaccaacttgccgcaagatgggaagcgccccgaatctggcttgggcgaaatatctctttgatcatagcacatccctgggaagacagtgataatgaaagctaagcctcgggctaatttccccaatagccgtgggggtgacttccctgggtcaaccaaggcagtgcatgcatgttgggggtttctttaaccttttctataagttggaccaaaacatccacttaagttctttgatttgtaccattccttcaaataaagaaatttggtacccaggtgttgtctttgaggtcttgggatgaatcagaaatctatccag

SEQ ID NO: 456 - DNA, 2009 bp, Homo sapiens
  SIMILAR (903)..(1295): 551254mologous to Rattus norvegicus growth response protein,accession number L13635,Smith-Waterman Score=277.
  misc_feature (1)...(2009): n = a,t,c or g
gcggccgcagtgacccccgagaagggggttgctgggaggagaagggaagagggaatttggcacgcgcagctctgctgcgntttgattccaccgccgccattttgtggccgcagagcgcccgcccgctgctgttggcgcaggcgcggtcgaggcgtcgcgagattctggcttccacccgctgtgacgcgcccgcgaggccgccattgggctggctttgcggagggcgcgggcggctccgcccgcacttctcggcctttcctaactgcggcagatgggagggggccggagagcccggagagtgtgcggctgcgcagttggaaaggtggcagtgggcgttgcggttgctgcggtctgggcccagtagcggaccgtgttgggagggagctgggttttcattttgtctgcaggtaacctggcctcattagaggctctgttggcaatctcgttcataacatcactgtgtaaacattttatgccgttgatgtttttgattgtttaatcaggcgtttctctgtgacagtcattgctattatctcgattgaattactttctaataggaagtactagccggacatcatgagtggctgtcgggtattcatcgggagactaaatccagcggccagggagaaggacgtggaaagattcttcaagggatatggacggataagagatattgatctgaaaagaggctttggttttgtggaatttgaggatccaagggatgcagatgatgctgtgtatgagcttgatggaaaagaactctgtagttgaaagggttactattgaacatgctagggctcggttcacgaggttgggaagaggtagaggacgatactctgaccgttttaataattccgcagaacttcgaaatgatagacgaaatgctccacctgtaagaccaggaaaatcgtcttatagttgagaatttatcctcaagagtcagctggcaggatctcaaagatttcattgagacaagctggggaaagtaacgttgccggatgcnacacgacttaatttaaaatgaaggggtggttgagtttgcctctatgggtgacttaaggaatgctattgaaaaactttctggaagggaattaaatgggagaaaaataaaattaattgaaaggccagcaaaaaggccacagtaggtccaanaaagcaggtcctcggatcccgggacccaaaagtcccctctaggtccccgtagccgatccccgtcccccgtagtcgcaaaccttaacagccggtccaagaagcaagagggagcagggagcccggaagcccggagccaagtccccgttcctgttaagtagggtcctcccccgtgccctgagaaagagccccagaaaccgtggttccctccaaagtaagatcctaagtcctcccagcatcctgtgggatccgcccagaggtcccggtcccccagtctngggctccgagatcagtttgacagtggcatttaaactgttaaattaacttgccctgggggcctttttttttaaaaaacaaaaaccacaaaaattcccaaaccatacttgctaaaaattctggtaagtatgtgcttttctgtgggggtgggatttggaaggggggttgggttgggctggatatctttgtaggtgtgggaccaccaaggggttgttgaaaactaattgtattaaatgtcttttgataagccttctgctcacatttttgtgaatgtctgaagtatatagtttgtgtatattgacagagctcttttataactaaagcaaatttaatttttttgtactagaaaaaaatttgaacattttagttcttggttataaaaatgttaattcagaattagtttaatgccttaattaaactaattaatagctttggacacttaaaagagctctaaatttgcttgtacataaaggcttaatttgttttccttgttagggtcaagggtgtcctccactctttaacagctgctggacagacacattagagcagctgtttgttattgataataaaatattataaaacta

SEQ ID NO: 457 - DNA, 1320 bp, Homo sapiens
  SIMILAR (13)..(864): 991254mologous to Homo sapiens potassium channel,accession number AF071491,Smith-Waterman Score=1479.
atgactcaaaggttcctgattgtcctggggtgcttgattctggctgtcctgaccacattcaaggagtatgagactgtctcgggagactggcttctgttactggagacatttgctattttcatctttggagccgagtttgctttgaggatctgggctgctggatgttgctgccgatacaaaggctggcggggccgactgaagtttgccaggaagcccctgtgcatgttggacatctttgtgctgattgcctctgtgccagtggttgctgtgggaaaccaaggcaatgttctggccacctccctgcgaagcctgcgcttcctgcagatcctgcgcatgctgcggatggaccggagaggtggcacctggaagcttctgggctcagccatctgtgcccacagcaaagaactcatcacggcctggtacatcggtttcctgacactcatcctttcttcatttcttgtctacctggttgagaaagacgtcccagaggtggatgcacaaggagaggagatgaaagaggagtttgagacctatgcagatgccctgtggtggggcctgatcacactggccaccattggctatggagacaagacacccaaaacgtgggaaggccgtctgattgccgccaccttttccttaattggcgtctccttttttgcccttccagcgggcatcctggggtccgggctggccctcaaggtgcaggagcaacaccgtcagaagcactttgagaaaaggaggaagccagctgctgagctcattcaggctgcctggaggtattatgctaccaaccccaacaggattgacctggtggcgacatggagattttatgaatcagtcgtctcttttcctttcttcaggcaagtggggactcacctgaatgctcagggcgtgaccagccatctctcctgcgaggaatctaactttgatcctgaaggcaatgagaagctagatgagccagagaatgacatcagtagatctacttttcaggaagatgatagcaaagagtgtggaggatggatctatggactcaagtcaaagcaagaagatcagctagcaaatattgcagggttcagagtaagaggaaatgagggcctagaccaaggaaagaacagctggaggcagcatccagatttcagtgcctacatctgtgaaatgaaggaattaaagcagatggtccccaaggcctgtcagggctattatcatgggttcagactttcagccaataaccctgaattagctccacgtttaagtttcatgtggtcacaccagttatacgagttcaatatgaatgcagagaaggaaccaaatggcaattag

SEQ ID NO: 458 - DNA, 819 bp, Homo sapiens
  SIMILAR (175)..(642): 941254mologous to Homo sapiens potassium channel homolog; KvEBN2,accession number AF033347,Smith-Waterman Score=751.
atgacagacgaggacctggtgttcagaaagcacagggtgactgtgtggcagaaggagtgttcattccccttccagcagccacaacaccatgacctccacactgcacccagcttcaaagacaaggtaactgaggctcaaaaaggtcatagatttgccgaaggtcagccagatgggaagggtggacttgggcttaagtcaagccaaaagctgggtctattggatcgggttcgcctttctaatcctcgtggtagcaatactaaaggaaagctatttacccctctgaatgtagatgccatagaagaaagtccttctaaagaaccaaagcctgttggcttaaacaataaagagagtctccgcacggctttccgcatgaaagcctacgctttctggcagagttctgaagatgccgggacaggtgaccccatggcggaagacagggggtatgggaatgacttccccatcgaagacatgatccccaccctgaaggccgccatccgagccgtcagaattctacaattccgtctctataaaaaaaaattcaaggagactttgaggccttacgatgtgaaggatgtgattgagcagtattctgccgggcatctcgacatgctttccaggataaagtaccttcagacgagcatttgtggctggagggtgaacatctggacctctgattgcatatccccagccatgctgaccttgcggggcaagagagaaagaaagtgccgtcagtggaggagcagctgggtttccaaggaggagacggaaggagccatgactgtttcagggtgcataattttaatggtcctggacctgtga

SEQ ID NO: 459 - DNA, 2949 bp, Homo sapiens
  SIMILAR (947)..(2152): 871254mologous to Homo sapiens Amino acid sequence of human KCNQ3 (formerly known as KvLR2),accession number AAY01534,Smith- Waterman Score=1752.
gacccgcgcgggatgtgaccccctgaccccctgcctggcctcccctgccccccagggggcccgcctttgcctgcttttgggggtgggtggggaggggcgcgcggatcatggcattggagttcccgggcttgcagccgccgccgccgcctcgttcacgcaccccgagcgccccttcttcccagagcagcagcggagaaggcgaagcggccggcgggggcgaggcagatggggctcaaggcgcgcagggcggcgggggcggctggcggcggcggcgacgggggcggcggaggcggcggggcggctaacccagccggaggggacgcggcggcggccggcgacgaggagcggaaagtggggctggcgcccggcgacgtggagcaagtcaccttggcgctcggggccggagccgacaaagacgggaccctgctgctggagggcggcggccgcgacgaggggcagcggaggaccccgcagggcatcgggctcctggccaagaccccgctgagccgcccagtcaagagaaacaacgccaagtaccggcgcatccaaactttgatctacgacgccctggagagaccgcggggctgggcgctgctttaccacagcgttggtgttcctgattgtcctaggggtgcttgattctggctgtcctggaccacattcaaggagtatgagactgtctcgggagactggcttctgttactggagacatttgctattttcatctttggagccgagtttgctttgaggatctgggctgctggatgttgctgccgatacaaaggctggcggggccgactgaagtttgccaggaagcccctgtgcatgttggacatctttgtgctgattgcctctgtgccagtggttgctgtgggaaaccaaggcaatgttctggccacctccctgcgaagcctgcgcttcctgcagatcctgcgcatgctgcgggatggaccgggagaaggtggcacctggaagcttctggggctcagccatctgtgcccacagcaaagaactcatcacggcctggtacatcggtttcctgacactcatcctttcttcatttcttgtctacctggttgagaaagacgtcccagaggtggatgcacaaggagaggagatgaaagaggagtttgagacctatgcagatgccctgtggtggggcctgatcacactggccaccattggctatggagacaagacacccaaaacgtgggaaggccgtctgattgccgccaccttttccttaattggcgtctccttttttgcccttccagcgggcatcctggggtccgggctggccctcaaggtgcaggagcaacaccgtcagaagcactttgagaaaaggaggaagccagctgctgagctcattcaggctgcctggaggtattatgctaccaaccccaacaggattgacctggtggcgacatggagattttatgaatcagtcgtctcttttcctttcttcaggaaagaacagctggaggcagcatccagccaaaagctgggtctcttggatcgggttcgcctttctaatcctcgtggtagcaatactaaaggaaagctatttacccctctgaatgtagatgccatagaagaaagtccttctaaagaaccaaagcctgttggcttaaacaataaagagcgtttccgcacggccttccgcatgaaagcctacgctttctggcagagttctgaagatgccgggacaggtgaccccatggcggaagacaggggctatgggaatgacttccccatcgaagacatgatccccaccctgaaggccgccatccgagccgtcagaattctacaattccgtctctataaaaaaaaattcaaggagactttgaggccttacgatgtgaaggatgtgattgagcagtattctgccgggcatctcgacatgctttccaggataaagtaccttcagacgagaatagatatgattttcacccctgggacctccctccacgccaaaacacaaggaagtcttcagaaagggtcagcatttcaccttcccatcccagcaatcttcccggggattgaaccatatgtaggccagaccatccacattcagaaattcgaagaccaaaggcattgatgggggaagtttgttaaaagtttgaaaggacaggtttcagggactggggaggaagctggacttcctcgtggatatgcacatgcaacacatggaacggttgcaggtgcaggtcacggagtattacccaaccaagggcacctcctcgccagctgaagcagagaagaaggaggacaacaggtattccgatttgaaaaccatcatctgcaactattctgagacaggccccccggaaccaccctacagcttccaccaggtgaccattgacaaagtcagcccctatgggttttttgcacatgaccctgtgaacctgccccgagggggacccagttctggaaaggttcaggcaactcctccttcctcagcaacaacgtatgtggagaggcccacggtcctgcctatcttgactcttctcgactcccgagtgagctgccactcccaggctgacctgcagggcccctactcggaccgaatctccccccggcagagacgtagcatcacgcgagacagtgacacacctctgtccctgatgtcggtcaaccacgaggagctggagaggtctccaagtggcttcagcatctcccaggacagagatgattatgtgttcggccccaatggggggtcgagctggatgagggagaagcggtacctcgccgagggtgagacggacacagacacggaccccttcacgcccagcggctccatgcctctgtcgtccacaggggatgggatttctgattcagtatggaccccttccaataagcccatttaaaagaggtcactggctgacccctccttgtaatgtagacagactttgtatagttcacttactcttacacccgacgcttaccagc

SEQ ID NO: 460 - DNA, 647 bp, Homo sapiens
  SIMILAR (47)..(430): 391254mologous to Hylobates lar alpha2-globin,accession number M94634,Smith-Waterman Score=152.
ccccgactcttctggtccccacagactcagagagaacccacccatggttgctgtctcctgcccgacaaagaccaacgtcaagggcccgcctgggggtaaggtcggcgcgcacgctggcgcagtatggcttcggaggccctggagaaggatgttcctgtccttccccaccaaccaagacctactttcccgcacttcgaccttgagccacgggctctgcccaaggttaaagggccacgggcaagaaggtggccgacgcgctgaccaaacgccgtggcgcacgtggacggacatgcccaaacggcgttgtccgcccctgaagcgacctgcacggcgcacaagctttcgggtggacccggtcaacttcaagctcctaagccactggcctgctggtgaccctggcccgcccacctccccggccgagttcaacccctgcggtgccacgccctccctgggacaagtttccttggctttctgtgaagcaccgttgcttgaccttcaaataccgttaagcttggaagcctcgggtagccggttcctcctgcctccgctgggcctccccccagcccctcctcccctttcctgcacccgtacccccgtggtctttgaaataaagtcttgagtgggcggcaaaaaaaaaaaaaaaaaaa

SEQ ID NO: 461 - DNA, 535 bp, Homo sapiens
  SIMILAR (439)..(287): 581254mologous to Homo sapiens NAP,accession number M86667,Smith-Waterman Score=120.
  misc_feature (1)...(535): n = a,t,c or g
taatcttcaatctggcnttttcttcaatcctccgaatctatcttcttcatctggttccattcacatcctcttccgtaggttcataaattgcattaataatttcaaatcgnttatcaaatagagctgntagagaacagcatacttcctttcaagatcgtnacttcctcatagaatttggcttctatctgtgcacatntaacttgcaggtttttgagagnattcactcggtcttttaactaccctagnacggctttcaatgatcctgttggtgtttctaccagnccatcaagtctttcttgaacggntgcaagaatctgagattttgcatcatctgaacacgttagctgacgtgctttgacgtttngtttcttcaccacgtttcctcttcttctacttcttcaacatcatccaaatcttgatcaagttcagactgttctttgcggcgactagtatggggacncaggcggccggagtgcgcaggcagtgactcagggcggcagcggcagcagcagcgggaggagcanggagngcgccg

SEQ ID NO: 462 - DNA, 467 bp, Homo sapiens
  SIMILAR (94)..(279): 1001254mologous to Homo sapiens NAP,accession number M86667,Smith-Waterman Score=307.
  misc_feature (1)...(467): n = a,t,c or g
gcgccgcctcctgctcctcccgctgctgctgccgctgccgccctgagtcactgcctgcgcantccggccgcctggctccccatactagtcgccgcacgtcagctaactgttcagatgatgcaaaatcctcagattcttgcagcccttcaagaaagacttgatggtctggtagaaacaccaacaggatacattgaaagcctgcctagggtagttaaaagacgagtgaatgctctcaaaaacctgcaagttaaatgtgcacagatagaagccaaattctatgnaggaagttcatgatcttnaaaggaagtatgctgttctctatcagcctctatttgataagcgatttgaaattattaatgcaatttatgaacctacggaagaagaatgtgaatggaaaccagatgaagaagatgagatttcggaggaattgaaagaaaaggccaagattgaagatgagaaaaaggatg

SEQ ID NO: 463 - DNA, 798 bp, Homo sapiens
  SIMILAR (1)..(276): 901254mologous to Mus musculus putative,accession number AK002458,Smith-Waterman Score=438.
atggacgtgacagtctcggagctcctggagctcttcctgcagagcccgctggtgacctgggtgaaaacttttggcccgtttggaagcggcagccaggacaacctgactatgtacatggatttagtggacggcatctttttgaaccaaattatgctgcaaatagatcccaggcccacaaatcaacgcatcaataagcacgtcaacaatgatgtgaaccttcgcattcagaatttgaccatcttggtgagaaacattaagacctactaccaggacatgggatatggccagacacaggcctggggagcagggatcctggagagctttctcgggggaaatgtctgcctgcggctggtggggttgactggcagggaaggggtgtcctctggggaagagcggcacctgcagagctttggagacataaagcagcctgaaggttggggcgtctcttgcgggtacaggttcaggaagggagagctggaacctctggaggtggccgtgttcgtgggaacagggtcagtgggagcagctgtcatggtggccatgggagctgctaccctggaggccccagaggcactagagagcatcaaccaggaatcttcctgtggctgcataaagccttgtggaaactccctggagtggcgacagctggcccgtgcacttcttgtgagatggggtgatgattatgatgaagaaggtgaagaagcagatgaggaaggggaagaaggaggagatgaggaaaatgatccagactatgacccaaagaaggatcaaaacccaacagagtgcaagcagcagtga

SEQ ID NO: 464 - DNA, 1100 bp, Homo sapiens
  SIMILAR (1)..(276): 901254mologous to Mus musculus putative,accession number AK002458,Smith-Waterman Score=438.
atggacgtgacagtctcggagctcctggagctcttcctgcagagcccgctggtgacctgggtgaaaacttttggcccgtttggaagcggcagccaggacaacctgactatgtacatggatttagtggacggcatctttttgaaccaaattatgctgcaaatagatcccaggcccacaaatcaacgcatcaataagcacgtcaacaatgatgtgaaccttcgcattcagaatttgaccatcttggtgagaaacattaagacctactaccaggacatgggatatggccagacacaggcctggggagcagggatcctggagagctttctcgggggaaatgtctgcctgcggctggtggggttgactggcagggaaggggtgtcctctgggcaagagcggcacctgcagagctttggagacataaagcagcctgaagaggcacaaggtcgaatggtgggttcctttgagcgtacccctcagatttgtggccttgggtacaggttcaggaagggagagctggaacctctggaggtggccgtgttcgtgggaacagggtcagtgggagcagctgtcatggtggccatgggagctgctaccctggaggccccagaggcactagagagcatcaaccaggaatcttcctgtggctgcataaagccttgtggaaactccctggagtggcgacagctggcccgtgcacttcttgtgagatggggtgatgattatgatgaagaaggtgaagaagcagatgaggaaggggaagaaggaggagatgaggaaaatgatccagactatgacccaaagaaggatcaaaacccaacagagtgcaagcagcagtgaagcaggatatatgtggccttgaggataacctgcactgtcctagcctaaacacgactcttatttacttacagccttatgtctttgtattttcttggtagactgggtaatttttgttttaaaggacaggaaactgatattttaaagaccaatctgttctacctaggcatttttaactagtttttctgccagctatgttgactgcgcgaattctgacacgcatgttcattcattgctacataagttgggtcttctggaatatgttt

SEQ ID NO: 465 - DNA, 763 bp, Homo sapiens
  SIMILAR (50)..(430): 571254mologous to Mus musculus putative,accession number AK007322,Smith-Waterman Score=310.
gcacgagcaaagacatacaggatgaggtcagaaccagatgattctgatccctttccttttgatggaccagaaattatgggttgtacagggtgccagatagattggaaaaaaggaaagaatgtcactttgaaaactattaaggaagaagcagaaacacatgggacgtgggacagttcgtactgtgacctaaaacagtttccaatgattctttctttaactttttttgcccctcctgaagttcctgagagtggagatctgggatgatgatgctgaagctatccttgctgcagacttcgaaattggtcactttttacgtgagcgtataatcccaagatcagtgttatattttactggagaagctattgaagatgatgatgatgattatgatgaagaaggtgaaaaaagcggatgaggtaatgtttaccaaatgagcaaataattctctgtggttaccacatttgagaagcaaatttgaatggacttattgtattcctttgctataatcattctgtgatttgggataaaaacattttggaaaacatgattttagaatttctacaagcccaaaacaatgtatgtataaggtttcaataaataaattgcaaaactcagcaacatttttttatttcaaataattttgttctgctgcagggttatcagctctttgaagaagtcaaaagctgcagtaaacttttccaacgttggctgcagtaactattttcaataaaagctgtctggatgtctaaaaaaaaaaaaaaaaaaa

SEQ ID NO: 466 - DNA, 1511 bp, Homo sapiens
  SIMILAR (745)..(665): 421254mologous to Macaca fascicularis hypothetical protein,accession number AB055293,Smith-Waterman Score=51.
  misc_feature (1)...(1511): n = a,t,c or g
ttttttttttttttcacttttgaattctgtttatatatcaagctataaaaaacctggatcctgttcaacatacatacaaaagcagtactctaaaaaataattattattatattaacaatatcaaacacgctaactcctacacacgtacaaagaccttgggcaatcctttataaccggccacttcctggcccacagtctttgtaaggcaagtacctggggaaaaggggacaagaccccaagagagccggccccaaatcctgactcaggcactgcagaggcattagcccgggctgagtcattgcctgaggatcgaaggggcccccttctcagggctgaggaagggaacttttcagggcccggggagggaggcagagcctttagggggggagcacatgccgaggcaggggaaaacgagcttcacattttccctgggggttaggagccgaggttgnccggcaggacaggggatgaacggagggttgcggtggggcagaaataactgcctcccaaagtatgtccacgtgaacagtccccagagcctggtgactatgttaggttaaacaggccagtgggaaactaaagttgcagatggaacttaaaggtggcttaatccagctgacctgaaaattagaaagacggaccctgggttcttctgggtaggcgcaaatgtgatcattaagcgtcctttaaaagcggtagagcaggccgggtacgagtgactcatgcctataatcccagcacttttaggaggctaaggcttacaagatccccttgagccccaggagttccagacaagcctaggcaacagaatgagaccctgtatccacaaaaaatatgtagctgggcgtgggggattgtctcaggggactgagacaagaggatcacttgaaccaggaggtcccaggctgcagtgagccttgatgccatgaccaggccactgcccttccagcctgggcaacacagcaagaccctgtctcaaaaaaaaaaaaaaaaaagtggtggagggaggcacgaaaggggaagccccaatgaggtgacggggaaaaagattcaactacccacagctggctctgaagatggaggagcctgaagtcaagaattacggtcagcctctaaaaatgaaaaggccagaaatgaattctcccctagagcctccagaaggagtgcaggactgccgacaccccagatttgagccccgggtcagccttctgacccgcagaactggaagacctcgttttgatccacgaagtttgtggaaatctgtcacggcaataggaaacaaatacagaggccaaagggtcaacagtgagaggtcaagcttgccctgcccctgcccagacctcagccagacttatgggtggcaagggcccacggtgcgacccccagggcctcgtccctgccttggggaaaggggagcctgaaaaggacccacgatgtcttgcgcccctgggtaaggacacagagcacgtcgaggaagaaccctctactaagagcgctgtgggatgaagagg

SEQ ID NO: 467 - DNA, 995 bp, Homo sapiens
atgtccccctggcatttcaaataggcccaaaatttttagctttttacaaaatttagaaaccttttattagattttcctccatatgcccttacccccccctgaggtagttaggtaaacagtactacccattttaattacacagtaaacagaagcacggggaaggtgacatactcatactttaagcaataagaattagaagaaaccatagaagcttggggccttctctctagctctaacccaaagaaaatgaattttatttttttttttttaaaagaaaacagcatcaatcacttaagattttcttcctctttttttttttttttttacacttgcttattagtatagcatctcgttccaaagctggtaccttttcttcaacaatgtgttaaaaactgagtataacccttaattcaaggtaggcctctacttctacctgaattggtacaaaattaagacattatcttgtaagaactaaaattgtatttgaaatttttattttagctgcaaaaacaaaaacaagcaaacaaacaacaaataacttgaaaataggcttgtcaaatggtgtaaattcatcctttccagggaagcagaaggtagaccctaccacaaagaaaagatgcttagttaatggagggttaaatttaaaaatacagttaaaattcaggctaacttctgaaaatcccgttttattcacctcactgtggtaccagtaactatactgagtcaggttactttacagttaactatgtcacctaaaacacaataatccattaacactctaataacagttattgggtgtggtcatactggaaattcttaaccatatagttgtcttgccaattttttttttaaacaataaattgtcttagtataagtcactgcatttctgtaacaaagtaatgaaaggcacagctaatccaagcggacttaaccctattcaacaaccagctgaaaaaatactttggttcttcaagcgaaaaaattacaaaaaaaaa

SEQ ID NO: 468 - DNA, 1711 bp, Homo sapiens
  SIMILAR (240)..(662): 251254mologous to Homo sapiens NAP,accession number M86667,Smith-Waterman Score=98.
atctgctcgcggcgccgcctcctgctcctcccgctgctgctgccgctgccgccctgagtcactgcctgcgcagctccggccgcctggctccccatactagtcgccgatatttggagttcttacaacatggcagacattgacaacaaagaacagtctgaacttgatcaagatttggatgatgttgaagaagtagaagaagaggaaactggtgaagaaacaaaactcaaagcacggtcagcgtaactgttcagatgatgcaaaatcctcagattcttgcagcccgttcaagaaagacttgatggtctggtaggaaacaccaacaggatacattgaaagcctgccttagggtagttaaaagacggagtgaatgctctcaaaaacctgcaagttaaatgtgcacagaaagaaacccaacttctatgaggaagttcacgatcttgaaaggaagtatgctgttatctatcagcctctatttgataagcgatttgaaattattaatgcaatttatgaacctacggaagaagaatgtgaatggaaaccagatgaagaagatgagatttcggaggaattgaaagaaaaggccaagattgaagatgagaaaaaggatgaagaaaaagaagaccccaaaggaattccctgaatttgggttaactgtttttaaagaatgttgacttgctcagtgatatggttcaggaacacgatgaacctattctgaagcacttgaaagatattaaagtgaagttctcagatgctggccagcctatgagttttgtcttagaatttcactttgaacccaatgaaatattttacaaatggaagtgctgacaaagacattacgtgatgagttcgataccagatgaattctgatccttttttcttttgaatggaaccagaacattagggttgtacagggtgccagatagattggaaaaaaggaaagaatgtcactttgaaaactattaggaagtaggccgaaaccacaagggacgtggggacagtttcgtactgtgaactaaaaccagtttcccaatgactctttctctaactttttttgccccctcctgaagttcttggagagtgaagatcggaatgatgaatgctgaagctatccttgctgcagacttcgaaattggtcagctttttaccgtgagcgtataatcccaagatcaagtgttatattttactggagaagctattgaagatgatgatgatgattatgatgaagaaggtgaagaagcggatgaggaaggggaagaagaaggagatgaggaaaatgatccagactattgacccaaagaaaggatcaaaacccagcagagtgcaagcagcagtgaagcaggatgtatgtggccttgaggataacctgcactggtctaccttctgcttccctggaaaggatgaatttacatcatttgacaagcctattttcaagttatttgttgtttgtttgcttgtttttgtttttgcagctaaaataaaaatttcaaatacaattttagttcttacaagataatgtcttaattttgtaccaattcaggtagaagtagaggcctaccttgaattaagggttatactcagtttttaacacattgttgaagaaaaggtaccagctttggaacgagatgctatactaataagcaagtgtaaaaaaaaaaaaaaaaagaggaagaaaatcttaagtgattgatgctgttttcttttaaaaaaaaaa

SEQ ID NO: 469 - DNA, 813 bp, Homo sapiens
  SIMILAR (168)..(296): 531254mologous to Homo sapiens beta-hemoglobin,accession number M25660,Smith-Waterman Score=77.
  misc_feature (1)...(813): n = a,t,c or g
ccactgaagcgctcagatggctgtaacgacggccgacccacgcgtccgcccacgcgtccggacacaactgtgttcactagcaacctcaaacagacactattggtgcacctgactcctgtggagagagtctgccgttactgccctgtggggcaaggtgaacgtggatgaaagttggtggtaaggccctgggcaggctgctggtggtcctaccctgggaccccaaaaggtcctttnaaagccctttgggggaatctgtcccaactccctgaatgctgttaatggggcaaacccctaaaggtgaaaggctcaatggcaaaagaaaaagtgctcgggtgccctttagtggtgggcctggcttcacctgggacaaccctcaaagggcacctttgcccacactggagtgagcttgcactgttgacaagcttgccacgtgggatccctgaagaacttcagggctcctggggcaaacgtgctgggtcttgtgttgcttgggcccaatcaacttttgggcaaaagaatttcaaccccaacaagttgcaaggcttgcctaatcaagaaaattggttggcttggtgttggctaaatgcccttggccccacaagtaatcacttaagcctcgctttccttgctggtccaatttccaattaaaaggttcctttggttccctaagtccaacttattaaactggggggatattattgaaagggccttgagcatctgggattcttgcctaattaaaaaacatttattttcatcgcatacaagaataaaacaagcgcggccgattaagaggatacttcaggggcgcaagat

SEQ ID NO: 470 - DNA, 461 bp, Homo sapiens
  SIMILAR (240)..(461): 1001254mologous to Homo sapiens lympholine LAG-2,accession number A00142,Smith-Waterman Score=386.
gtggtggaattcccaccatggctacctgggccctcctgctccttgcagccatgctcctgggcaacccagcccctgcctccgcatctgcgtggtgaaggccattggccctcatcggtggatctgcgtttcctcgggcctacactgtctaggattgtgcggggctggtgagagaacaagatctcttccgtgttcaaggcagacttcctgccccctgcaccctgctctctcccaggccttgaggtctggtcttctctcgtctgagccctgagtactacgacctggcaagagcccacctgcgtgatgaggagaaatcctgcccgtgcctggcccaggagggcccccagggtgacctgttgaccaaaacacaggagctgggccgtgactacaggacctgtctgacgatagtccaaaaactgaagaagatggtggataagcccacccagagaagtgtttccaatgcc

SEQ ID NO: 471 - DNA, 418 bp, Homo sapiens
aaccatgtccactgtggtgctgctgctgcagagaagtgtttccaatgctgcgacccgggtgtgtaggacggggaggtcacgatggcgcgacgtcttgtcctgtggaagaagcacaggctcctgtcctcagatcccgggaacctcagcaacctctgccggctcctcgcttcctcgatccagaatccactctccagtctccctcccctgactccctctgctgtcctcccctctcacgagaataaagtgtcaagcaagattttagccgcagctgcttcttctttggtggatttgaggggtgggtgtcagtggcatgctggggtgagctgtgtagtccttcaataaatgtctgtcgtgtgtcccatacactgttgtagatgttatggatttagtggtgaacgagacaaccttaacgaattcc

SEQ ID NO: 472 - DNA, 4341 bp, Homo sapiens
  SIMILAR (496)..(582): 1001254mologous to Homo sapiens Human granulysin P522 active fragment,accession number AAY08326,Smith-Waterman Score=160.
catggctacctgggccctcctgctccttgcagccatgctcctgggcaacccaggtaaggccttcccctcgggatcgatcctgatggcccacccagcctcgcactctcaggctggctgaacctggagcttggactctgtgggcacccaggtgcccctgcctccccccggccttctcccccgtcatggaggcctggccctcccctcagagccaggcttagtccggtgtgctgcccagcctgtcactggcctggccaaggaggagagacaggccagggattctggtcctaactctactggccacactgtgtggcctgagacccccctttccctcccaagcccctgcctccgcatctgcgtggtgaaggccattggccctcatcggtggatctgcggttcctcgggcctacactgtctaggattgtgcggggctggtgagagaacaagatctcttccgtgttcaaggcagacttcctgccccctgcaccctgctctctcccaggccttgaggtcagtgtgagccccaagggcaagaacacttctggaagggagagtggatttggctgggccatctggatggaaggtaaaaaaagaaaatcccttgaaaggagattgagggaagtttctagacaaaccgacccccaaatctgtgttgctgggggaacagaggagaagagagagtctcgccctcctggctttctagaaggaacgtgagaacacgtgtttgtgctgagagtgggtcagagcggctccagggcaaagcatgtggacaggtatcctggccccctgcaaggcccagctcctgtcctaggccctggtcacctcctggactcccaccagccaggagaacgggctttccctctccttccgcctgcggaggggaagctgaagtctggtcttcctcaggtctggtcttctctcgtctgagccctgagtactacgacctggcaagagcccacctgcgtgatgaggagaaatcctgcccgtgcctggcccaggagggcccccaggtacgtgttggctctctgctcacctgccacagtccctctcctttccctcctccctggtggctcctggggtgaggtctggagctctctaatggtcaggaggtgggagtggaggctgggctgtttctgacgatgctggttttgttgaattcatgtctggccaggagggctacaggtatctggcagactcctccaggaggatcctctggggtctcaccctccaaggagcctggggctgcagaacccaaataggcagactcccctgggagttcctcaataggagaggggcaagtgcagggctgggaaagtactggggttgtgggaggctgtttctggggtgtctcagagcctctaagacaagcaaaagggtgggtaggggccaggcagccagttcaggccttcagtgtatccacgctctgggaagagatcacggacattcctgccggcctcagaaacacaaagggcccctttcctgggcactttcacgcgctcccagagtgtctgagagaccatcataagggctttctttcctgacagggtgacctgttgaccaaaacacaggagctgggccgtgactacaggacctgtctgacgatagtccaaaaactgaagaagatggtggataagcccacccaggtgaggccaaggggctacagagcctcctgtctgctgctcaatggaggggccagcctgtgaccaggtcggggatcggggagcccgggggcaccttgcacagtgatcctgggggagggcttcctagaagggaatctgtgagtccccgtgtgtctgtggatgaatttcagagaacttgtgaaattgtgactctctggaactgtgtaagtcagacggcagagtatacatggttttcatcatgtatcctcaaagagggcttgtcccagagaagttaggaatcttcccctaaagccctaacatttgtgtccaaggcagagtttgagaagctagttccccaagaggcctgggtcaggactgataaatcccagatctgctacttccaagctgcatggccttgggcaagtcacttccactttctgagcccctgttatcttatctttgaaatgtgatggataatagtccctatcttgcaagttgtcaaacccttttttttttttttccttgagataggatcttactctgagacccaggctggagtgcactggtgtgatcttggctcactgcaacctctgcctccctggcccaagcaattctcctgtctaagcctcctgagtacctggggctccaggtgtgcgccaccatgcccagctaatttttgtacttttgtagaaacagggtctcactgtgttgcccaggctggtctccaacttctgagctgaagcaatccacctgccttggcctcccaaagtgtgggattataggcatgagccactgcacctggctgctgaagctttttaaaagagctgagggctgggatgtgcttagctccacgtccagcactgagtaaatgcttaacgaatgactgtgttactaccaagaattattgtttcactctccctccttccctctcctctgctgccccaaactactcagcatcctggcactgcaggctcgcacttagccctggatacccagattcatcctcctcccctgggatggcatagaagagactttaaaaccaaatgagccaagactccaagctctgaccacacctcccacccccaccagtcttctctatgcaccccctctatatctggagcccccagccaggttctggaccaaggtagctacatggcagagcatttaatgtgtgcctggcagccatgggcaccattctccacacagaaggcaggggacaggtgcacaaggcgctgagaccccagcagggctaactgtccttgtctcaggagccctacctggccagtcttgggccaggccttggggactgggagtaggggctgacccgtctgtacagtctctggccccatggcaccaggtgccagctcctcgcacccagtactcccattgctagggctgctggaacctgcagggttggcagagctgggcaggactcaccctataaccatgtccactgtggtgctgctgctgcagagaagtgtttccaatgctgcgacccgggtgtgtaggacggggaggtcacgatggcgcgacgtctgcagaaatttcatgaggaggtatcagtctagagttatccagggcctcgtggccggagaaactgcccagcagatctgtgaggacctcaggttgtgtataccttctacaggtgagtgcagaggtgacagcagggatacctcctgagggttggagacagcttcccccaggatatatcaaagctgcctccttactcccccatctcccagcatgggaaagtgtggagaattgagcagatggactttagctagaaatgtttgagaaatactgattagagcttgggcttcagacacaggtggttgtggagtaaaatctggtctccatctctccctggctgtgtgaccttaagcaaataacttgacctctctgagcttcagtttcttcatctgtgaaggagagatagcaatcctgatttttgagattggaatgagaattgaaggaggtcaccgtgtgtgtggacctgaccctggggaaatgtcctcagactgaggctattcaaggtcatcagaccctcagtcaaactccaatcccagcccagcacatggcccctggggtcgggagctggggccatatcctcccccacaatcctgggccctgagatctgggctagggaacccttcaggcaggggagcatgaggcctttccctccatggctgcccaggctgtgcctggagagaacagatctcggctgtaggaaatggggccagaaaggggcctcggtgattggctctggcagctcagctggcacttgccaatagctctgggattttatgctggcagatcgggggtccccaccatttcctgtcattggagcttgtggcttttctattcaaggccccacagcctgctcaggctgccgactggcttccaggatgtgcctctgggtgtgttcagtagggtcaggtggctctgggaccttaagcaagtaacattctgagtgcctgcttctccttgaggacccaccacatctgcccacagctagctgttctctccgctccaggtcccctctgagccctctcaccttgtcctgtggaagaagcacaggctcctgtcctcagatcccgggaacctcagcaacctctgccggctcctcgcttcctcgatccagaatccactctccagtctccctcccctgactccctctgctgtcctcccctctcacgagaataaagtgtcaagcaagattttaaaa

SEQ ID NO: 473 - DNA, 928 bp, Homo sapiens
  SIMILAR (410)..(664): 701254mologous to Homo sapiens Amino acid sequence of the cDNA clone CAT-1 (HTXET53),accession number AAW59874,Smith-Waterman Score=264.
cccacgcgtccgaaggcatctcagcggctgccccaccatggctacctgggccctcctgctccttgcagccatgctcctgggcaacccagcccctgcctccgcatctgcgtggtgaaggccattggccctcatcggtggatctgcgtttcctcgggcctacactgtctaggattgtgcggggctggtgagagaacaagatctcttctgtgttcaaggcagacttcctgccccctgcaccctgctctctcccaggccttgaggtcagtgtgagccccaagggcaagaacacttctggaagggagagtggatttggctgggccatctggatggaaggtctggtcttctctcgtctgagccctgagtactacgaacttgcaaagaccccacctgcgtgatgaggagaaatccttgcccgtgccattgcccaggaggcgccctcaggggtgacctgttgaccaaaacaccagaacttggcccttgaattacaaggacctgtcctgacgattagtccaaaaaacttgaagaaagatggtggataagccccacccagagaagtgtttccaatgctgcgacccgggtgtgtaggacggggaggtcacgatggcgcgacgtctgcagaaatttcatgaggaggtatcagtctagagttacccagggcctcgttggccggaggaacttgcccagcaaaatctggtgagcacctccaggttgtgtataccttctacaggtcccctctgagccctctcaccttgtcctgtggaagaagcacaggctcctgtcctcagatcccgggaacctcagcaacctctgccgcttcctcgcttcctcgatccagattccactctccagtctccttcccctgactccctctgctgtcctcccgctctcacgagaataaagtgtcaagcaagattttaaaaaaaacaaa

SEQ ID NO: 474 - DNA, 654 bp, Homo sapiens; identical to SEQ ID NO: 244
  SIMILAR (24)..(449): 1001254mologous to Homo sapiens alpha globin,accession number V00488,Smith-Waterman Score=733.
  misc_feature (1)...(654): n = a,t,c or g

SEQ ID NO: 475 - DNA, 659 bp, Homo sapiens
  SIMILAR (67)..(498): 501254mologous to Homo sapiens Protein sequence of the di- alpha haemoglobin gene contained in pSS1,accession number AAW54282,Smith-Waterman Score=206.
  misc_feature (1)...(659): n = a,t,c or g
ccccgactcttctggtccccacagactcagagagaacccacccatggttgctgtctcctgccgacaaagaccaacgtcaagggcccgcctgggggtaaggtcggcgcgcacgctgtgcgcagtatgtgtgcggaggccctggagaggatgttcctgtccttccccaccaccaagacctacttcccgcacttcgaacctgagccacggtttctgcccaggtttaagggccacgggcaaggaaggtggccgacgcgcttgaccaacgccgtggcgcaacgtgggacggacattgcccaacgcgcttgttncgcccttgagcgacctgcacgcgcacaagctttcgggtgggacccggttcaactttcaagctccttaaggccacttgccttgctgggttnaccctgggccgcccacctccccgcccgagttcaacccctggcggttgcaagccttccctgggacaaagtttcctgggcttcttgttgaagcaccgtgcttgaacttccaaatacccgttaaagcttggaagcctcgggtgggccatgcttctttgcccctttgggcctttcccccagcccctcctcccctttcctgcacccgtacccccgtggtctttgaaataaagtcttgagtgggcggcaaaaaaaaaaaaaaaaaaa

SEQ ID NO: 476 - DNA, 474 bp, Homo sapiens
  SIMILAR (2)..(472): 981254mologous to Oryctolagus cuniculus pyruvate kinase,accession number U44751,Smith-Waterman Score=776.
catctgtgctactcagatgctggagagcatgatcaagaagccccgccccactcgggctgaaggcagtgatgtggccaatgcagtcctggatggagccgactgcatcatgctgtctggagaaacagccaaaggggactatcctctggaggctgtgcgcatgcagcacctgatagctcgtgaggctgaggcagccatgttccaccgcaagctgtttgaagaacttgtgcgagcctcaagtcactccacagacctcatggaagccatggccatgggcagcgtggaggcttcttataagtgtttagcagcagctttgatagttctgacggagtctggcaggtctgctcaccaggtggccagataccgcccacgtgcccccatcattgctgtgacccggaatccccagacagctcgtcaggcccacctgtaccgtggcatcttccctgtgctgtgcaaggacccagtccaggaggcctg

SEQ ID NO: 477 - DNA, 419 bp, Homo sapiens
  SIMILAR (1)..(387): 971254mologous to Mus musculus putative,accession number AK007869,Smith-Waterman Score=673.
atggcggctgggaccctgtacacgtatcctgaaaactggagggccttcaaggctctcatcgctgctcagtacagcggggctcagggccgcgtgctctccgcaccaccccacttccattttggccaaaccaaccgcacccctgaatttctccgcaaatttcctgccggcaaggtcccagcatttgagggtgatgatggattctgtgtgtttgagagcaacgccattgcctactatgtgagcaatgaggagctgcggggaagtactccagaggcagcagcccaggtggtgcagtgggtgagctttgctgattccgatatagtgcccccagccagtacctgggtgttccccaccttgggcatcatgcaccacaacaaacaggttctagagccttctttccgccaggcctttcccaataccaa

SEQ ID NO: 478 - DNA, 2354 bp, Homo sapiens
  SIMILAR (111)..(1718): 821254mologous to Homo sapiens cytosolic thyroid hormone- binding protein (EC 2.7.1.40),accession number M26252,Smith- Waterman Score=2148.
ggctgaggcagtggctccttgcacagcagctgcacgcgccgtggctccggatcttcttcgtctttgcagcgtacgcccgagtcggtcagcgccggaggacctcagcagccatgtcgaagccccatagtgaagccgggactgccttcattcagacccagcagctgcacgcagccatggctgacacattcctggagcacatgtgccgcctggacattgattcaccacccatcacagcccggaacactggcatcatctgtaccattggcccagcttcccgatcagtggagacgttgaaggagatgattaagtctggaatgaatgtggctcgtctgaacttctctcatggaactcatgagtaccatgcggagaccatcaagaatgtgcgcacagccacggaaagctttgcttctgacccctacctctaccggcccgttgctgtggctctagacactaaaggacctgagatccgaactgggctcatcaagggcagcggcactgcagagctggagctgaagaagggagccactctcaaaatcacgctggataacgcctacatggaaaagtgtgacgagaacatcctgtggctggactacaagaacatctgcaaggtggtggaagtgggcagcaagatctacgtggatgatgggcttatttctctccaggtgaagcagaaaggtgccgacttcctggtgacggaggtggaaaatggtggctccttgggcagcaagaagggtgtgaaccttcctggggctgctgtggacttgcctgctgtgtcggagaaggacatccaggatctgaagtttggggtcgagcaggatgttgatatggtgtttgcgtcattcatccgcaaggcatctgatgtccatgaagttaggaaggtcctgggagagaagggaaagaacatcaagattatcagcaaaatcgagaatcatgagggggttcggaggtttgatgaaatcctggaggccagtgatgggatcatggtggctcgtggtgatctaggcattgagattcctgcagagaaggtcttccttgctcagaagatgatgattggacggtgcaaccgagctgggaagcctgtcatctgtgctactcagatgctggagagcatgatcaagaagccccgccccactcgggctgaaggcagtgatgtggccaatgcagtcctggatggagccgactgcatcatgctgtctggagaaacagccaaaggggactatcctctggaggctgtgcgcatgcagcacctgattgcccgtgagcacgatggctgccatctaccacttgcaattatttgaggaactccgccgcctggcgcccattaccagcgaccccacagaagccaccgccgtgggtgccgtggaggcctccttcaagtgctgcagtggggccataatcgtcctcaccaagtctggcaaggtctgctcaccaggtggccaagataccgcccacgtgcccccatcattgctgtgacccggaattccccagacagctcgtcaggcccacctgtaccgtggcatcttcccatgtgctgtgaagggacccagttccaggaggcctgggctgaggacgtggacctccgggtgaacttttgccatgaatgtttggcaaggcccgaggcttctttcaagaaaggggagatgtggttcattgtgctgaccggaatggcgcccctggctccggctttcaccaacaccatgcgtgttgttcctgtgcccgtgatggaccccagagcccctcctccaagcccctgtcccacccccttcccccagccccatccattaggccagcaacgctttgtagaacttcactctggggctgtaacgtggcactggtaaggttgggacaacagggaagaagatcaacgcctcactgaaacatggctgtgtttgcagcctgctcttagtgggacaagcccagagcctgggttgcccatcagtgtggccccacccaatcaagggaagaaggaggaatgctggactggaggcccctggagccagatggcaagagggtgacagcttcctttcctgtgtgtactctgtccagttcctttagaaaaaatggatgcccagaggactcccaaccctggcttggggtcaagaaacagccagcaagagttaggggtccttagggcactgggctgttgttccattgaagccgactctggccctggcccttacttgcttctctagctctctaggcctctccagtttgcacctgtccccaccctccactcagctgtcctgcagcaaacactccaccctccaccttccattttcccccactactgcagcacctccaggcctgttgctatagagcctacctgtatgtcaataaacaacagctgaagcacc

SEQ ID NO: 479 - DNA, 1469 bp, Homo sapiens
  SIMILAR (200)..(271): 1001254mologous to Homo sapiens non-functional folate binding protein,accession number AF000381,Smith-Waterman Score=125.
ctgtattgttatttttcgtcactacctccccgggtcgggagtgggtaatttgcgcgcctgctgccttccttggatgtggtagccgtttctcaggctccctctccggaatcgaaccctgattccccgtcacccgtggtcaccatggtaggcgcggcgactaccatcgaaagttgatagggcagacgttcgaatgggtcgtcgccgccacggggggcgtgcgatcggcccgaggttatctagagtcaccaaagccgccggcgcccgacccccggaacccaaagactttggtttcccggaagctgcccggcgggtcatgggaataacgcccgccgcatcgccggtcggaatcgtttatggtcggaactacgacggtatctgatcgtcttcgaacctccgactttcgttcttgattaatgaaaacaattctggcaaatgcctttcgttttggtccgtcttgcgccggtccaagaatttcacctctagcggcgcaatacgaatgcccccggccgtccctcttaatcatggcctcaggttccgaaaaccaacaaaatagaaccgcggtcctattccattattaactagctgcggtatccaggcggctcgggcctgctttgaacactctaattttttcaaagtaaaacgcttcgggccccgcgggacactcagctaagagcatcgagggggcgccgagaggcaaggggcggggacgggcggtggctcgcctcgcggcggaccgcccgcccgctcccaagatccaacttccgagctttgtgcccgcagcactctttaatatccgctattggagcttgaaactaccccggttgttggcaacacacttgccctccaatggatccctcgttaaagggatttaaagtggacttcattccaattacagggcctcgaaagagcccctgtattgttatttttcgtcactacctcccccgggtcgggagtgggtaatttgcgcgcctgctgccttccttggattgtggtagccgtttctcaggctcccctctcccggaaatcgaacccttgattccccgttcacccgtggtcaccatggtcggcacggcgactaccatcgaaagttgatagggcagacgttcgaatgggtcgtcgtccgccgccacgggggggcgtgcgatcggcccgaggttatctagagtcaccaaagccgccggcgcccgccccccggccggggccggagaggggctgaccgggttggttttgatctgataaatgcacgcatccccccccgcgaagggggtcagcgcccgtcggcatgtattagctctagaattaccacagttatccaagtaggagaggagcgagcgaccaaaggaaccataactgatttaatgagccattcgcagtttcactgtaccggccgtgcgtacttagacatgcatggcttaatctttgagacaagcatatgctactggcctcgagccgaatttgccgatgcgcgg

SEQ ID NO: 480 - DNA, 406 bp, Homo sapiens
  SIMILAR (403)..(311): 1001254mologous to Homo sapiens Human secreted protein encoded by 5' EST SEQ ID NO: 218,accession number AAY13204,Smith- Waterman Score=161.
tcgtaagacacaaaccaccagacgtgggcctgggctctgggctgggccaggtggatgaaggggaggctggtggtccaggcggctgctcttggctgcagggtttctgggcacacatccgggtagcacgcatcctggccttcagcaacctcgttttaaatgggaccacaccaggagcagccagggcgctttcattttcactttctttccccgggggggacaggaacattcctttacctcctgaggaaatcgggctcttccagagccacagaggagtgaaggccccagcccttcacgatgctgcgcggctatgtttgggtctgtccatcagggagaaagaaaaaccggccgagtcttgcacagggtcctcgacagcaaccccaggtaaagagcagagcaagccgtccaa

SEQ ID NO: 481 - DNA, 491 bp, Homo sapiens
  SIMILAR (324)..(491): 631254mologous to Bos taurus guanylate kinase,accession number X67029,Smith-Waterman Score=167.
aatcgagatcgtagcaatagcggggaattcacggtctcagttccccaccaccttcccccagaacctgttggtctccagtccccatcccattaccaccaactcccaactccccactggaacccagcagtctcgtatctccatcagtgaggacagtgtgagaaatggtgtctggctcaggcacttggcagcagcttgaggggtcctcagatgtctcctgcccagcaaggatctgactaaagcagtcgtgggtgtgggaggggcctgcaggcatgcctgggttgggggcagctggccctgggcaccctggtgcaggtccagtctgccctctggatggcccctcctcttacccatattactactttgtaaccagggaggtgatgcagcgtgacatatcagccggcgacttcatcgagcatgccgagttctcggggaacctgtatggcacgaggtgggccatgcgtgggtgtgggtgggctcccagggttgctgtt

SEQ ID NO: 482 - DNA, 1155 bp, Homo sapiens
  SIMILAR (324)..(863): 471254mologous to Homo sapiens AA sequence (III) of a polypeptide having human haematopoietic cellgrowth potentiating factor (HCGPF) activity,accession number AAP70243,Smith-Waterman Score=270.
  misc_feature (1)...(1155): n = a,t,c or g
gcgaccgccctgggccgggccccaccggacggcttgctctgctctttacctggggttgctgtcgaggaccctgtgcaagactcggccggtttttctttctccctgatggacagacccaaacatagccgcgcagcatcggtgaagggctggggccttcactcctctgtggctctggaagagcccgattttcctcaggaggcatgtcgggccccaggctggtggtgctaagcgggccttcgggagctgaggaagagcaccctgctgaagaggctgctccaggagcacagcggcaatctttggcttcagcgtgtcccgtgagtccagggctctcgtggagggataccacgaggaacccgaggcccggcgaggggagacggcaaaagattacttactttgtaaccagggaggtgatgcagcgtgacatagcagccggcgactttcatcgagcatgccgagtttctcggggaacctgtatgggcacgagcaaggttggcggtgcaggctgtgcaggcantgtaaccgcatcgtgtgtgcttggacgtggaacttgcaagggtgtgcggaacatcaggcccaccgatctgcggcccaatctacatcttctgttcagcccgcctttcactgcaacttgctggaagcagccgggcttccggcagccgcaacaacttgaaaccgaaggaagagcctggttgaaagcgggcttgctgcttgcccaggccgaacatggaagagccagccaaggaagccccggccctgtttgaatgtggtccatccattaaacgaccagcctggaacccaggcctaacgcagagctgaaggaggcgctctctgaggaaatcaagaaagctcaaaggaccggcgccctgaggcttgctgtctgttctcggccnccccgggcccatacaggaccagggcagcgagcattgagccatcccccttggcaggcgatacggcagctctgtgcccttggccagcatgtggagtggaggagatgctgcccctgtggttggaacattccgtggggtgacccctcgtatccagccatcgctgggctgtcccctgtccctatctctcactctggacccagggctgacatcctaataaaataactgttggattagaaaaaaaaaaaaaaaaaaaaaaaaaaaatttcat

SEQ ID NO: 483 - DNA, 1602 bp, Homo sapiens
  SIMILAR (1)..(117): 941254mologous to Homo sapiens Human secreted protein, SEQ ID NO: 5576,accession number AAG01495,Smith-Waterman Score=198.
  misc_feature (1)...(1602): n = a,t,c or g
atggtctacggggcttctgaggcaatcgggcagcgtcagtcttcagccgctaagccaagaaggagtcagtcagagagccttgggccagagttccaggggctctgggagtggctgccaggaaagcgggacttgccgctaagggtgaaggagaaggggttgaggggtacttgcccctgccccaggaaagcgggacttgctgctaagggtgaaggagaaggggttgaggggttcttgcccctgccccaggaaagcagagaagggaacaggaggacaggagactggtctcctaagggaggtcccccgatccgagtcacggcaccaaatttcatgcgtgtctgtgtgaagagaccaccaaacaggctttgtgtgagcaacatggctgtttatttcacctgggtgcagaaaaagaaatcatctttggcattttcttcagttgtcacatcagatcttaaaagcaagaagagaagactttcagggaagagcctggagaccagctcggcgtccctgatggtctacggggcttccgaggcgaccgggcagcgtcagtcttcagccgctaagccgagaaggagtcagtcagagagtcttgggccagagttccaggggctccgggagtggctgccagcgatttccaatagatttctgcgtggccttgacacagacagctagtgtgaatccccgcccacagaggggcggcacgttggttgccgtacaacgtggtggttccctgcatctctgcccacgtcggagaggtgcgtcggcttccgtacaacacggatactctctctctgacgcaacttcctgtcctgcgcaattctatttgacctttgaactggcaaaggcttttttcttcctcttccggggacgttgtctgcaggtatggatgttgttctcttttccctgtctttatttccttaccaatcggctgccatccgaggagctgaggaagcctagagctctcagaagcagtcctttgagctggtgtaggggtaaggggcacaacagggaggttggtggtgaggaagttccttactttgatctttggaaatcccttgttcctggtggcacctccaaagccgcactcagaatggtcccagcgtttgacatacccgacgtaggccttccccctacaatacagccctctaacaaaacctaggctgtccccgaaccccgatggtaatagaatctgtttaccgtttatacccaagaaggttgggaaagcaccccaatntctgcatgtggtgtgtgccccaggcagacttcgagggggttcgtgctgtaagacctaaagtttcttatgaagattgtccaaaacaaagaaacatgtcagcagggcctatgggtggttccattgtgtgctaaaatgtggtcgtgaccaggatcaaagcgtgcttttcccttatcggagggagcaggaaaattcgttgtggaaaaagtgtttgaagggcaccaagccacaggagtccaggaaagctaaaattaaaaaaatggaacctttttttggagtaattaaaaattgaaaagacgctgtcccaataggaaaaagttgggtgtgctgggagctacctcacctcagctttgangagagcccatttgttttgc

SEQ ID NO: 484 - DNA, 861 bp, Homo sapiens
  SIMILAR (585)..(668): 781254mologous to Homo sapiens Human IGFAM-14 immunoglobulin,accession number AAY96302,Smith-Waterman Score=121.
  misc_feature (1)...(861): n = a,t,c or g
cacccctccttgggagaatcccctagatcacagttcctcaccatggactggacctggagcatccttttcttggtggcagcaacaacaggtgtccattcacaggttcacctggtgcagtctggagctgaggtgaagaagcctggggcctcagtgaaggtctcctgcaaggcttcttttaattcctttgacacatatggtttcaactgggtgcgacaggcccctggacaaggccttgagtggatggggtgggtcagcgcttttaatggtgacacaaattatattcgaaaactccagggccgagtcaccatgaccacagactcatccacttccactgcctatctggaactgaggagtctcaaatctgacgactcggccatttattactgcgcggccactaactccgacaaatatttttggggccagggaaccctggtcaccgtctccgcagcatccccgaccagccccaaggtcttcccgctgagcctctgcagcacccagccagatgggaacgtggtcatcgcctgcctggtccagggcttcttcccccaggagccactcagtgtgacctggagcgaaagcggacagggcgtgaccgccagaaacttcccacccagccaggatgccttcggggacctgtacaccacgagcagccagctgaccctgccggccacacagtgcctaacccggnaagccgtgacatgccacgtgaagcactacacgaatcccaaccccaagagnggatgggccctggcccagattcccttaaattccaacttaccccatcttccttaacttcaacttaccccaatttccctatgctggccaccccccgattgtcactggaaccgaccgggcccctgg

SEQ ID NO: 485 - DNA, 1740 bp, Homo sapiens
  SIMILAR (63)..(839): 511254mologous to Homo sapiens Human immune system associated protein HISAP-5,accession number AAB36207,Smith-Waterman Score= 577.
  misc_feature (1)...(1740): n = a,t,c or g
ccagccctgggattttcaggggttttcagtcggtgatcaggactgaacagagagaactcaccatggagtctgggctgaactggcttcttcttgtggctgttttaaaaggtgtccagtgtgaggtgcagatattggagtctgggggaggccaggtgcagccgggggggtcccgaacactctcctgtgcagcctctgggttcatcttttccaactatgtcatgacctgggtccggcaggctccagggaaggggctggagtgggtctcaagtactgctgcctccggtgcgaacaccttctatgcagaatctgtgaagggccgcttcaccgtctcccgagagaactccgagaacatgatgtatctgcaaatgagcagcctgagagacgaggacacgggcatttattactgtgcgaaagatggcgacgttccgaacttgggagttgcttggatagtagcaggccccggcaatgtaaggccgcgcaagtggttcgacgcctggggccaagggaccacggtcaccgtctcgtcagcatccccgaccagccccaaggtcttcccgctgagcctctgcagcacccagccagatgggaacgtggtcatcgcctgcctgcctggtccagggcttcttcccccaggagccactcagtgtgacctggagcgaaagcggacagggcgtgaccgccagaaacttcccacccagccaggatggcctccggggacctgtacaccacgagcagccagctgaccctgccggccacacagtgcctagcccgccaagtccgtgacatgccacgtgaagcactacacgaatccccacccagatgttgatggggccctgcccagttccctcaactccacctaccccatctccctcaactccacctaccccatctccctcatgctgccacccccgactgtcactgcaccgaccgggccctcgaaggacttgtttttaggttcagaagcgaacctcacgtgcacactgaccggccttgagagatgcctcagggtgtcactttcaatctgaaggccttcaagtggggaagagcgctgttcaaggaccaacntgaggcgtgaccctctgtggctgnctacagcgtggtccagttgtcttgccggggctggcgcgaagccatggaaccattggtaagacctttcacttgcactgctgccctaccccgtagtccaaggacccgcgctaaccgcccaccctcttcaaaatccgggaaacacatttccgggcccgagggtccaccctgctgccgcccgccgtcggaggagctggccctgaacgagctggtgacgctgacgtgcctggcacggcgctttcagcccccaaggaccgtgttgggttcgctggttgcaggggtccccaaaacttcccccgcgaaaaagtacctgacttgggcattcccggcaggagcccaggcaagggcacccaccaccttcgctgtgaccagcatattggggcgtggcaacccgaggattggaagaagggggacacctttttcctgcatggctggccacgatggccctcgcgctggccttcacacagaagaccatcgaccgcttggcgggtaaacccacccatgtcaatgtgtctgttgtcatggcggaggtggacggcacctgctactgagccggccccgcctgtccccacccctgaataaactccatgctcccccaaaaaaaaaaaaaaaaaaaaaaaaaaaaaaaaaaaaaaaaaaaaaaaaaaaaaaaaa

SEQ ID NO: 486 - DNA, 514 bp, Homo sapiens
  SIMILAR (121)..(201): 1001254mologous to Homo sapiens ferritin heavy subunit,accession number M12937,Smith-Waterman Score=134.
  misc_feature (1)...(514): n = a,t,c or g
tcgtcggggttncntgcttcaacagtgcttggacggaacccggcgctcgttccccaccccggccggccgcccatagccagccctccgtcacctcttcgccgcctctccttagtcgccgccatgacgaccgcgtccacctcgcaggtgcgccagaactaccaccaggactcagaggccgccatcaaccgccagatcaacctgggagctctacgcctcctacgtttacctgtccatgtcttactactttgaccgcgatgatgtggctttgaagaattttgccaaataatttctttcaccaatnttcatggagggagaggggaacatgcttgaggaaattgatggaagcttgcagaaaccaangaggttggcccgantctttcnttcagggttanttcaaggaaaaccaggatttttgatggatttggggnagaagnggggttgaantgcanttgggattgttgcatttaacaattttgggaaaaaantgttggantcagttcaattatttgggaat

SEQ ID NO: 487 - DNA, 1642 bp, Homo sapiens
  SIMILAR (1257)..(1394): 971254mologous to Homo sapiens Similar to protease (prosome, macropain) 26S subunit, ATPase 1,accession number BC000512,Smith- Waterman Score=230.
aattccggcggaagtggtggaggaacttccggcagcggcagctcaagtggccaaggcaagatgggtcaaagtcagagtggtggtcatggtcctggaggtggcaagaaggatgacaaggacaagaaaaagaaatatgaacctcctgtaccaactagagtggggaaaaagaagaagaaaacaaagggaccagatgctgccagcaaactgccactggtgacacctcacactcagtgccggttaaaattactgaagttagagagaattaaagactatcttctcatggaggaagaattcattagaaatcaggaacaaatgaaaccattagaagaaaagcaagaggaggaaagatcaaaagtggatgatctgagggggaccccgatgtcagtaggaaccttggaagagattattgatgacaatcatgccatcgtgtctacatctgtgggctcagaacactaccgtcagcattctttcatttgtagacaaggatctgctggaacctggctgctcggtcctgctcaaccacaaggtgcatgccgtgataggggtgctgatggatgacacggatcccctggtcacagtgatgaaggtagaaaaggccccccaggagacctatgcagatattggggggttggacaaccaaattcaggaaattaaggaatctgtggagcttcctctcacccatcctgaatattatgaagagatgggtataaagcctcctaagggggtccatccttttggtcccacctggccacgggtaaaacctttttgcccaaggcagtagcaaaccaaaccctcagccactttcttgagagtggttggctctgaacttattcagaagtacctaggtgatgggcccaaaacccctcccgggaattgttccggagtttctgaagaactggccccgtccctccggtttattgatagaattttgcccccattgggacacaacagatatgacctccaattcctggtgtgagaagagaattacagcgaacaatgtttggaactgctgaacccagttgggatggatttgattcttaggggagattgtgaaagttatcatggccacaaaccgaataggaaacttggatcccagcacttatcagaccaggccgcattgacaggaagattgagttccccctgcctgatgaaaagacgaagaagcgcatctttcagattcacacaagcaggatgacgctggctgatgatgtaacccctggacgacctgatcatggctaaagatgacctctctggttgctgacatcaaggcaatctgtacagaagctggtctgatggccttaagagaacgtagaatgaaagtaacaaatgaagacttcaaaaaatctaaagaaaatgttctttataagaaacaggaaggcacccctgagggggtggtatctctaatgaaccatggcttgtcatcaggaaaatggttgggagatttctcaatccctgaaagggatgaggttggggggagttgcccagaggaatccctgttcccactgattttttattagcaaaacatcctgtgtcttttggagtacgatgtgtaagtgcccattgggtggcctgttggtcactgtgcatcagtctgctttcccaataaagggtgctttttcccaaacaaaaaaaaaaaaaaaaa

SEQ ID NO: 488 - DNA, 1426 bp, Homo sapiens
  SIMILAR (21)..(1142): 531254mologous to Homo sapiens homologue to elongation factor 1-gamma from A.salina,accession number X63526,Smith-Waterman Score =816.
cccacgcgtccggaatcaccatggcggctgggaccctgtacacgtttttctgttaactggagggccttcaaggctctcatcgctgctcagtacagcggggctcaggtccgcgtgctctccgcaccaccccacttccattttggccaaaccaacgcgcacccctgaagttctccgcaaatttcctgccggcaagggcccagcatttgagggtgatgatggattctgtgtgtttgagagcaacgccattgcctactatgtgcagcaatgaggagctgcggggaagtactccagaggcagcagcccaggtggtgcagtgggtgagctttgctggattccgatatagtgcccccagccagtacctgggtgttccccaccttgggtcatcatgcaccacaaacaaacaggccacttgagaatgcaaagggaggaagtgagggcgaattctggggctggttgaatgcttacttgaagacggaggacttttgctggggggcgaacgtagagcgattgtctggtatcacagttgtctggcaccctgttgtggctctataagcaggttctaagagccttctttccgccaagcctttcccaataccaacccgctggttcctcacctgcattaaaccagccccagtttccggctgttcttggggggagtgaaacttgtgtgagaagattggccccatttggagcctaaaaagttttgcagagaccccaacctaaaaaaggacacaccacgggaaagaagaagggttcaccgggaagaagaagcagaagccccaggctgagcggaaggaggagaaaaaggcggctgcccctggttcctgagggaggagatggatgaatgtgagcaggcgctggctgctgagcccaaggccaaggaccccttcgctcacctgcccaagagtacctttgtgttggatgaatttaagcgcaagtactccaatgaggacacactctctgtggcactgccatatttctgggagcactttgataaggacggctggtccctgtggtactcagagtatcgcttccctgaagaactcactcagaccttcatgagctgcaatctcatcactggaatgttccagcgactggacaagctgaggaagaatgccttcgccagtgtcatccttttggggaaccaacaatagcagctccatttctggagtctgggtcttccgaggccaggagcttgcctttccgctgagtccagattggcaggtggactacgagtcatacacatggcggaaactggatcctggcagcgaggagacccagacgctggttcgagagtacttttcctgggagggggccttccagcatgtgggcaaagccttcaatcagggcaagatcttcaagtgaacatctcttgccatcacctagctgcctgcacctgcccttcagggagatgggggtcattaaa

SEQ ID NO: 489 - DNA, 1282 bp, Homo sapiens
  SIMILAR (236)..(814): 401254mologous to Homo sapiens apoferritin H chain,accession number X00318,Smith-Waterman Score=180.
agcgatagaacactgtcagagtggtgacaaccccgagagtcgtcggggtttcctgcttcaacagtggcttggacggaacccggcgctcgttccccaccccggccggaccggccatagccagcctcccgtcacttttcaccggcacccctcggattgccaaaggtcccccgccggccgcttcaagggcgggccaagccaccgcggccagccgccgccttttcataagtcgccgcccatgacgacagcgcgtcccacctcgcaaggtgcgccagaacgtaccaccagggactcagaggccgccatcaaccgcacagatcaacctggaggctctacgcctcctacgtttaccctgtccatgtcttactactttgaccgcgatgaatgtggctttgaagaacttttgccaaatactttcttcaccaatctcatgaggagaggggaacattgctgagaaaacttgatgaaagcttgcagaaccaacgaaggttggccgaatctttcctttcaggatattaaagaaaccaagacttgtgatgacttgggagagcggggctgaatgccaatggaagtgtgcattacattttggaaaaaaatgttgaatcaagtcactactggaacttgcacaaactgggccactgacaagaactgacccccaatttgtgtggacttcatttgagacacatttaccttgaatgagcagggtgaaaggccatcaaaagaatttggggtgaccacggtgacccaaactttggcgcaagatgggaagcgccccgaatcttggctttggcgaatatctcttttgacaaagcacaccctggggagacagtgataatgaaagctaagcctcgggctaatttccccaatagccgtggggtgactttcctggtcaccaaggcagtgcatgcatgttggggtttcctttaccttttctataagttgtaccaaaacatccacttaagttctttgatttgtaccattccttcaaataaagaaatttggtacccaggtgttgtctttgaggtcttggatgaatcagaaatctatccaggctatcttccagattccttaagtgccgttgttcagttctaatcacactaatcaaaaagaaacgagtatttgtatttattaaactcattagtttgggcagtatactaaggtgtggctgtcttggattcagatagaactaagggttcccgactctgaatccagagtctgagttaaatgtttccaatggttcagtctagctttcacagtttttatgaataaaaggcattaaaggctg

SEQ ID NO: 490 - DNA, 637 bp, Homo sapiens
  SIMILAR (47)..(412): 991254mologous to Homo sapiens gamma-G globin,accession number X55656,Smith-Waterman Score=637.
  misc_feature (1)...(637): n = a,t,c or g
ggaacgtctgaggttatcaataagctcctagtccagacgccatgggtcaagcctgtggggcaaggtgaatgtggaagatgctggaggagaaaccctgggaaggctcctggttgtctacccatggacccagaggttctttgacagctttggcaacctgtcctctgcctctgccatcatgggcaaccccaaagtcaaggcacatggcaagaaggtgctgacttccttgggagatgccataaagcacctggatgatctcaagggcacctttgcccagctgagtgaactgcactgtgacaagctgcatgtggatcctgagaacttcaagctcctgggaaatgtgctggtgaccgttttggcaatccatttcggcaaagaattcacccctgaggtgcaggcttcctggcagaagatggtgactggagtggccagtgccctgtcctccagataccactgagctcactgcccatgatgcagagctttcaaggataggctttattctgcaagcaatacaaataataaatctattctgctaagagatcccnnnnnananaaaaaaaanaaaaaancttggttnttccccacccattttaaacancanttttcangacttaaaaaagggaaactcaacagatcctta

SEQ ID NO: 491 - DNA, 710 bp, Homo sapiens
  SIMILAR (431)..(24): 501254mologous to Homo sapiens PRO2987,accession number AF116719,Smith-Waterman Score=234.
aattttgccctcgaggccaagaattcggcgagggcaataagctcctagtcccagacgcccatggggtcatttcacagaggaggaccaaggctactatcgacaagcctgtggggcaaaggtgaatgtggaaagatgctggaggaagaaaacccctgggaaaggctccctggttgtctaccccatggacccagaggttctttgacagctttggcaacctgtcctctgcctctgccatccatgggcaaacccccaaagtcaaggcacatggccaagaaggtgctgactttccttgggagatgccaacaaagcacctggatgatctcaaagggcacctttgcccaagcctgaagtgaactgcacttgtgacaaagctgcatgtggatcctgagaacttcaaagctcctggggaaatgtgctggtgacccgttttgggcaatcccattttcggcaaaagaattcacccctgaaggttgcagggcttcctgggcagaaagatgggtgacttggagttggccagtgccctgttcctccagataccactgaagcctcttggcccatgaattcagaagctttcaaggataaggcttttattcttgcaagcaattacaaataataaatctatttctgctaagagatcacacatgattttcttcagctcttttttttacatctttttaaatatatgagccacaaagggtttatattgagaa

SEQ ID NO: 492 - DNA, 1236 bp, Homo sapiens
  SIMILAR (868)..(1233): 1001254mologous to Homo sapiens BTG1,accession number X61123,Smith-Waterman Score=655.
atgggagaagcatttgcacaggagaacatggcagagaacccttatatttctgtagtcaattctcatattttaaacaattgggaatttcccaaatggtcactcgatgattctacaaaggtacaactcaactcgatgaagctgggtggaacagaaatggctccgcggcgttggcagctcgtctgcgaggggaccctggctccccgaggctgcagtcctttttcttggacagaacgccccgcaggaccgttccctccactttcccccgcactaaggcagcgcaccgccagcacacacagcgctggcgcccgcatcgcgccgcaccacacgcgtctccggcttgaggagccagtcaccgagacccggagcgggaacgagatccttccgcccggtgaggaagcccggggtggctgctccgccgtcggggccgcgccgccgagccccagccgccccgggccgcccccgcacgccgcccccatgcatcccttctacacccgggccgccaccatgataggcgagatcgccgccgccgtgtccttcatctccaagtttctccgcaccaaggggctcacgagcgagcgacagctgcagaccttcagccagagcctgcaggagctgctggcaggtgagcagggcgagggcgtcggagggacgcgggccccacatccctgggtcagagtccggccgtcggggctgcgggaacctcggcagcgccccggggccggtcgcgcttgggccccgccgcgggaccgctggcaaaacggagaggagaagacaacacgcacaacaaagaaacttaagcccaccgaggcgggagctgcggtccgaggaccgtcggcggatttggggacaaaggagccgtggggctgggaacattataaacatcactggttcccagaaaagccatgcaagggatcgggttaccgttgtattcgcatcaaccataaaatggatcctctgattggacaggcagcacagcggattggactgagcagtcaggagctgttcaggcttctcccaagtgaactcacactctgggttgacccctatgaagtgtcctacagaattggagaggatggctccatctgtgtgctgtatgaagcctcaccagcaggaggtagcactcaaaacagcaccaacgtgcaaatggtagacagccgaatcagctgtaaggaggaacttctcttgggcagaacgagcccttccaaaaactacaatatgatgactgtatcaggttaa

SEQ ID NO: 493 - DNA, 1912 bp, Homo sapiens
  SIMILAR (332)..(883): 421254mologous to Homo sapiens BTG1,accession number X61123,Smith-Waterman Score=198.
cctctcggagctggaaatgcagctattgagatcttcgaatgctgcggagctggaggcggaggcagctggggaggtccgaacaatggtgacaggccggccatggctcgtctcttcctctctcctgccgcctccctgtctcgaaaatacctttttaagtctaaagaaagaaagacaaagagtagttgttcggcgcttaaggcctcttcttctctctaagcctccgcccggttgagaaagcccgggggtgggctgctccgcccgtcgggggccgcgcccgcgaagccccgggccgcccccggccgcccccggcacgccgcgcccccatggcatcccattatacacccgggccggccaccaatgatagggcgagattcgccgccggccgtgtaccttcatctccaagtttctccggccccaagggggctcagcgagcgagcgacagcttccagaccttcaagccagagcctggcaggagctgctgggcagaccatttaataaacattcactggtttcccagataaagcccatgcaaagggatcggggttacccgttgtattccgcatcaacccataaaaatggatccctctgattggaccaggccagcacagcgcgattggactgagcagtcaggagctgttcaggcttctccccaagtgaactgcacactctggggttgaccccctattgaagtgtcctacagaattggagaggatggctcccatctgtgtgcctgtatgaagccctcacccgccaggaggtagcacctcaaaaccagacccaacgtgcaaatggtatgacagcccgaatcagctgtaaggaggaacttctcttgggcagaactgagcccttcccaaaaactacgaatatgatgactgtatcaggttaagatatagtctgtggatgggatcatctgatgatgatggataaatttgagtttttgctttgggtgggctcctcttggggatggattatggaatttaaacccatgtcacaagctgtgaaagatctgggcacaaaataagaatggtaaaaaaaaaaaaaaattttaagtgacagtgccatagttttggacaggaccttttcaatgattaattttaatagcctgtgagtccaagtaaatgatcactttatttgctagggagggaagtcctagggtggtttcagtttctcccagacataccccaaaattttacacccccacctctttagagaaaactctgttttccaagaatctttcctctgcgagaaaatctcgcagggggaatttgcgcccttttacccttggagaggtggtaatggtaaccctttccggcagcttttaatggggaaggttaaaccgttttaaaacatggggtagtaactggggaaattttaccaagacttttaccctagcactttaaatatgtattaaaatgtacataaagcaaaactaggtaaggccatgaccctgggggaaaatggtcagaccctggtatggtgttttttgggcccttgaaagtagccaagtgaccaggaatctgccatggccaacaggctttaaaaaagacccttaaaaagacactgtctccactggtggtgttagcaccagccagctctctgaccatttgctaggttgtagtttttttagaccgaagtaaccttcttatttttagaaagtggaggtctggtttgtaactttccttgtacttaattgggtaaaagtcttttccaccaaaccaccatctattttgtgaactttgttagtcatcttttatttggtaaattatgaactgggtgtaaatttgtacagttcatgtatattgattgtggcaaagttgtacagatttctatattttgggatgagaaatttttccttctctctataataaatccgtttcttatcttggcattttaacaaaaaaaaaaaaaaaaa

SEQ ID NO: 494 - DNA, 452 bp, Homo sapiens
  SIMILAR (39)..(101): 1001254mologous to Homo sapiens transmembrane protein,accession number X92098,Smith-Waterman Score=93.
ccgcagtaccgggtcctggcttcggcctcagccccaccatggtgacgcttgctgaactgctggtgctcctggccgctctcctggccacggtctcgggctattgtcgttagcatcgacgcccatgctgaagagtgcttctttgagcgggtcacctcgggcaccaagatgggcctcatcttcgaggcggaggatggcggcttcctggacatcgacgtggtgattacattaccagatagggtaagattaaacctcgtttactgaagaaaaaggggcagtagacttaccgatcttttatggatgtcacattcaaattatgttataatctccggatgtcctggatgaatccaaacatacggaatcataatcattggcttcttcttacgtcaattaaattcttaattacacaattcaggtcttctctatcatacttgtctagttgtatacagtcagaa

SEQ ID NO: 495 - DNA, 2157 bp, Homo sapiens
  SIMILAR (883)..(1881): 931254mologous to Homo sapiens catalase,accession number X04085,Smith-Waterman Score=1663.
atgctgataaccgggagccccgccctgggttcggctatcccgggcaccccgggccggcggggcgaggctctccaattgctgggccagagcgggacccttcctttccgcaccctcctgggtatctccggtcttcaggcctccttcggagagccctgctccgagcccattgggcttccaatcttggcctgcctagcgccgagcagccaatcagaaggcagtcctcccgagggggcgggacgagggggtggtgctgattggctgagcctgaagtcgccacggactcggggcaacaggcagatttgcctgctgagggtggagacccacgagccgaggcctcctgcagtgttctgcacagcaaaccgcacgctatggctgacagccgggatgccgccagcgaccagatgcagcactggaaggagcagcgggccgcgcaggaaatacctaggagtagatttattgggtcataagaaagctgatgtcctgaccactggagctggtaacccagtaggagacaaacttaatgttattacagtagggccccgtgggccccttcttgttcaggatgtggttttcactgatgaaatggctcattttgaccgagagagaattcctgagagagttgtgcatgctaaaggagcaggggcctttggctactttgaggtcacacatgacattaccaaatactccaaggcaaaggtatttgagcatattggaaagaagactcccatcgcagttcggttctccactgttgctggagaatcgggttcagctgacacagttcgggaccctcgtgggtttgcagtgaaattttacacagaagatggtaactgggatctcgttggaaataacacccccattttcttcatcagggatcccatattggtttctttcttgttcagtgatcgggggattccagatggacatcgccacatgaatggatatggatcacatactttcaagctggttaatgcaaatggggaggcagtttattgcaaattccattataagactgaccagggcatcaaaaacctttctgttgaagatgcggcgagactttcccaggaagatcctgactatggcatccgggatctttttaacgccattgccacaggaaagtacccctcctggactttttacatccaggtcatgacatttaatcaggcagaaacttttccatttaatccattcgatctcaccaaggtttggcctcacaaggactaccctctcatcccagttggtaaactggtcttaaaccggaatccagttaattactttgctgaggttgaacagatagccttcgacccaagcaacatgccacctggcattgaggccagtcctgacaaaatgcttcagggccgcctttttgcctatcctgacactcaccgccatcgcctgggacccaattatcttcatatacctgtgaactgtccctaccgtgctcgagtggccaactaccagcgtgacggcccgatgtgcatgcaggacaatcagggtggtgctccaaattactaccccaacagctttggtgctccggaacaacagccttctgccctggagcacagcatccaatattctggagaagtgcggagattcaacactgccaatgatgataacgttactcagactagcttgtatcttacttaccgtttcatggagaacattgaaaaggtgcgggcattctatgtgaacgtgctgaatgaggaacagaggaaacgtctgtgtgagaacattgccggccacctgaaggatgcacaaattttcatccagaagaaagcggtcaagaacttcactgaggtccaccctgactacgggagccacatccaggctcttctggacaagtacaatgctgagaagcctaagcgaagcttagcgttcatccgtgtaacccgctcatcactggatgaagattctcctgtgctagatgtgcaaatgcaagctagtggcttcaaaatagagaatcccactttctatagcagattgtgtaacaattttaatgctatttccccaggggaaaatgaagctctgactatcgagcaaatgggaagcactgaggcaaactgcctccttaggaactccgtgcagctcgtggcttttgtgattgagattacttcaagaaagtcagacattgtggaaagacacaaatgtgcatggacctga

SEQ ID NO: 496 - DNA, 482 bp, Homo sapiens
  SIMILAR (274)..(11): 651254mologous to Homo sapiens catalase,accession number K02400,Smith-Waterman Score=279.
  misc_feature (1)...(482): n = a,t,c or g
cccttcagntgcccggcaatgtctcacacagacgtttcctctgttcctcattcagcacgttcacatagaatgcccgcacctgagtaacgtatcatcattgncagtgttgaatctccgcacttctccagaatattggatgctgtgctccaaggcagaaggctgttgttccggagcacccaaagctgttggggtagtaatttggagcaccaccctgattgtcctgcatgcacatcgggccgtcacgctggtagttggccactcgagcacgggtagggacagttcacaggtatatgaagataattgggtcccagggcgatggcggtgagtgtcaggataggcaaaaaggcggccctgcagtaataaatacaatagacactgactaggggcagtaacatataacataggaatgggctgtaaacttcattctgaaatttgaagtacaaagcactctgtacatggttaccacaaaattctgcctttcc

SEQ ID NO: 497 - DNA, 3673 bp, Homo sapiens
  SIMILAR (1424)..(2038): 601254mologous to Canis familiaris Catalase,accession number AB012918,Smith-Waterman Score=546.
  misc_feature (1)...(3673): n = a,t,c or g
cagcagggtctaagtattccgtctgcaaaactggcaggccaccaacggccgcgtcccagggcggcctgaaggatgctgataaccgggagccccgccctgggttcggctatcccgggcaccccgggccggcggggcgaggctctccaattgctgggccagagcgggacccttcctttccgcaccctcctgggtatctccggtcttcaggcctccttcggagagccctgctccgagcccattgggcttccaatcttggcctgcctagcgccgagcagccaatcagaaggcagtcctcccgagggggcgggacgagggggtggtgctgattggctgagcctgaagtcgccacggactcggggcaacaggcagatttgcctgctgagggtggagacccacgagccgaggcctcctgcagtgttctgcacagcaaaccgcacgctatggctgacagccgggatcccgccagcgaccagatgcagcactggaaggagcagcgggccgcgcaggattgagatgagggcgtgcaccacaagtatccaagggaacaacgtgcaggacaagtggaagagcaactgcgaagtccctgatgtggaatgtgcctgcacgtttctggagagcctgaagccagggtggctggggcaaagcaagcagggggctaagagaagcggtggagacgagtgcctccaaagttctcatctatgggaatttgtacgagacctgcttctatctcctgaagaaaactgtggcattctggaatgggaagatagggaacaaggaatttttcgggtggttaaatcggaagccctggcaaagatgtggggacaaaggaagaaaaatgacagaatgacatatgaaaagttgagcagagccctgagatactactataaaacaggaattttggagcgggttgaccgaagagaaaaactattcaattctgccattagagacacatccaatgctcccatcccaaaggttcaaaagttttcaaataactgtggcagctcaccaaaggtgcgggcattctatgtgaacgtgctgaatgaggaacagaggaaacgtctgtgtgagaacattgccggccacctgaaggatgcacaaattttcatccagaagaaagcggtcaagaacttcactgaggtccaccctgactacgggagccacatccaggctcttctggacaagtacaatgctgagaagcctaaggtttggcctcacaaggactaccctctcatcccagttggtaaactggtcttaaaccggaatccagttaattactttgctgaggttgaacagatagccttcgacccaagcaacatgccacctggcattgaggccagtcctgacaaaatgcttcagaaagctgatgtcctgaccactggagctggtaacccagtaggagacaaacttaatgttattacagtagggccccgtgggcccttttcttgttcaggatgtggttttcactgatgaaatggctcattttgaccgagagagaattcctgaagagaagttgtgcatgctaaaaggaagcaggggccttttggtacttttgaaggtcacacattgacattaccaaatactccaaaggcaaaaggtattttgaagcatatttggaaaagaagacttcccatcgcagtttcggttcttccactgtttgctgggagaatcgggtttcagcttgacacagtttcggggaccctcgtgggttttgcagtgaaattttacacagaagatggtaactgggatctcgttggaaataacacccccattttcttcatcagggatcccatattgtttccatcttttatccacagccaaaaagagaaatcctcagacacatctgaaggatccggacatggtctgggacttctggagcctacgtcctgagtctctgcatcaggtttctttcttgttcagtgatcgggggattccagatggacatcgccacatgaatggatatggatcacatactttcaagctggttaatgcaaatggggaggcagtttattgcaaattccattataagactgaccaggggcatcaaaaacctttctgttgaagatgcggcgagactttcccagggaagatcctggactatgggcatccgggatcttttttaaacgccattggccacagggaaagtacccctcctggactttttacatccaggtcatgacatttaatcaggcagaaacttttccatttaatccattcgatctcaccaaggtttggcctcacaaggactaccctctcatcccagttggtaaactggtccttaaacccggaatccagttaattactttgcctgaggttggaacagatagcccttcgaccccaagcaacatgccacctggcatgtgaggcccagttcctggacaaaatggctttcaggggccgccttttttgcctattcctggacactcaccgccattcgcctgggggacccaattattctttcatattacctgtggaacttgttccctaccgtggttcggagtggggccaacttaccaggcgtgacgggcccgatgttgcattgcaggacaatcaggggtgggtggttcccaaatttattaaccccaacagctttgggtgctcgggaacaacagccttctgccttggaagcacagcatccaatattctggagaaagtgcggagattcaacactgccaatggatggataacgttaattcaggtggcgggcatttttatgttgaacgtgctgaattgagggaacaggagggaaacgtctgtgttgaggaacatttgccggccacctggaagggatggcacaaattttcatcccagaaggaaagcgggtcaagaacttccactgagggtcccacccctgacctacgggagcccacatccccaggctcttctggaccaagtacaaagcctgagaaccctaagaatgcgatttcacacctttgtgcagtccggaatctcacctnggcggccaagggaagaaggccaaatcctgtgaaggcccggggcccccgcaccctgtgccagcgaagccttagccgttccatcccgtgtaacccccgcctcatccacctggatgaaagattcctccctgtgcctagatgtgcaaatgcaagcctagtggccttcaaaatagagaatccccactttcctatagcagattgtgtaacaattttaaaatgctatttcccccagggggaaaatgaaggttaggatttaaccagtccatttaaaaaaaaaaattggttttgaccggatggattgggattattccatttaaaaatggattaggaaggcaagtttctaggctaggaaatatggattttatttgaccaaaatttgttgaaattatgtatgtttaccatatcaccctcatggccctattatattaaaatatggcctataaatatataaaaaggaaaagataaagatgatctactcaggaaatttttatttttctaagggttctcataggaaaagtacatttaatacagcagtgtcatcagaagataacttgagcaccgtcatggcttaatgtttattccctgataataattgatcaaattccatttttttcactggagttacattaatgttaattcagcactgatttcacaacagatcaatttgtaattgcttacatttttacaataaataatctgtacgtaagaacaaaaaaaaaaaa

SEQ ID NO: 498 - DNA, 654 bp, Homo sapiens; identical to SEQ ID NO: 244
  SIMILAR (24)..(449): 1001254mologous to Homo sapiens alpha globin,accession number V00488,Smith-Waterman Score=733.
  misc_feature (1)...(654): n = a,t,c or g

SEQ ID NO: 499 - DNA, 704 bp, Homo sapiens
  SIMILAR (50)..(76): 1001254mologous to Hylobates lar alpha1-globin,accession number M94634,Smith-Waterman Score=45.
  misc_feature (1)...(704): n = a,t,c or g
ccccgactcttctggtccccacagactcagagagaacccaccatggtgcttgtctcctgccgacaagaccaacgtcataggccgcctggggtaaggtcggcgcgcacgctgtgcgcagtatgtgtgcggaggccctggagaggatgttcctgtccttccccaccaccaagacctacttcccgcacttcgacctgagccacgggttttgcccaggtttaagggccacgggcaaggaaggtggccgacgcgcttgaccaaacgccgtggccaacgtgggacggacattgcccaacgcgcttgttcggcccttgaagcgacctgcacgcgcacaagctttcgggtgggacccggttcaacttcaaagctcctaaaggccacttgccttgcttgggtgaaccttgggccgcccaccttccccggccgagtttcaacccctggcggttgcaacgtcttccctggggacaaagtttcctgggctttttgttgaagcaccgttgcttgaaccttccaaattaccgttaaagcttggaagccttcggttggccattgttttctttgcccctttggggcttccccccagcccctcctcccctttcctgcacccgtacccccgtggtcttttgaataaaattttgaattgggggggcaaaaaaaaaaaaaaaaaaaagatctttnaatttaagggggcggaaagtttatttcaa

SEQ ID NO: 500 - DNA, 939 bp, Homo sapiens
  SIMILAR (183)..(542): 481254mologous to Gillichthys mirabilis ribosomal protein S13,accession number AF266166,Smith-Waterman Score=190.
  misc_feature (1)...(939): n = a,t,c or g
cccacgcgtccgatcgccgccatcatgggtcgcatgcatgctcccgggtgagctcggggcatcaagccggattgctgggcggtgggtgggaggaagacagggagtgtgggcagcgggccgaggggatgatgttctgggctgctctggcactagccgccacttcaccttcgagactgcttctctcccccgggaagggccctgtccccagtcgggctttacccttatcggacgcagcgtcccccacttggttgaagttgaccatctgacgacgtgaaggagccagatttacaaacttggccaagaagggcccttactccttcacgagatcggtggtaatcctgagagattcacatggttgttgcacaagtacgtttagggaacaggccatgacactttcaagatccctaaagtctaagggacttgatcctgatcttcctgaagatctctaccatttaattaagaaacgcagttgctgttcgaaagcatcttgagaggaacacgaaaggataaggatgctaaattcccgtctgattctaatagagaagccggattcacccgttttggctccgatattataaagaccaagcggagtcctccctccccaattgggaaatatgaaatcatctaacagcctctgccctgggtcgcataaatttggtctggtgtactccaagcaaataaaatgattgtttaactaaaagnnnnnnnnnnnnggaacggggggggccgttttaaagaacccttcggggggccaaacttaaccggggattggaaggaaatagttttttccttatggggggcggaattaaaacctacctgggaatttttggaaagaacctttacttttggggggggacataatgggacaacctccctacaaaaatttaaggctttaggggaaaaataaaattttaaagggtatagggggtaaaactacct

SEQ ID NO: 501 - DNA, 639 bp, Homo sapiens
  SIMILAR (113)..(157): 861254mologous to Homo sapiens nucleophosmin,accession number M23613,Smith-Waterman Score=71.
atgggaaaacctgcccgcgtgattcagttacctcccaccaggtccctcccatggcacgtggggattatgggagctacaattcaagatgagatttggtgtgtgccgccacctgatggaagattcgatggacatggacgtgagccccctgaggcccagaactatcttttcagttgtgaactaaaggccgacaaagatgatcactttaaggtggataatgatgaaaatgagcaccagttatccttaagaacgccaacagtttcccttggggtctttgaaataacaccaccagtgcttttatggttgaagtgtggttcagggccagtgcatattagtggacagcatttagtagctgtggaggaagatgcagagtcagaagatgaagaggaggaggatgtgaaactcttaaggatatctggaaaaacaaagactttcatggccacaaatggcaaagaatacaagcattacaaaatcagttcagaaaagtcactagacaacaagtacaaaacacgaactccagggtttcaggcctttggattcgaggacttacacccgtggccccttggttctcaggccttctatctcagtctgagagttacaccaccagttttcctggttctgaggcttctggacttcgactga

SEQ ID NO: 502 - DNA, 944 bp, Homo sapiens
  SIMILAR (5)..(616): 701254mologous to Homo sapiens nucleophosmin/B23.2,accession number AB042278,Smith-Waterman Score=667.
gtgcaaaggatggttgcacattgtggagcaggggcatgacattcgaggccgttcaattaagataacactgccaccttgaaaatgtctttcagccaacgttttccctgggggctttgaaatacaaccaacagtggtctaaggattgaagtgtgtttcagggccgtgccatattagtggacagcacttagtagctgtgaggaagatgcggagtcagaagatgaagaggaggagaatgtgaaactcttaagtatatctgaaaggcggtctgcccctggggtggttagcatggttccacagaaaaaagttaaaacttgctgctgatgaagatgatgacgatgatgatgaagaggatgatgatgaagatgatgatgatgatgattttgatgatgaggaagctgaagaaaaagcgccagtgaagaaatctatacgagatactccagccaaaaatgcacaaaagtcaaatcagaatggaaaagactcaaaaccatcatcaacaccaagatcaaaaggacaagaatccttcaagaaacaggaaaaaactcctaaaacaccaaaaggacctagttctgtagaagacattaaagcaaaaatgcaagcaagtatagaaaaagcgcattgaacagtcctgggcactacatgtaaattaagcccaaagatggggagaaaggaaaaggagagacaaatatagtccatactgagtgtcatcaacaatccagactgaagtcttctattttaatctcaatccccttttctgatttgccacccatgcctcttcaggctggaaacaatctcttggttccctaaagcactttcttctgactgctgtgattcagtgaaccttgccctttgctttctattacttgtgcatttgcctcacctgacaatgttttaaatcgcctttgtatctccttagctgctcaataaatatttgaatgcatcaaaaa

SEQ ID NO: 503 - DNA, 1692 bp, Homo sapiens
  SIMILAR (1)..(1689): 1001254mologous to Homo sapiens nucleophosmin-retinoic acid receptor alpha fusion protein NPM-RAR long form,accession number U41742,Smith-Waterman Score=2964.
atggaagattcgatggacatggacatgagccccctgaggccccagaactatcttttcggttgtgaactaaaggccgacaaagattatcactttaaggtggataatgatgaaaatgagcaccagttatctttaagaacggtcagtttaggggctggtgcaaaggatgagttgcacattgttgaagcagaggcaatgaattacgaaggcagtccaattaaagtaacactggcaactttgaaaatgtctgtacagccaacggtttcccttgggggctttgaaataacaccaccagtggtcttaaggttgaagtgtggttcagggccagtgcatattagtggacagcacttagtagctgtggaggaagatgcagagtcagaagatgaagaggaggaggatgtgaacagggttttatttatgaaaccgaaaggcaggggcctcaagcatatgttcggggatttggtgtgcagttggaaattggcagccattgagacccagagcagcagttctgaagagatagtgcccagccctccctcgccaccccctctaccccgcatctacaagccttgctttgtctgtcaggacaagtcctcaggctaccactatggggtcagcgcctgtgagggctgcaagggcttcttccgccgcagcatccagaagaacatggtgtacacgtgtcaccgggacaagaactgcatcatcaacaaggtgacccggaaccgctgccagtactgccgactgcagaagtgctttgaagtgggcatgtccaaggagtctgtgagaaacgaccgaaacaagaagaagaaggaggtgcccaagcccgagtgctctgagagctacacgctgacgccggaggtgggggagctcattgagaaggtgcgtaaagcgcaccaggaaaccttccctgccctctgccagctgggcaaatacactacgaacaacagctcagaacaacgtgtctctctggacattgacctctgggacaagttcagtgaactctccaccaagtgcatcattaagactgtggagttcgccaagcagctgcccggcttcaccaccctcaccatcgccgaccagatcaccctcctcaaggctgcctgcctggacatcctgatcctgcggatctgcacgcggtacacgcccgagcaggacaccatgaccttctcggacgggctgaccctgaaccggacccagatgcacaacgctggcttcggccccctcaccgacctggtctttgccttcgccaaccagctgctgcccctggagatggatgatgcggagacggggctgctcagcgccatctgcctcatctgcggagaccgccaggacctggagcagccggaccgggtggacatgctgcaggagccgctgctggaggcgctaaaggtctacgtgcggaagcggaggcccagccgcccccacatgttccccaagatgctaatgaagattactgacctgcgaagcatcagcgccaagggggctgagcgggtgatcacgctgaagatggagatcccgggctccatgccgcctctcatccaggaaatgttggagaactcagagggcctggacactctgagcggacagccggggggtggggggcgggacgggggtggcctggcccccccgccaggcagctgtagccccagcctcagccccagctccaacagaagcagcccggccacccactccccgtga

SEQ ID NO: 504 - DNA, 2584 bp, Homo sapiens
  SIMILAR (90)..(2129): 1001254mologous to Homo sapiens p80 protein,accession number D45915,Smith-Waterman Score=3623.
gtgattccgtcctgcgcggttgttctctggagcagcgttcttttatctccgtccgccttctctcctacctaagtgcgtgccgccacccgatggaagattcgatggacatggacatgagccccctgaggccccagaactatcttttcggttgtgaactaaaggccgacaaagattatcactttaaggtggataatgatgaaaatgagcaccagttatctttaagaacggtcagtttaggggctggtgcaaaggatgagttgcacattgttgaagcagaggcaatgaattacgaaggcagtccaattaaagtaacactggcaactttgaaaatgtctgtacagccaacggtttcccttgggggctttgaaataacaccaccagtggtcttaaggttgaagtgtggttcagggccagtgcatattagtggacagcacttagtagtgtaccgccggaagcaccaggagctgcaagccatgcagatggagctgcagagccctgagtacaagctgagcaagctccgcacctcgaccatcatgaccgactacaaccccaactactgctttgctggcaagacctcctccatcagtgacctgaaggaggtgccacggaaaaacatcaccctcattcggggtctgggccatggagcctttggggaggtgtatgaaggccaggtgtccggaatgcccaacgacccaagccccctgcaagtggctgtgaagacgctgcctgaagtgtgctctgaacaggacgaactggatttcctcatggaagccctgatcatcagcaaattcaaccaccagaacattgttcgctgcattggggtgagcctgcaatccctgccccggttcatcctgctggagctcatggcggggggagacctcaagtccttcctccgagagacccgccctcgcccgagccagccctcctccctggccatgctggaccttctgcacgtggctcgggacattgcctgtggctgtcagtatttggaggaaaaccacttcatccaccgagacattgctgccagaaactgcctcttgacctgtccaggccctggaagagtggccaagattggagacttcgggatggcccgagacatctacagggcgagctactatagaaagggaggctgtgccatgctgccagttaagtggatgcccccagaggccttcatggaaggaatattcacttctaaaacagacacatggtcctttggagtgctgctatgggaaatcttttctcttggatatatgccataccccagcaaaagcaaccaggaagttctggagtttgtcaccagtggaggccggatggacccacccaagaactgccctgggcctgtataccggataatgactcagtgctggcaacatcagcctgaagacaggcccaactttgccatcattttggagaggattgaatactgcacccaggacccggatgtaatcaacaccgctttgccgatagaatatggtccacttgtggaagaggaagagaaagtgcctgtgaggcccaaggaccctgagggggttcctcctctcctggtctctcaacaggcaaaacgggaggaggagcgcagcccagctgccccaccacctctgcctaccacctcctctggcaaggctgcaaagaaacccacagctgcagaggtctctgttcgagtccctagagggccggccgtggaagggggacacgtgaatatggcattctctcagtccaaccctccttcggagttgcacagggtccacggatccagaaataagcccaccagcttgtggaacccaacgtacggctcctggtttacagagaaacccaccaaaaagaataatcctatagcaaagaaggagccacacgagaggggtaacctggggctggagggaagctgtactgtcccacctaacgttgcaactgggagacttccgggggcctcactgctcctagagccctcttcgctgactgccaatatgaaggaggtacctctgttcaggctacgtcacttcccttgtgggaatgtcaattacggctaccagcaacagggcttgcccttagaagccgctactgcccctggagctggtcattacgaggataccattctgaaaagcaagaatagcatgaaccagcctgggccctgagctcggtcgcacactcacttctcttccttgggatccctaagaccgtggaggagagagaggcaatcaatggctcctttcacaaaccagagaccaaatgtcacgttttgttttgtgccaacctattttgaagtaccaccaaaaaagctgtattttgaaaatgctttagaaaggttttgagcatgggttcatcctattctttcgaaagaagaaaatatcataaaaatgagtgataaatacaaggccagatgtggttgcataaggtttttatgcatgtttgttgtatacttccttatgcttcttttaaattgtgtgtgctctgcttcaatgtagtcagaattagctgcttctatgtttcatagttggggtcatagatgtttccttgccttgttgatgtggacatgagccatttgaggggagagggaacggaaataaaggagttatttgtaatgact

SEQ ID NO: 505 - DNA, 512 bp, Homo sapiens
  SIMILAR (174)..(212): 1001254mologous to Homo sapiens Human secreted protein, SEQ ID NO: 4330,accession number AAG00249,Smith-Waterman Score=62.
ggcgggtgcgcttgctagggaaagaagctaaagcacttccagagcctgtccggagctcagaggttcggaagacttatcgaccatggtgagtgcagggtcttggggtcgaacgcgtgccactcgggagccacaggggttggatggggcctcctagacctctgctctctccccaggagcgcgcgtcctgcttgttgctgctgctgctgccgctggatgcacgtctctgcgaccacgccagaacctcgtgatgctggacgatgaagatttccgctgcgtcttgcaactttctcccgaacctcagcccgactggcccgaagccttacaccgagcgtctgccgttcaagcctagatctccgccggaggctctcacctacagtcctcttttcttatcggccttcgtctcctcaagactgttactgtcctcctttggcctctgttcgttctgatctgtgtttacctgtctgtctatctgccgttccgactttgtctggatactctaagttgtgttgtgt

SEQ ID NO: 506 - DNA, 1376 bp, Homo sapiens
  SIMILAR (85)..(576): 561254mologous to Homo sapiens nucleophosmin,accession number M23613,Smith-Waterman Score=382.
tccgtcctgcgcggttgttctctggagcagcgttcttttatatacggccgccttctctcctacctaagtgcgtgccgccacccgatggaagattcgatggacatggacatgagccccctgaggccccagaactatcttttcggttgtgaactaaaggccgacaaagattatcactttaaggtggataatgatgaaaatgagcaccagttatctttaagaacggtcagtttaggggctggtgcaaaggatgagttgcacattgttgaagcagaggcaatgaattaccgaaggcaagtccaattaaacgtaacacttggcaactttgaaaatgtcctgtacagccaacggtttcccttggggggcttttgaaataacaccaccagtggtcttaaggttgaagtgtggttcagggccagtgcatattaagtggacaagcacttatgtagctgtggaaggaaagatgcagaagtccagaagattgaagaaggaaggaaggattgtgaaactccttaaagtatatcttggaaagccggtctgccccttggaaggttggtagcaaggtttccacagaaaaaaaagtaaaaactttgcttgcttgatggaaagatgatgaccgaatgaatgatgaagaaggatgatgattgaagatgatgatgatgatgattttgatgatgaggaagctgaagaaaaagcgccaagtgaagaaatctataccgagatactccagcccaaaaatgcagcgaaagtcaaaatcagaatgggaaaagactccaaaaaccatcattcacacccaagaatcaaaaaggacaagaatccttccaagaaaccaggaaaaaactccttaaaacaccaaaagggacctaagttctgtagaagacattaaagcaaaaatgcaagcaagtatagaaaaaggtggttctcttcccaaagtggaagccaaattcatcaattatgtgaagaatttgctcccggatgactgaccaagaggctattcaagatctctggcagtggaggaagtctctttaagaaaatagtgtagacaatttggtaagagaatttaccgtcttatttcatttctgtaacagttgatatctggctgtccttttttataatgcagagtgagaactttccctacccggggtttgataaatgtttgtccaggttctatttgccaaggaattgtgttgtcccaaaatgcctgtttaagtttttaaagatggaacttcacccctttgcttggttttaagtatgtatggaatgttatgataggacatagtagtagcggtggtcagacatgggaaatggtgtgggagacaaaaatatacatgtgaaataaaactcagtattttaataaagtaaaaaaaaaaaaaaaaaaa

SEQ ID NO: 507 - DNA, 691 bp, Homo sapiens
  SIMILAR (158)..(382): 501254mologous to Dasyurus viverrinus alpha globin,accession number M14567,Smith-Waterman Score=137.
  misc_feature (1)...(691): n = a,t,c or g
actcttctggtcccacaagactcagagagaacccacccatggttgctgtctcctgcccgacaaagaccaacgtcaaggccggcttggggtaaggtcggcgcgcacgctgtgcgcagtatgtgtgcggaggccctggagaggatgttcctgtccttccccaccaaccaagacctacttcccgcacttcgaccttgagccacggtttctgcccaggtttaagggccacggcaagaaggtggccgacgcgctgaccaacgccgtggcgcacgtgggacgacatgcccaaacgcgctgttccgcccttgagcgacctgcacgcgcacaagttttcgggtgggacccggttcaactttcaagctccttaagccacttgccttgcttgggtgaaccctgggccggcccacttccccgtccgagtttcaacccctggcggttgcaaggcttccttggggacaaagtttcctggggtttttgttgaagcaaccttgttgaactttcaaattacctttaaagttgggagccttcggtgggccattgtttttttgcccctttgggcctcccccncagcccctcctcccctttcctgcacccgtacccccgtggtcttttgaataaaattttgaattgggggggcaaaaaaaaaaaaaaaaaaaagatctttnaatttaagggggcggaaagtttatttcaa

SEQ ID NO: 508 - DNA, 1800 bp, Homo sapiens
  SIMILAR (218)..(1285): 1001254mologous to Homo sapiens 3-ketoacyl-CoA thiolase beta- subunit of trifunctional protein,accession number D16481,Smith- Waterman Score=1820.
attccagaatgactatcttgacttacccctttaaaaatcttcccactgcatcaaaatgggccctcagattttccataagacctctgagctgttcctcccagctacgagctgccccagctgtccagaccaaaacgaagaagacgttagccaaacccaatataaggaatgttgtggtggtggatggtgttcgcactccatttttgctgtctggcacttcgctgcccttggagctggcttctctgacaagactcctgctcacactgtcaccatggcttgtatctctgccaaccaagccatgaccacaggtgttggcttgattgcttctggccagtgtgatgtgatcgtggcaggtggtgttgagttgatgtccgatgtccctattcgtcactcaaggaaaatgagaaaactgatgcttgatctcaataaggccaaatctatgggccagcgactgtctttaatctctaaattccgatttaatttcctagcacctgagctccctgcggtttctgagttctccaccagtgagaccatgggccactctgcagaccgactggccgctgcctttgctgtttctcggctggaacaggatgaatatgcactgcgctctcacagtctagccaagaaggcacaggatgaaggactcctttcagatgtggtacccttcaaagtaccaggaaaagatacagttaccaaagataatggcatccgtccttcctcactggagcagatggccaaactaaaacctgcattcatcaagccctacggcacagtgacagctgcaaattcttctttcttgactgatggtgcatctgcaatgttaatcatggcggaggaaaaggctctggccatgggttataagccgaaggcatatttgagggattttatgtatgtgtctcaggatccaaaagatcaactattacttggaccaacatatgctactccaaaagttctagaaaaggcaggattgaccatgaatgatattgatgcttttgaatttcatgaagctttctcgggtcagattttggcaaattttaaagccatggattctgattggtttgcagaaaactacatgggtagaaaaaccaaggttggattgcctcctttggagaagtttaataactggggtggatctctgtccctgggacacccatttggagccactggctgcaggttggtcatggctgctgccaacagattacggaaagaaggaggccagtatggcttagtggctgcgtgtgcagctggagggcagggccatgctatgatagtggaagcttatccaaaataatagatccagaagaagtgacctgaagtttctgtgcaacactcacactaggcaatgccatttcaatgcattactaaatgacatttgtagttcctagctcctcttaggaaaacagttcttgtggccttctattaaatagtttgcacttaagccttgccagtgttctgagcttttcaataatcagtttactgctctttcagggatttctaagccaccagaatctcacatgagatgtgtgggtggttgtttttggtctctgttgtcactaaagactaaatgagggtttgcagttgggaaagaggtcaactgagatttggaaatcatctttgtaatatttgcaaattatacttgttcttatctgtgtcctaaagatgtgttctctataaaatacaaaccaacgtgcctaattaattatggaaaaataattcagaatctaaacaccactgaaaacttataaaaaatgtttagatacataaatatggtggtcagcgttaataaagtggagaaatattgga

SEQ ID NO: 509 - DNA, 1641 bp, Homo sapiens
  SIMILAR (376)..(1086): 961254mologous to Homo sapiens 3-ketoacyl-CoA thiolase beta- subunit of trifunctional protein,accession number D16481,Smith- Waterman Score=1133.
atgctcccacgctccccgacccccaatccccaggacccgcaggacctccggaggaacgcccgccagcccgcccggagccacgcggcacaaggtgacacggaccgcgccgcgcggcccctcagccgcctgggcgaggccgggagcagggagaggggcatccgccggcccgcggtaccttgtacttatcaaagccagccagctgctccgggctcacccagccatgacgacccgaaaactgagcgcccactcggcagcgactcccggctacaaggctgtgacacacaagcaccacaccggctgggcaaggatggcaaagactgggctgcccgagaagctctcttcgtcgcttcatttgctagcgtcaaaattggtgagctgaggggtttgttgcatcggaccagtgtccctaaggaagtagttgattatatcatctttggtacagttattcaggaagtgaaaacaagcaatgtggctagagaggctgcccttggagctggcttctctgacaagactcctgctcacactgtcaccatggcttgtatctctgccaaccaagccatgaccacaggtgttggcttgattgcttctggccagtgtgatgtgatcgtggcaggtggtgttgagttgatgtccgatgtccctattcgtcactcaaggaaaatgagaaaactgatgcttgatctcaataaggccaaatctatgggccagcgactgtctttaatctctaaattccgatttaatttcctagcacctgagctccctgcggtttctgagttctccaccagtgagaccatgggccactctgcagaccgactggccgctgcctttgctgtttctcggctggaacaggatgaatatgcactgcgctctcacagtctagccaagaaggcacaggatgaaggactcctttctgatgtggtacccttcaaagtaccaggaaaagatacagttaccaaagataatggcatccgtccttcctcactggagcagatggccaaactaaaacctgcattcatcaagccctacggcacagtgacagctgcaaattcttctttcttggctaggggagtggaatctggagtagttccaacaggatggaacaccaccctgttaagcccaggtggtgaagagctggttaggttggtcatttgcaaaaccgaattggatgatagagccatgtggcatggactacacttgccagatctgaatccttttgattatttccagggtatgctaaaggtccaggtttatttaactgatggtgcatctgcaatgttaatcatggcggaggaaaaggctctggccatgggttataagccgaaggcatatttgagaccaacatatgctactccaaaagttctagaaaaggcaggattgaccatgaatgatattgatgcttttgaatttcatgaagctttctcgggtcagattttggcaaattttaaagccatggattctgattggtttgcagaaaactacatgggtagaaaaaccaagaagtttaataactggggtggatctctgtccctgggacacccatttggagccactggctgcaggttggtcatggctgctgccaacagattacggaaagaaggaggccagtatggcttagtggctgcgtgtgcagctggagggcag

SEQ ID NO: 510 - DNA, 369 bp, Homo sapiens
cggcacgagagattctgtagttacaggaaagggttaattacttgctcaagatggaaaaaaaagatagtggttagaaaactttaatttgtgagccctctttagagatcctctttagagatcctctgcttgtcttggacttgattgattaatggtagacaaatagattttaacttttccaaataacacagaacaatcctaggtgttagcataacacccggtaacagtgtacctgctccttggatatctccttttccagctcccttgcggttctgagttctccaccagtgagacccatggccactctgcagaccgacttgggcgctgcttttgctgtttctcggctggaacaggatgaatatgcacctggcg

SEQ ID NO: 511 - DNA, 351 bp, Homo sapiens
  misc_feature (1)...(351): n = a,t,c or g
ggcacgagttggtgttcctatcataataatattattggatgaagaatagttgataagattaagttttaatgttttctagtagccatggatgaggttatcagagttcatagactacaatgtaaactacaaattgttcagctaatccaggatatacttttgttcttctctttttagattccagaatgactactatcttgacttacccctttaaaaatcttcccactgcatcaaaatgggccctcagattttgtaagtnnnnnnnnnnnnnnnnnnnnnnnnagattggatttggatttataaacatctcgcacagatactgaatggtattgctttttgtaaacagtttatttt

SEQ ID NO: 512 - DNA, 391 bp, Homo sapiens
  SIMILAR (247)..(369): 971254mologous to Homo sapiens mitochondrial trifunctional protein beta subunit,accession number U49441,Smith-Waterman Score= 204.
ctgtgaatgaatgtcttaagaaaatagggtgtcctatttttagtaaagcatttagatgatttcccaattgtcttttaagactttagtttaaaatttgataatatgataattataaaacactttccttctagtgaataggtaagggttatatttcatttgtttttgtaatttttaaagcatatttctgtggagaagatatataaggcttgtggttccatagagttaaaaaaattcatttttttaataggaaaagatacagttaccaaagataatggcatccgtccttcctcactggagcagatggccaaactaaaacctgcattcatcaagccctacggcacagtgacagctgcaaattcttctttcttggaactggcaatgttatttgtat

SEQ ID NO: 513 - DNA, 2134 bp, Homo sapiens
  SIMILAR (1103)..(1519): 551254mologous to Homo sapiens HADHB,accession number D86850,Smith-Waterman Score=313.
  misc_feature (1)...(2134): n = a,t,c or g
cccacgcgtacggctccgagagggaggttttgcggtcttcagccaacattccagaatgactactatcttgacttacccctttaaaaatcttcccactgcatcaaaatgggccctcagattttccataagacctctgagctggtcctcccagctacgagctgccccagctgtccagaccaaaacgaagaagacgttagccaaacccaatataaagaatgttgtgggtggtggatggtgttcgcactccatttttgctgtctgggcacttcatataaagacctgatgccacatgatttgggctagagcagcgtttaacgggtttgttggcatcgggaccagtgtccctaagggaagtagtttgattatattcatctttgggtacagttatttcagggaagtgaaaaacaagcaatgtgggctagagagggctggcccttgggagctgggctttctctgacaagtattcctggttcacaatgttcacctgggcttgtatctctggcccaaccaaggcccttgaccacaggtgtttggtttgattgctttttggccagtgtgatgtgatcgtggcaggtggtgttgagttgatgtccgatgtccctattcgtcactcaaggaaaatgataaaactgatgcttgatctcaataaggccaaatctatgggccagcgactgtctttaatctctaaattccgatttaatttcctagcacctgagctccctgcggtttctgagttctccaccagtgagaccatgggccactctgcagaccgactggccgctgcctttgctgtttcttttctggtatcaggatgaatatgcactgcgctctcacagtctatccaagaaggcacaggatgaaggactcctttctgatgtggtacccttcaaagtaccaggaaaagatacagttaccaaagataatggcatccgtccttcctcactggagcagatggccaaactaaaacctgcattcatcaagccctacggcacagtgacagctgcaaattcttcttttctttgactgatggtgcatctgcaatgttaatcatggcggaggaaaaggctctggccatgggttataagccgaaggcatatcttgacgggattttatgtatgtgtctcaggatccaaaagatcaactattacttggaccaacatatgctactccaaaagttctagaaaaggcaggattgtaccatgaatgatattgatgcttttgaatttcatgaagctttctcggggtcagattttggcaaatttttaagcccatggattctgattggtttgcagaaaaactacatggggtagaaaaaaccaaggtttggattgcctcccctttggagaaggtttaataactgggggtggatctctgtcccctgggacacccatttggganccactggctgcaggtttggtcactgactgctgccaacagattacggaaaaaaggaggccagtatggccttagtggctgcgtgtgcacctggacgggcagggcagtgctactgactacgtggaagcttatccaaaataatagatccagaagaagtgacctgaagtttctgtgcaacactcacactaggcaatgcccatttcaatgcattactaaattgacatttggtagttcctagctcctcttaaggaaaacagttccttgtggcccctcccaattaaaataccttggcaccttaaagccctggcccagtgttcctgagccttttccaaataatccagtttacctgcctctttccagggatttcctaagcccacccagaatcctcacatgagatgtgtgggtggttgtttttggtcctctgttgtcactaaaagactaaatgagggtttgcacgttgggaaagaggtcaactgagatttggaaatcatcctttgtaatatttgcaaattatacttgttcttatctgtgtcctaaagatgtgttctctatgaaaatacaaaccaacgtggcctaattaattatggaaaaataattcagaatctaaacaccactgaaaacttataaaaaatgtttagacacctatttatggctggtcagcgttaataaagtggagaaatattggaaaacaaaaaaaatacacattnnnnnnnnnnggggggggccccttttaaaaaac

SEQ ID NO: 514 - DNA, 505 bp, Homo sapiens
  SIMILAR (8)..(340): 991254mologous to Homo sapiens VDUP1,accession number AB051901,Smith-Waterman Score=593.
gctcgaccagcagtgcaaacagacttcggagtacctgcgctatgaagacacgcttcttctggaagaccagccaacaggtgagaatgagatggtgatcatgagacctggaaacaaatatgagtacaagttcggctttgagcttcctcaggggcctctgggaacatccttcaaaggaaaatatgggtgtgtagactactgggtgaaggcttttcttgaccgcccgagccagccaactcaagagacaaagaaaaactttgaagtagtggatctggtggatgtcaatacccctgatttaatggcacctgtgtctgctaaaaaagaaaagaaagtttcctgcatcctcaacaacaatgtgcagtgagcatgtggaagaaaagaagcagctttacctacttgtttctttttgtctctcttcctggacactcactttttcagagactcaacagtctctgcaatggagtgtgggtccaccttagcctctgacttcctaatgtaggaggtggtc

SEQ ID NO: 515 - DNA, 890 bp, Homo sapiens
  SIMILAR (22)..(204): 551254mologous to Homo sapiens VDUP1,accession number AB051901,Smith-Waterman Score=158.
ccgcgaggcgttattggtcacgggcctctgggaacatccttcataggaaaatatgggtgtggagactactgggtgaaggcttttcttgaccgcccgagtcagcccaattcaagggccaaagaaaaactttgaaagtatgggatctggtggatgtcaatacccctggatttaatggccacctgtgtctgctaaaaaggaaaggaaagtttcctgcatgttcattcctgatgggcgggtgtctgtctctgctcgaattgacagaaaaggattctgtgaaggtgatgagatttccatccatgctgactttgagaatacatgttcccgaattgtggtccccaaagctgccattgtggcccgccacacttaccttgccaatggccagaccaaggtgctgactcagaagttgtcatcagtcagaggcaatcatattatctcagggacatgcgcatcatggcgtggcaagagccttcgggttcagaagatcaggccttctatcctgggctgcaacatccttcgagttgaatattccttactgatctatgttagcgttcctggatccaagcaggtcttcataaaagccctttgaacccccttcctgccgtgtgttaggagatagggatattggcccctcactgcagctgccagcacttggtcagtcactctcagccatagcactttgttcactgtcctgtgtcagagcactgagctccacccttttctgagagttattacagccagaaagtgtgggctgaagatggttggtttcatgtttttgtattatgtatctttttgtatggtaaagactatattttgtacttaaccagatatatttttaccccagatggggatattctttgtaaaaaatgaaaataaagtttttttaatggaaa

SEQ ID NO: 516 - DNA, 440 bp, Homo sapiens
cactagtgcagggccctctgtgacacagggcctgagggaccccattgtctgacgtaaggaccatgctgacagtatccaccagaacagctaaagctaaaaagacgacactaataccaagtgttggtgagcgtggaactgctcctcaacccgtgctcattaggaaacgtacactgacacttttgggcagtattactaacaatgaacatacctcatgactcagcaattccactcctaggtgcgcatcccacataaatgtgggcatatgttcaccaaaacccagggacagtaatgctcacagagacactattcatgatagccacaaactggacactacacaaatgccctcaatagtagaaggaataatgcaacggggctgtcacagaatggagtgctgcacttaaacagaataaactacaactacatgtgaccccacgcgtccg

SEQ ID NO: 517 - DNA, 3073 bp, Homo sapiens
  SIMILAR (317)..(1507): 471254mologous to Homo sapiens brain-expressed HHCPA78 homolog VDUP1,accession number S73591,Smith-Waterman Score=647.
aactaacccctctttttctccaaaggagggcttgtggagatcggatcttttctccagcaattgggggaaagaaggctttttctctgaattcgcttagtgtaaccagcggcgtatattttttaggcgccttttcgaaaacctagtagttaatattcatttgtttaaatcttattttatttttaagctcaaactgcttaagaataccttaattccttaaagtgaaataattttttgcaaaggggtttcctcgatttggagctttttttttcttccaccgtcatttctaactcttaaaaccaactcagttccatcatgggtgatgttcaaggaagatcaagtcttttgaggtgggtctttaacgaccctggaaaaggtgtaacggcagtgggcgagaaggtggcctggccgggtgaatagtgggaggtgtgtggaagttacccgtgtccaaagccgttaggatccccggcttgccggagtggcctaaagtgcctttggatgccagggatccccagcagatgcaaacagacttcgggagtacccgcgctatgaagacacggtttttctgggaagaccagccaacaggtgagaattgagatggtgatcatgagacctggaaaccaatatgagtacaagttcggctttgagcttccctcaggggcctctggaacattccttcaaaggaaaatatgggtgtgtagactacctgggtgaaaggcttttcttgaccgcccgagccagccaactcaagagacaaagaaaaactttgaagtagtggatctggtggatgtcaataccccctgatttaatggcacctgtgtctggctaaaaaaagaaaagaaagtttcctgcatggtcattcctgatggggcgggtgtctgtctctgctcgaattgacagaaaaggattctgtgaaggtgatgagatttccatccatgctgactttgagaatacatgttcccgaattgtggtccccaaagctgccattgtggcccgccacacttaccttgccaatggccagaccaaggtgcttactcagaagttgtcatcagtcagaggcaatcatattatctcagggacatgcgcatcatggcgtggcaagagccttcgggttcagaagatcaggccttctatcctggggctgcaacatccttcgagttgaatattccttactgatctatgttagcgttcctgggatccaagaaggtcatccttgacctgcccctgggtaattgggcagcagatcaggtctaagcagcagaacatccaggcatgggcagccgaaccagcttttgaggatgagttgggtagatctgaacatcccttgataccccagaagttccttcctggtattttgggatgttcatttcctgaaggttcaaccgtttgggagagcccaaccactccttttgctagatgacatggatggctctcaaaacagcccctatctttatgtatgcccctgagttcaagttcatgcccaccacggacttatactgaggtggatcccttgcatcttcaaccaccaatgtgcagtgagcatgtggaagaaaagaagcagctttaccctactggtttctttttggccctctcttccctggacagttcacttttttcagagactcaacagtctctgcaatggaagtgtgggtcccacccttagccctctgacctcctaatgtaaggaggtggtccagcaggcaaatctcctgggcccttaaaaggatgcggacctccatcccctcagcccagcgcccccatgttgtgaataccaggggtgtttgttggatgggtttaaaaaataacctagaaaaactcaggccccatcccattttcctcagatctccctgaaaaattgaggccttttcgatagtttcgggtcaggtaaaaatggcctccctggcgtaagcttttcaaggtttttttggaggctttttgtaaattgtgataggaactttggaccttgaacttacgtatcatgtggagaagagccaatttaacaaactaggaagatgaaaagggaaattgtggccaaaactttgggaaaaggaggttcttaaaatcagtgtttcccctttgtgcacttgtagaaaaaaaaagaaaaaccttctagagctgatttgatggacaatggagagagctttccctgtgattataaaaaaggaagctagctgctctacggtcatctttgcttaagagtatactttaacctggcttttaaagcaagtagtaactgccccaccaaaggtccttaaaagccattttttggagcctattgcactgtgttctcctactgccaaatattttcatatggggaggatgggtttcctccttcatgtaaagtccttgggaatttgattcttaagggtgatgttctttaggcacctttaaattcccgttccaaattttttggttctccccttctgccatccttaaatgtaaggctggaaactgggtctacttgtgtcctctaggggttaaggccaaaaggccaaaaaaaattttacctacttttggagatttgcccccaatgtaccagaattatataattctaaccgcttaaaatccatgtgaaaagggttgcctgctgtccagcccttgccccactgtgacttcaaaaccccaaggagggaactccttgatccaagatgccccaacccctgtgttcagaaccctcccaaatactggccatgaggaaactaggaggggcaggtctttcataaaaaggccctttggaaccccctttcctggccctgtgttatggagataggggatattaggcccctcacgtgcagctgccaaccacttgggtcagtcactctcaggccataggcactttgtttcactgtcctgtggtcagaggcactgagctccaccctttttctgagagttattacagccgagaaagtgtgggctgaagatggttggtttcatgtttttgtattatgtatctttttgtatggtaaagactatattttgtacttaaccagatatatttttaccccagatggggatattctttgtaaaaaatgaaaataaagtttttttaatggaaaaaaaaaaaaaaaagtcgacc

SEQ ID NO: 518 - DNA, 467 bp, Homo sapiens
  SIMILAR (117)..(407): 981254mologous to Mus musculus putative,accession number AK010613,Smith-Waterman Score=484.
  misc_feature (1)...(467): n = a,t,c or g
tctagtccacgctcggagccatgccgtccaaggtccgctgcnagtcggtgcaggtcttcgacgcaatgaagacagcgacagctgtggcgcactgcaaacgcggcaatggtctcatcaagctgctggagccagttctgcttctcggcaaggagcgatttgctggtgtagacacccgtgtccgtgtaaagggtggtggtcacgtggcccagatttatgctatccgtcagtccatctccaaagccctggtggcctattaccagaaatatgtggatgaggcttccaagaaggagatcaaagacatcctcatccagtatgaccggaccctgctggtagctgaccctcgtcgctgcgagtccaaaaagtttggaggccctggtgcccgcgctcgctaccagaaatcctaccgataagcccatcgtgactcaaaactcacttgtataataaacagtttttgagggattttaaaa

SEQ ID NO: 519 - DNA, 459 bp, Homo sapiens
  SIMILAR (74)..(226): 411254mologous to Homo sapiens Human secreted protein, SEQ ID NO: 5181,accession number AAG01100,Smith-Waterman Score=87.
atgccgtccaaggcccgctgcagtctgtgcaggtcttcggacgcaagaagacagcgacagctgtggcgcactgaaacgcggcaatggtctcatcaaggtgaacgggcggcccctggagatgatgagccgcgcacgctacagtacaaggtgctgggatccggcaccggcgttagtggatggaggactcttggagacagagatgttgtagctcttgaaagctggggggctggcatcagcaacgggatgtttagaagttgtgttgggtgtagacagtgggctgctggagccagttctgcttctcggcaagagcgatttgctggtgtagacatccgtgtccgtgtaaagggtggtggtccgtggcccagatttatgtccaaaaagtttggaggccctggtgcccgcgctcgctaccagaaatctaccgataagcccatcgtgactcaaaactcacttgtataa

SEQ ID NO: 520 - DNA, 727 bp, Homo sapiens
  SIMILAR (562)..(660): 961254mologous to Mus musculus putative,accession number AK010613,Smith-Waterman Score=174.
tgactttcctcttctctgggtctgtagagggccttggagtgacaccctgacccccatccactagtacttgaaggccagtggtggcagaagccacagaaacaagaagcccagtgagatggctaagctgcccagcatgtaacttaaatccctgttcattccccattcctttagctgctggagccagttctgcttctcggcaaggagcgatttgctggtgtagacatccgtgtccgtgtaaagggtggtggtcacgtggcccagatttatggtgagtcccaggaactgggcgcatggaggaggtggctctgggagggaggccttcacagcgctcctgtaccctttaattgtgtgtctttctcacagctatccgtcagtcccatctcccaaagccctggtggcctattaccagaaatgtgagtgagcatgggtccttcccatgaggtagatgggtgtgtggggatcaagtcaaggactctgtgtgattatctaaatcctcgtccctgctcttcttgccagatgtggatgaggcttccaagaaggagatcaaagacatcctcatccgagtatgaccggaccctgctggtagctgaccctcgtcgctgcgagtccaaaaagtttggaggccctggtgcccgcgctcgctaccagaaatcctaccgataagcccatcgtgactcaaaactcacttgtataataaacagtttttgagggattttaaagtttcaag

SEQ ID NO: 521 - DNA, 716 bp, Homo sapiens
  SIMILAR (43)..(303): 471254mologous to Mus musculus 16S ribosomal protein,accession number M11408,Smith-Waterman Score=106.
ggcgccgcgcgtgtgaggttgtctagtccacgctcggatgccatgccgtccaaagggtcccgctgcagtcggtgcagggtcttcgggacgcaagaaagacagcggacagctgttggcgcactagcaaacgcgcccaatggtctcatccaaggttgaacgggcgggcccctggagatgattgaagcccgcgcacgcctacagtacaaagctgctggagcccagttctgcttctcggcaaggcagcgatttgctgggtgtagacatcccgtgtcccgtgtaaaagggtgggtggtccacgtggccccagatttatgctatccgtcagtcccatctcccaaaagcccctggtggcctattacccagaaatgtgagtgagcatgggtccttcccatgagatgtggatgaggctttccaaagaagggagatcaaagacatccttcatcccagttatggaccggaaccctgctgggttagctggacccttcgttcgctgtgagttccaaaaagttttggaggtcctggtgccccgcgctcgctaccagaaatcctaccgataagcccatcgtgacttcaaaacttcacttgtataattaaacagttttctgagggattttaaagtttcaagaactgtgtgtggccttatgtgttggtattggatgtttaaccagacagaaatcagtaaacatcctggacctataaaaaaaaaaaaaaaaaaa

SEQ ID NO: 522 - DNA, 582 bp, Homo sapiens; identical to SEQ ID NO: 329
  SIMILAR (384)..(548): 921254mologous to Homo sapiens PNAS-101,accession number AF274958,Smith-Waterman Score=256.
  misc_feature (1)...(582): n = a,t,c or g

SEQ ID NO: 523 - DNA, 764 bp, Homo sapiens; identical to SEQ ID NO: 330
  SIMILAR (574)..(687): 921254mologous to Rattus rattus ribosomal phosphoprotein P0 (AA 1-316),accession number X15096,Smith-Waterman Score=163.
  misc_feature (1)...(764): n = a,t,c or g

SEQ ID NO: 524 - DNA, 1209 bp, Homo sapiens
  SIMILAR (78)..(728): 501254mologous to Homo sapiens acidic ribosomal phosphoprotein (P0),accession number M17885,Smith-Waterman Score= 372.
cttctctcgccaggcgtcctcgtggaagtgacatcgtctttaaaccccctcgtggcaatccctgacgcaccgccgtgatgcccagggaagacagggcgacctggaagtccaactacttccttaagatcatccaactattggatgattatccgaaatgtttcattgtgggagcagacaatgtgggctccaagcagatgcagcagatccgaattgttccctggggggaagcttgtgttttgatggggcaaaaaaccatgaatgggccaggcccatccgagggccacctggaaaacaacccagcctctgaagaattgcttcctcattaaccgggggcatttgggcttttgtttcacccagggaggaccctcactgagatcaagggacatgttgctggcccaataaggttgccaggctgctgcccgttgttggtgccaattgcccccatgtgaagtcactgtgccagccccagaacactggtctcggggcccgagaagacttctttttttccagggctttaggtatcacccactaaaaatctcccagggggcacccattgaaaatcctgaagttatgtgcagcttaatcaagacttggagacaaaatgggaagccaaacgaaagccaaggctgctgaaaaaatgctcaaaaatctccccccttctccctttggggctggtcaacccaagcaaggtgttccgaaaaaatggcaagcatcctacaaaccctgaaagtgcttgaatatccacaagaggaaaactctgccattctcgctttcctgggagggtgtcccgcaaatgttgccaagtgtctgtcctgcaagattggctaccccaactgttgcatcaagtacccccattcctatcatcaaacgggtacaaacgagtccctggcccttgtctgtggacgccggattacaccttccccacttgctgaaaaggtcaaggcttttcttggctgatccatcctgcctttgtgtgctgctgccgcctgtgggttgctgccaccacagcttgcttcgctctgctgctgcagcccccagctaaggttgaagccaaggaagagtcggaggagtcggacgaggatatgggatttggttctctttgactaatcaccaaaaaagcaaccaactttagccaagttttaatttgcaaaaacaagggaaataaaggcttatctctctttaaaaaaaaaaaaaaaaagggcggccgct

SEQ ID NO: 525 - DNA, 506 bp, Homo sapiens
  SIMILAR (76)..(261): 1001254mologous to Homo sapiens putative start codon,accession number X87689,Smith-Waterman Score=323.
  misc_feature (1)...(506): n = a,t,c or g
gccaaattttctgcntacatcaagaattcaaaccaggcactcaatgacaatctggagaagggactctngaaagccctgttgccaaagttacacatagtacaggtggtgtgtaagaagtaccggggattcaccatccccgaggccttccggggagtgcatcggtacttgagcaatgcctacgcccgggaagaattcgcttccacctgtccagatgatgaggagatcgagctcgcctatgagcaagtggcaaaggccctcaaataagcccctcctgggactccctcaaccccctccattttctccacaaaggccctggtggtttccacattgctacccaatggacacactccaaaatggccagtgggcagggaatcctggagcacttgttccgggatggtgtggtggaagaggggatgagggaaagaaatggggggcctgggtcagatttttattgtggggtgggatgagtaggacaacatatttcagtaataaaatacagaataaaa

SEQ ID NO: 526 - DNA, 1297 bp, Homo sapiens
  SIMILAR (464)..(1018): 371254mologous to Homo sapiens RNCC protein,accession number AJ012008,Smith-Waterman Score=150.
tgggagcccgggataggaccgagctggaggagctgggtgtggggtgcgttgggctggtggggaggcctagtttgggtgcaagtaggtctgatttgagcttgtgttgtgctgaagggacagccctgggtctaggggagagagtccctgagtgtgagacccgccttccccggtcccagcccctcccagttcccccagggacggccacttcctggtccccgacgcaaccatggctgaagaacaaccgcaggtcggaattgttcgtgaaggctggcagtgatggggccaagattgggaactgcccattctcccagagactgttcatggtactgtggctcaagggagtcaccttcaatgttaccaccgttgacaccaaaaggcggaccgagacagtgcagaagctgtgcccaggggggcagctcccattcctgctgtatggcactgaagtgcaccccagacacaacaaagattgaggaatttctggaggcagtgctgtggccctcccagggtaccccaagcctggcagctctgaaccctgaggtccaacacagctggggctgggacatatttgccaaatttttcttgcctaacattcaagaatttcaaaccccagcactcaattgacaatctgggagaaggggattccttgaaagcccctgaaaggttttagacaattacttaaccatcccccccttccccagaagaagtggatgaaaccagttgctgaaagattgaaggtgtctctcaagaggaagttttttggatggccaacgaaggcctcacccctggcttgacttgcaaacctgttgcccaaaagttacacattaagtacaggtggttgtgtaaaagaaagtaaccggggaattcaccccatcccccgaaggccttcccggggaagtgccatcgggtaccttgaagcaaaatgccctacgccccgggaaagaattcgccttcccaccctgtcccagatgatgaggagatcgagcttcgccctatgagcaaagtggcaaaggcccttcaaataagcccctccctgggactcccctcaaccccctccattttctccacaaaggcccctggtggtttccacattgctaccccaatgggacacactccaaaattggccagtgggcagggaatcctgggagatattgaaccggcgaagggtgtggtggaagaggggatgagggaaagaaatggggggcctgggtcagatttttaattgtggggtgggatgacgtaggacaacatattacaagtaataaaatacagaataaaaatcaagtgtttttaaaaaaaa

SEQ ID NO: 527 - DNA, 957 bp, Homo sapiens
  SIMILAR (842)..(955): 611254mologous to Mus musculus putative,accession number AK005032,Smith-Waterman Score=117.
gtgttgcaagggatatattttattagtttcattaatgaaattttaatagcaataaattcaggcttttaaatattacaaagtattttcaaatatctcatggggccttgatgttagcttcaggaagtatctagcaacctaatggctgtttgattagacttctcagactattattatccttgtcacataatagtgctttagtccatgtatcataggatcttcaagtattattcatttgtttccaaagcaaattgagctattccactcaaatgattacagtaaatagaatagaaacttgtggaatcatcttcctctctcgtaaatgaagtaacagcaaaatagcgcagcatctcagctgttccaggttcctcaaataagttttacttttgcaaaaccaacctcaaacttcctatattctctgttctgcattataagcaacatgaccagcagccacgtttgttgtaattttttaaatatgtggaaaaaaagcaagatatcaaccatgtattaccttaaccaagatgccaaattatctaacttgtttctccaggcaagccgcccgaacaacagggacagctcccaggagccagccaaggttgtctgtctgtccatccactcaggacatctgcagaatctgtcactgcgaaggggatgaagagagccccctcatcacaccctgtcgctgcactgggacactgcgctttgtccaccagtcctgcctccaccagtggattaagagctcagatacacgctgctgtgagctctgcaagtatgacttcataatggagaccaagctcaaacccctccggaagtgggagaaactacagatgaccccaagggaaaggaggaaaatattctgctctgtcacatttcaacgaaaccgcggatcacctgtgtggtttggtctttgtatgtattgatagaccgaacaacggaggaaatcaagcaaggcaatgtatt

SEQ ID NO: 528 - DNA, 2293 bp, Homo sapiens
  SIMILAR (11)..(745): 1001254mologous to Homo sapiens prion protein,accession number X83416,Smith-Waterman Score=1380.
agcagtcattatggcgaaccttggctgctggatgctggttctctttgtggccacatggagtgacctgggcctctgcaagaagcgcccgaagcctggaggatggaacactgggggcagccgatacccggggcagggcagccctggaggcaaccgctacccacctcagggcggtggtggctgggggcagcctcatggtggtggctgggggcagcctcatggtggtggctgggggcagccccatggtggtggctggggtcaaggaggtggcacccacagtcagtggaacaagccgagtaagccaaaaaccaacatgaagcacatggctggtgctgcagcagctggggcagtggtggggggccttggcggctacatgctgggaagtgccatgagcaggcccatcatacatttcggcagtgactatgaggaccgctactatcgtgaaaacatgcaccgttaccccaaccaagtgtactacaggcccatggatgagtacagcaaccagaacaactttgtgcacgactgcgtcaatatcacaatcaagcagcacacggtcaccacaaccaccaagggggagaacttcaccgagaccgacgttaagatgatggagcgcgtggttgagcagatgtgtatcacccagtacgagagggaatctcaggcctattaccagagaggatcgagcatggtcctcttctcctctccacctgtgatcctcctgatctctttcctcatcttcctgatagtgggatgaggaaggtcttcctgttttcaccatctttctaatctttttccagcttgagggaggcggtatccacctgcagcccttttagtggtggtgtctcactctttcttctctctttgtcccggataggctaatcaatacccttggcactgatgggcactggaaaacatagagtagacctgagatgctggtcaagccccctttgattgagttcatcatgagccgttgctaatgccaggccagtaaaagtataacagcaaataaccattggttgtctgaaatacctttgcctggatacctctggctccttcagcagctagagctcagtatactaatgccctatcttagtagagatttcatagctatttagagatattttccattttaagaaaacccgacaacatttctgccaggtttgttaggaggccacatgatacttattcaaaaaaatcctagagattcttagctcttgggatgcaggctcagccgctggagcatgagctctgtgtgtaccgagaactggggtgatgttttacttttcacagtatgggctacacagcagctgttcaacaagagtaaatattgtcacaacactgaacctctggctagaggacatattcacagtgaacataactgtaacatatatgaaaggcttctgggacttgaaatcaaatgtttgggaatggtgcccttggaggcaacctcccattttagatgtttaaaggaccctatatgtggcattcctttctttaaactataggtaattaaggcagctgaaaagtaaattgccttctagacactgaaggcaaatctcctttgtccatttacctggaaaccagaatgattttgacatacaggagagctgcagttgtgaaagcaccatcatcatagaggatgatgtaattaaaaaatggtcagtgtgcaaagaaaagaactgcttgcatttctttatttctgtctcataattgtcaaaaaccagaattaggtcaagttcatagtttctgtaattggcttttgaatcaaagaatagggagacaatctaaaaaatatcttaggttggagatgacagaaatatgattgatttgaagtggaaaaagaaattctgttaatgttaattaaagtaaaattattccctgaattgtttgatattgtcacctagcagatatgtattacttttctgcaatgttattattggcttgcactttgtgagtattctatgtaaaaatatatatgtatataaaatatatattgcataggacagacttaggagttttgtttagagcagttaacatctgaagtgtctaatgcattaacttttgtaaggtactgaatacttaatatgtgggaaacccttttgcgtggtccttaggcttacaatgtgcactgaatcgtttcatgtaagaatccaaagtggacaccattaacaggtctttgaaatatgcatgtactttatattttctatatttgtaactttgcatgttcttgttttgttatataaaaaaattgtaaatgtttaatatctgactgaaattaaacgagcgaagatgagcacca

SEQ ID NO: 529 - DNA, 2703 bp, Homo sapiens
  SIMILAR (699)..(1004): 941254mologous to Cercopithecus aethiops prion protein,accession number U08291,Smith-Waterman Score=510.
ccgcccgcgagcgccgccgcttcccttccccgccccgcgtccctccccctcggccccgcgcgtcgcctgtcctccgagccagtcgctgacagccgcggcgccgcgagcttctcctctcctcacgaccgaggcaggactcctgaatatttttcaaaactgaacaatttcagccatgtctgagctttccgtcttcctggaggcacaaatctagtttagctgaaccacaacagattagcagtcattatggcgaaccttggctgctggatgctggttctctttgtggccacatggagtgacctgggcctctgcaagaagcgcccgaagcctggaggatggaacactgggggcagccgatacccggggcagggcagccctggaggcaaccgctacccacctcagggcggtggtggctgggggcagcctcatggtggtggctgggggcagcctcatggtggtggctgggggcagccccatggtggtggctggggacagcctcatggtgggggctggggtcaaggaggaggcacccacagtcagtggaacaagccgagtaagccaaaaaccaacatgaagcacatggctggtgctgcaacagctggggcagtgtaggggggcctttgcagctactcgcctgggaagtgccatgagcaggcccatcatacatttcggcagtgactatgaggaccgttactatcgtgaaaaacatgcaccgttaccccaaccaagtgtactacaggcccatggatgagtacagcaaccagaacaactttgtgcacgactgcgtcaatatcacaatcaagcagcacacggtcaccacaaccaccaagggggagaacttcaccgagaccgacgttaagatgatggagcgcgtggttgagcagatgtgtatcacccagtacgagagggaatctcaggcctattaccagagaggatcgagcatgggcctcttctcctctccacctgtgatcctcctgatctctttcctcatcttcctgatagtgggatgaggaaggtcttcctgttttcaccatctttctaatctttttccagcttgagggaggcggtatccacctgcagcccttttagtgggtggtgtcctcaatccttcctctctccttttggtccccgggataggctaatcaataccctgggcactgatggggcactgggaaaaacataggagtaggacctgagatgctgggtcaagccccccttggattggagttcatcatgagccgttgctaatgccaggccagtaaaagttataacggcaaatacccattggttaatctggacttatttttggacttagtgcaacaggttgaaggctaaaaacaattctcggaacagtctgaaatacctttgcctgggatacctctgtgttcttttagcagttagaggtcaagtatacttatcgccctatcttaagtaagagatttcatagctatttagaagatattttcccatttttaaggaaaaccccgacaacatttctggcgggtgtgttttgggggcccactggatctctacccaaaaaatccctagagattcttagctcttggggatgcaggctcagcaccgctggagcatgagctctgtgtgtaccgagaactggggtgatgttttacttttcacagtatgggctacacagcagctgttcaacaagagtaaatattgtcacaacactgaacctctggctagaggacatattcacagatagaacataactgtaacatatatgaaaggcttctgggacttgaaatcaaatgtttgggaatggtgccccttggaggccaacctccccattttagatgtttaaaggacccctatatgtggcattcctttcctttaaactatagatgatgtaaagcagtgaaaaagtaattgccttctagccactgagggcaaatctcctttgtccctttacctggaaaacagaatgaattttgacatacaggagagctgcagttgtgaaagcaccatcatcatagaggatgatgtaattaaaaaatggtcaggtgtgcaaagaaaagaactgcttgcgatttctttatttctgtctcaataattgtcaaaaacccagattagggccaaggtcatggttctggtaattcggctcttgaatcaaaagaatagggagaccaatcttaaaaattatcctaaggttggagatgacagcaattatgattgatttgaagtggaaaaagtaaattccgttaatgcttaattaaagtaaaattattcccctgaattgtttgatattgctcacctagccagatatgtattacttttctggcaatgttattattggccttgcactttgtgaagtattctatgtaaaaatatatatgtatagtaaaatatatattgcataggacagacttagggagttttgtttagaccagttaccatctaaagtggtcaaaacccctaaccttttgtaaggtactgaatacttaatatgtgggaaaccctttttgcgtggtccttaggcttacaatgttgcactgaatcgttttcatggtaagaatccaaagtggacaccattaacagggtctttgaaaatatgcatgtactttatattttctatatttgtaactttgcatgttcttggttttgttatataaaaaaaattgtaaatggttaatatctggactgaaattaaacgagcgaagatggagcaccaaaaaaaaaaaaaaaaaa

SEQ ID NO: 530 - DNA, 637 bp, Homo sapiens; identical to SEQ ID NO: 490
  SIMILAR (47)..(412): 991254mologous to Homo sapiens gamma-G globin,accession number X55656,Smith-Waterman Score=637.
  misc_feature (1)...(637): n = a,t,c or g

SEQ ID NO: 531 - DNA, 724 bp, Homo sapiens
  SIMILAR (448)..(86): 441254mologous to Homo sapiens PRO2987,accession number AF116719,Smith-Waterman Score=156.
  misc_feature (1)...(724): n = a,t,c or g
aattttgccctcgaggccaagaattcggcgagggcaataagctcctagtcccagacgcccatgggtcatttcacagaggaggaccaaggctactatcgacaagcctgtggggcaaaggtgaatgtggaaagatgctggaggagaaacccctgggaaggctccctggttgtctaccccatggaccccagaggttctttgaccagctttggcaaacctgtcctctgcctctgccatccatgggcaacccccaaaagtccaaggcacatggccnaagaaggtgctgactttccttggggagatgccataaaagcacctgggatgatctcaaagggcaccttttgcccaagcctgaagtgaacttgcactgttgacaagcctgcaatgtgggatccttgagaacttcaaagctcctggggaaatgttgctggtgacccgtttttgggcaatcccattttcggcaaaagaatttcacccctggaggttggcagggcttcctgggcagaaagatgggtgacttggagttggccagtgcccttgttccttccagataccactgaagcctcttggcccatgaattcagaagctttcaaggataaggcttttattcttgcaagcaattacaaataataaatctatttctgctaagagatcacacatgattttcttcagctcttttttttacatctttttaaatatatgagccacaaagggtttatattgagaa

SEQ ID NO: 532 - DNA, 722 bp, Homo sapiens
  SIMILAR (449)..(84): 421254mologous to Homo sapiens PRO2987,accession number AF116719,Smith-Waterman Score=140.
gacactcgctttttggaacgtctgaggttatcaataagctccttagtcccagacgcccatgggtcatttcacagaggaggaccaaggctactatcgacaagcctgtggggcaaaggtgaatgtggaaagatgctggaggagaaacccctgggaaggctccctggttgtctaccccatggaccccagaggtttctttgacagctttggcaacctgtcctctgcctctgcccatccatgggcaaaccccaaaagtcaaggccacaagggcaaaaaaggtgctgacttcccttgggaagatgcccataaagcacctgggattgatcttcaagggcaccttttgccccagcttgagttgaacttgcacttgttgacaagcttgcatgtgggatccctgaggaactttcaagcttcctggggaaatgttgctggtgacccgtttttgggcaatcccattttcggcaaaagaatttcacccctgaaggtgccaggtttttcttgggcagaaagatgggtgacttggagttggccaattgcccttgttccttccagataccactgaagcctcttggcccatgaattcagaagctttcaaggataaggcttttattcttgcaagcaattacaaataataaatctatttctgctaagagatcacacatgattttcttcagctcttttttttacatctttttaaatatatgagccacaaagggtttatattg

SEQ ID NO: 533 - DNA, 508 bp, Homo sapiens
  SIMILAR (325)..(369): 1001254mologous to Homo sapiens cytochrome c oxidase subunit IV (COX4),accession number M34600,Smith-Waterman Score=89.
cctctgtgtgtgtacgagctcatgaaagtgttgtgaagagcgaagacttttcgctcccagcttatatggatcggcgtgaccaccccttgccggaggtggcccatgtcaagcacctgtctgccagccagaaggcactgaaggagaaggagaaggcctcctggagcagcctctccatggatgagaaagtcgagttgtatcgcattaagttcaaggagagctttgctgagatgaacaggggctcgaacgagtggaagacggttgtgggcggtgccatgttcttcatcggtttcaccgcgctcgttatcatgtggcagaagcactatgggcttagcctccaagtgggactacgaaaagaacgagtggaagaagtgagagatgctggcctgcgcctgcacctgcgcctggctctgtcaccgccatgcaactccatgcctatttactggaaacctgttatgccaaacagttgtaccactgctaataaatgaccagtttacctgaaaaaaaaaaa

SEQ ID NO: 534 - DNA, 1029 bp, Homo sapiens
  SIMILAR (54)..(293): 971254mologous to Homo sapiens cytochrome c oxidase subunit IV (COX4),accession number M34600,Smith-Waterman Score=390.
ggaattcgggacaccgggtgtagagggcggtcgcggcgggcagtggcggcagaatgttgactaccagtgtatttagcctagttggcaagcgagcaatttccacctctgtgtgtgtacgagctcatgaaagtgttgtgaagagcgaagacttttcgctcccagcttatatggatcggcgtgaccaccccttgccggaggtggcccatgtcaagcacctgtctgccagccagaaggcactgaaggagaaggagaaggcctcctggagcagcctctccatggatgagaaagtcgagtgtgggtattgaagggacccacaggcgcgcccagcagctctcggaagcgtgtgtgtgacagagcctctgctcacttctgggcctactgtctagagagcagtcttgcacaggagggttgctctgctgggtttcggggtcactgtgccagtgccccagtttatgtgctcaccagtcacttagctctgccagctgacaggatcttttgctgggcccccttccctgtgctgagtggaggtagcctctcagcatatctgctgggtaagacatagttaactgtaaattattgaaagaaactcagcaaaatgcatagtgtttggtatgaaaggggcagaaaaataacaagattaaatagaccctaatactgtaattcaagtaagaaataattttgcagttttaatttgcacctgaagcgaactgtatgcattttcttccttccttgccctgtcacatgcctgcgtgggcacgtgtgtgcacgtatgtgcgtgaacatgatgtggcctggcttggtgtatccttcagctctgtgtttcctccttcacaagtgtggttttggggagaagtggttgaatgttgcagaggagggagctgctgacctttgtgcctgtaaatggctgtcctctctgcccccagtgtatcgcattaaagttcaaggagagctttgcttgaggatgaacagggggcttcgaacgagtgggaagacggttgtggggcggtgcattgtttcttcatcggtttc

SEQ ID NO: 535 - DNA, 895 bp, Homo sapiens
cgacgttcgcagcgctacccttttccgctccacggtgacctccgtgcggccgggtgcgggcggagtcttcctcgatcccgtggtgctccgcggcgcggccttgctctcttccggtcgcgggacaccgggtgtagagggcggtcgcggcagggcagtggcgccagaatgttggcttaccaggggtatttagccctagttggcaagcgagcaattttcaacctctgtggtgtgtacgagctcaatgaaagtttttgtgaagagcgaagacttttcgctcccaaccttatatggaatcggcggtgacccacccccttgccggaaggtggccccatgtcaaagcaccctgctctgcccagcccagaaggccactgaaggagaaggagaaagccctcctgggagcagccttttccatgggatgaggaaagttcgagttgttattcgcattaaagttcaaggaagaggctttgcttgaagattgaacaagggggctccgaaccgagttgggaaagaccggtttgtttgggccggtgccattgtttccttcaatcgggttttcaccgcggctcgttattcatgttgggcagaagcactatgttttaacggcccccttccccgcaaagtttttgaacaaagagttgggttggcccaagcaggaccaagaggatgcttggacaatgaaggtgaacccccatccaaggctttagcctccaagttgggactacgaaaagaacgagttggaagaagtgagagatgcttggcctgcgcctgcaacttgcggctggctctttcaccgccatgcaaactccatgcctatttactggaaacctgttatgccaaacacgttgtaccactgctaataaatgagccagtttacctgaaaaaaaaaaaaaaaaaa

SEQ ID NO: 536 - DNA, 550 bp, Homo sapiens
tccaacagaaagataccaagagcctttactggtaatgagaagaggaaagattttctgtttataataaccagaaagaaatggaattgtctaataaccatcaattgagtatgagcctagttgagttgagtatgagtctagtatgggatgctaatcttctggggtgggggaagtcctgtgagctaaccaaaccctcctggtctctggtgaggtccacaagtaggcactccaggaagaaggggagttcctggcacctgcctgccaaactctgctctacttgctgaactttgctcagcatgaacagggcattctggctacaagttcccccaaactatcccagattgtatctttaaggcacaccaattcctctgcttaaggacttctgttcacaatgaattgtattagttattcttaacattccaaagagaaagttctgcatcagaggccacccctgtccagccattgtgaccctgagatcccgagactgtggggatgagggcagagcattgaacatcagggattctggtcatgggggtcaacttgagcatgattt

SEQ ID NO: 537 - DNA, 687 bp, Homo sapiens
  SIMILAR (393)..(28): 1001254mologous to Escherichia coli 37KD protein, similar to YI22-ECOLI,accession number D85613,Smith-Waterman Score=602.
gaggggtccgaggtggacttcacggcatgcgtgcgctatccacttttttgcccgtccatattcaacggcttctttgaggagttcattttccatcgttttcttgccgagcaggcgctggagttctttaatctgcttcatggcggcagcaagttcagaggcaggaacaacctgttctccggcggcgacagcagtaagacttccttcctggtattgcttacgccagagaaataactggctggctgctacaccatgttgccgggcaacgagggagaccgtcatccccggttcaaagctctgctgaacaattgcgatcttttcctgtgtggtacgccgtctgcgtttctccggccctaagacatcaatcatctgttctccaatgactagtctaaaaacttcggacatggtgccatctttgttttcctctccaggtgatcgtgttgccatcgaatctggtgctccccgagaaaatgatgaattctgcaagatgggccgatacaatctgtcaccttccatcttcttctgtgccacaccccccgatgatgggaacctctgccggttccctgaaattgtgaagttgagtctggaggaagcaaagtgcctccctttctgcgtggccccccatggccccagccgtggagctctagggtgccgaagtgccgctttccccctgacccaacccagatgcat

SEQ ID NO: 538 - DNA, 420 bp, Homo sapiens
  misc_feature (1)...(420): n = a,t,c or g
tttcgtctgcggtgagnttgaagcctagggcgcgggcccgggtggagccgccgcaggtgcagatcttggtggtagtagcaaatattcaaacgagannnnnnnnnnnnnnnnnnnnnnnnnnnnnnnnnnnnnnnnnnnnnnnnnnnnnnnnnnnnnnnnnnnnnnnnnnnnnnnnnnnnnnnnnnnnnnnnnnnntttacccgggcttgataatgcttgcctgaacccccagttatggggggaggctggggggaaaaaattgggtgacctannnnnnnnnnnnnnnnnnnnnnnnnnnnnggggttgttgccctccacctgggtggaaaaagggaccccctgtctcaaaaggaatgaaggaatccccagggggggaattgccccaaacaggaaaaaagcccgtttttttattttaagaaa

SEQ ID NO: 539 - DNA, 846 bp, Homo sapiens
  SIMILAR (594)..(812): 861254mologous to Mus musculus putative,accession number AK014698,Smith-Waterman Score=313.
  misc_feature (1)...(846): n = a,t,c or g
tttcgtcggaggcgggcgcgggcgcgtccctgtggccagtcaccggaggagttggtcgcacaattatgaaagatttcgttttttgctgctagcgcctgagctgagttagttctgagaaggtttccctgggcgttccttgtccggcggcctctgctgccgcctccggagacgcttcccgatagatggctacaggccgtggaggaggaggaggtggagttgctgcccttccggagtccgccccgtgaggagaatgtcccacaaatcctggatagaaagcactttgaccaagagggaatgtgtatatattataccaagttccaaggacccttacagatgccttccaggatgtcaaatttgtcagcaactcgtcaggtgtttttgtggtcgtttggtcaagcaacatgcttggtttactgcaagtcctgccatgaaatacttagatgtgaaattgggtgaccattttaatcaggcaatagaagaatggtctgtggaaaagcatacagaacagagcccaacggatgcttatggagtcataaattttcaagggggttctcattcctacagagctaagtatgtgaggctatcatatgacaaccaaccctgtagtcattctgcaacttacggttaaagaatggcaaatggagttacccaaacttgttatctctgtacatgggggcatgcagaaatttgagcttcacccacgaatcaagcagttgctttgaaaaggtcttattaaagctgcagttacaactggagccctgattttaactggagggagaaacacaggtgtgggcaaacatggtggagatgcacctcaaagaacatgcttncagatcatctcgaaag

SEQ ID NO: 540 - DNA, 3063 bp, Homo sapiens
  SIMILAR (1389)..(1616): 591254mologous to Callithrix sp. sorbitol dehydrogenase,accession number AF010494,Smith-Waterman Score=208.
atgtccaaacctaagtgtctcgtaattcttgtaggaattcagaagtcatcccagatgcctcaattcccacctcctgcgggatctgaaagaaggagagggattaggcaatgggaaatgggtgtagttggaggtgaaatgggggtgtggtggccaccaggtgtgcagggcagccctccacaggcccacaggaggcttggcagcagggagcagctctttgcaccacccctgaaggagaaaagtcatattccaccttggggctacagtagggagaactatcctatccctgaaccaggcccaaatggaaggccagtcaccgaagtgtggggcagcccaggacctactgtccagtgggggtgggaggggctgcatgaggccctgtcccctgccctaatcaaccaagcacagaaagaccctgaagtgaggctgggggcaatggtcagagtgtctgtagatactcaccctccccctctcacacctagacagtcaggtcccctttctgcccttgaggagttgggggtgtcctttcccactttgtcctacctcacaccagaaccgcagcttctgggtgaacatcagatcaaaggcagctttcctggtagatccacagctttgctactgaaagaggtcttgctgaggatgcattctgttggaatctgtggctcagatgtccacctactgggagtatttgtcgaatttgggaattttattgtgaaaaagcccatggtgctgggacatgaagcttcgggaacagtccgaaaaagtgggatcatcggtaaaagcaccctaaaaccagggtgatcgtgttgccatcgagcctgggtgctcccccgaggaaaattgatggaattcttgccaagatgggcccgatacaatctgtcaccttccatcttcttctgtgccacgccccccgatgacgggaacctctgccggttctataagcacaatgcagccttttgttacaagcttcctgacaatgtcacctttgaggaaggcgccctgatcgagccactttctgtggggatccatgcctgcaggagaggcggagttaccctggggacacaaggtccttgtgtgtgggagctgggccaatcggggatgggtcactttgctcgtggccaaagcaatgggagcagctcaagtagtggtgactgatctgtctgctacccgattgtccaaagccaaggagattggggctgatttagtcctccagatctccaaggagagccctcaggaaatcgccaggaaagtagaaggtctgctggggtgcaagccggaagtcaccatcgagtgcacgggggcagaggcctccatccaggcgggcatctacgccactcgctctggtgggaccctcgtgcttgtggggctgggctctgagatgaccaccgtacccctactgcaatgcagccatccgggaggtggatatcaagggcgtgtttcgatactgcaacacgtgggccagtggcgatttcgatgcttgcgtccaagtctgtggaatgtcaaaacccctcgtcacccatagggtttcctcttggagaaaagttttggaggcctttgaaacatttaaaaagggattggggttgaaaatcatgctcaagtgtgaccccagtgaccagaatctctgatgttaatgggctctgccttcaatccccacaggtcctgggatctcaggggcacaatgggctggacatgggttggggctctgatgcagaactttctcttttgaaatgttaaggaataacctaatacaaattccattgtgaaacaagaaagtccctaccgcagagggaattgggtgtgcccttaaaagataccaatctggggatagtttgggggaacttggtaagcccaggaatgcccctgttccatgcctgagcagaagttccagcaaagtagagcagagtttgggcgaggcaggtcccccaggaacgcccgttcgtgtcctggagtgccttcattgaggaaggaaatcctggcccttgggtttccctggtgccactgcgtactgaaccagaggggaatgagggctgagttatgaagagataacttcatgaagacttaagctggcccagaggctgatgttcatgaaaatgtgccactcagggtgcgtgggatgaaggcttgtcagcacttccaggtttagaacggcaatgtttctagagacatattggccgtttgttttgatgataaaaggggaataggaaaaggcatcactttcctggatccaggataatttttaaaccaatcaaatgaaaaaaacaagcaaacaaaaaagggaaatgtcatgtgagggtaaaccagtttgcattcccccaatgtgggaaaagtaagaggactactcagcacctgtttgaagattgcctcttctccagctcttgagaattgtgttatttcacttgccaaaataagcccctccccccccaacaatgccccagccccaccccctaaagcatggtcccttgtcacccaggcaaccaaggaaactgctacttgtggacctcaccagagaaccagaagggtttggttagctcacaggacttccccccacccccagaaagattagcatccccatacctagacctcatacctcaacctcaacctaggctccatacctcaattggatgggttattaggaccaattcccatttctttctggttaattataaaacagaaaatctttccctcttctccattacccagtaaaggccccttggtatcctttcctgttggaatgatttcctatgaaccttggtcttaatttttaaatggtggggttttttttcctggtaaagatttggaccctaaatcggcatcatgcccaacttgtgacttttgagaactattcatcaagaatgaggatatagtagccatgacatagcttgagctatagcctttaattcccttccttgggctatgggtggaagggtgagtttgaagaggttctgattttcttgtaacctgggaaagccatgaccttgtgcccggtctctttcgagattgctttgggtaatagatattggtggtggtatctgaaaaaaaaaatagtaaaaaaaaaaagtcgacggc

SEQ ID NO: 541 - DNA, 807 bp, Homo sapiens
  SIMILAR (1)..(555): 781254mologous to Salmonella typhimurium tetracycline resistance protein,accession number AF117344,Smith-Waterman Score= 687.
atgcccttgagagccttcaacccagtcagctccttccggtgggcgcggggcatgactatcgtcgccgcacttatgactgtcttctttatcatgcaactcgtaggacaggtgccggcagcgctctgggtcattttcggcgaggaccgctttcgctggagcgcgacgatgatcggcctgtcgcttgcggtattcggaatcttgcacgccctcgctcaagccttcgtcactggtcccgccaccaaacgtttcggcgagaagcaggccattatcgccggcatggcggccgacgcgctgggctacgtcttgctggcgttcgcgacgcgaggctggatggccttccccattatgattcttctcgcttccggcggcatcgggatgcccgcgttgcaggccatgctgtccaggcaggaacaggagtacagctgtgtagtaaagatgccttctggtgaatttgcacgtatatgccgagatctcagccatattggagatgctgttgtaatttcctgtgcaaaagacggagtgaaattttctgcaagtggagaacttggaaatggaaacattaaattgtcacagacaagtaatgtcgataaagaggaggaagctgttaccatagagatgaatgaaccagttcaactaacttttgcactgaggtacctgaacttctttacaaaagccactccactctcttcaacggtgacactcagtatgtctgcagatgtaccccttgttgtagagtataaaattgcggatatgggacacttaaaatactacttggctcccaagatcgaggatgaagaaggatcttag

SEQ ID NO: 542 - DNA, 1435 bp, Homo sapiens
  SIMILAR (272)..(658): 451254mologous to Mus musculus putative,accession number AK012730,Smith-Waterman Score=163.
gctggcgccctggttctggaggttaccggttactgagggcgagaagcgccacccggaggctctagcctgacaaatgcttgctgacctgggccaaagctcttcccttacgcaagtctcagcccgtcgtcgcgacgttcgcccgctcgctctgaggctcctgaagccgaaaccagctagactttcctccttcccgcctgcctgttagcggcgttgttgccactccgccaccatgttcgagggcgcgcctgggtccagggctccatcctcaatgaaggtgttggatgagcactcaaggaccatcatcaacgagggcctgctggggatattaggctccagcgggtgtaaacctgcagagcatgggacatcgtcccacggtctctttgggtgcagctcaccctgcgggtctgaggggcttcgacaccgtaccgctgcggaccgcaacctgggccatgggcgttgaaacctcaccagtattgtccaaaatacttaaaatggcggccggcaatgaagattatcattaacactaagggccgaagataacgccggataccttgggcgctagtattttgaaggcaccaaaccagggagaaagttttcagactatgaaatgaagttgatggatttagatgttgaacaacttggaattccagaacaggaagtacagctgtgtagtaaagatgccttctggtgaatatgccacgtatatgccgagaatcccagcccatattgggagatgctgttgtaaatttcctgtgccacaagacgggagtgaaaatttttctgcaagtggagaacttggaaatgaaacccattaaattgtcacagacaagtaatgtcgataaagaggaggaagcttgttcccataaagatgaatgaacccagttcaacctaacttttgccactgagggtacctgaacttctttaccaaaagccactccactctcttcaacggttgacactccagtatgttctgcagatggtacccccttggttggtaggagtataaaaattgccggatatggggaccacttaaaatacctacttgggctccccaaggatccgaggatcgaagaaggatctttaggccattcttgaaaattccaagaaaataaacctaagctctttgagaactgccttcctaagatgcccagcatatactgaaagtcttttctgtcaccaaattttgtacctctaagtacatatgtagatattgttttctgtaaataacctattttttttctctattctctgcgaatttgtttaaagaataaagtccaaagtcagatctggtctagttaacctagaagtatttttgtctcttagaaatacttgtgatttttataatacaaaagggtcttgactctaaatgcagttttaagaattgtttttgaatttaaataaagttacttgaatttcaaacatcaaaaaaaaaaaa

SEQ ID NO: 543 - DNA, 637 bp, Homo sapiens; identical to SEQ ID NO: 490
  SIMILAR (47)..(412): 991254mologous to Homo sapiens gamma-G globin,accession number X55656,Smith-Waterman Score=637.
  misc_feature (1)...(637): n = a,t,c or g

SEQ ID NO: 544 - DNA, 718 bp, Homo sapiens
  SIMILAR (101)..(559): 531254mologous to Homo sapiens gamma-G globin,accession number X55656,Smith-Waterman Score=270.
  misc_feature (1)...(718): n = a,t,c or g
aattttgccctcgaggccaagaattcggcgagggcaataagctccttagtcccagacgcccatggggtcatttcacagaggaggaccaaggctactatcgacaagcctgtggggcaaaggtgaatgtggaaagatgctggaggagaaacccctgggaaggctcctggttgtctacccatggacccagaggttctttgaccagcttttggcaaacctgtcctctgcctctgcccatcatgggcaacccccaaaagtccaaggccacatggccaagaaggtgctgactttccttggggagatgcccataaagcacctggatgatctcaaagggcaccttttgcccaagcctgaagtgaactgcactgttgacaagcctgcaatgtgggatcctgagaacttcaaagctcctggggaaatgttgctggtgacccgttttgggcaatcccattttcgggcaaagaattcancccctgaaggttgcaggcttcctgggcagaaagatgggtgacttggagttggccagtgcccttgttccttccagataccactgaagcctcttggcccatgaattcagaagctttcaaggataaggcttttattcttgcaagcaattacaaataataaatctatttctgctaagagatcacacatgattttcttcagctcttttttttacatctttttaaatatatgagccacaaagggtttatattgagaa

SEQ ID NO: 545 - DNA, 402 bp, Homo sapiens
  SIMILAR (55)..(234): 1001254mologous to Homo sapiens GDP dissociation inhibitor,accession number L20688,Smith-Waterman Score=316.
agagacagaggcacctccggacagagacgtgaagcactgaataaatagatcagaatgactgaaaaagccccagagccacatgtggaggaggatgacgatgatgagctggacagcaagctcaattataagcctccaccacagaagtccctgaaagagctgcaggaaatggacaaagatgatgagagtctaattaagtacaagaaaacgctgctgggagatggtcctgtggtgacaggtatgtgtgtacagagaacagggtgggtggaagatcgctgagagggaagaagacattttggctgctcaggagcagcagcaaagggaagaggaccaactgcttccaggaaaaagtgagcgaggcacaatttatatatgctgattaaagttatgaactgtataattaaa

SEQ ID NO: 546 - DNA, 1317 bp, Homo sapiens
  SIMILAR (91)..(720): 461254mologous to Homo sapiens GDP dissociation inhibitor,accession number L20688,Smith-Waterman Score=297.
  misc_feature (1)...(1317): n = a,t,c or g
ccgtaatttccgggtcgacgatttcgtcagaggcaccccggacagagacgtgaagcactgaataaatagatcatttttgattgtttaaagccccagaaccacatgtggaggaggatgactgatgatgagctggacagcaagctcaattataagcctccaccacagaagtccctgaaagagctgcaggaaatggacaaagatgatgagagtctaattaagtacaagaaaaccgctgctgggagatggtcctgtggtgacagatcccgaaagcccccaatgtccgttgtcacccggctcaccctgggtttgtgagagtgccccggggaccaatcaccatggaccttacttggaagatctggaaagccctcaaaaaaggaaaccatttggtgttaaaaggaaggttctggaatattaggagttcaaaatttcactttccaaagttgaacaggggataattgttgttcagggcctgaaattacgttcagcacacctacaggactgggggtgaaagtggataaagcaacattttatggtttggcagctatggacctcggcctgaggagtatgagtttcctcacttccagttgaggaggcttcccaaagggcatggctggcccgaaggcacgttaccacaaaaagtccttttttcaccgacgatgacaagcaagaccacctcagctggggagtggaacctgttcgattaagaaggagtggacagaatgaattgcatccacccctttccccaccctttgccacctgggaaggaatttttttcagggcgtgtttcagcaccctgttccctcctccctgttccacagctggggttccctctttcaacatttgccacatttcccttaattggatgcattcttttccccaccctgtcacttcaacgtgggtccccctagaacaagaggcttaaaaccggggctttcacccgaacctgctcccctctgatccctccatcagggcccagatcttcccacgtctcccatcctcagtacacaatcatttaatatttcccctgtcttaccccctattcaaggcaactaggagggccaggaaaatggggcaaattattcactaacagggtctttggactcagggttccagtaggtttcattctaatgcctaggattcttttgtggttgttgctgggcccaatgagtccctagtcacatcccctgccagaggggagtttttcttttgctcacaccccctgtaaacgatcaaaaagaacaagaataaaacaataactgtgaanaataatagagggggtcgtttctctctgtttatcgaatgcttatccgatccgcc

SEQ ID NO: 547 - DNA, 444 bp, Homo sapiens
  SIMILAR (63)..(284): 941254mologous to Homo sapiens phenylalanine hydroxylase,accession number K03020,Smith-Waterman Score=359.
atgattcaacctcacccacattgaatctagaccttctcgtttaaagaaagtgagtatgaattttcacccatttggataaacgtagcctgcctgctctgacaaacatcatcaagatcttgaggcatgacattggtgccactgtccatgagctttcacgagataagaagaaagacacagtgccctggttcccaagaaccattcaagagctggacagatttgccaatcagattctcagctatggagcggaactggatgctgaccaccctgtgagtccatggcccgtaggatgagattttttcagtgcctctcctccactcccctcccttcctcttaccttctctacttggagcaatgtacttgttcacttgttcaacaaacacttattgtgttcctatttacacgagggctgggaaaaattagcaagactttattgtcatcatcaaa

SEQ ID NO: 548 - DNA, 374 bp, Homo sapiens
gggaaattagaagataaaaacatacttttagaagaaaaaagataaatttaaacctgtctacacttaacctctccagtctcctggggtcctgtctatcctcaaccccttcagtctccttgttccctgtctaccctccagtctcctggggtcctactctaccctcaacccctaccatctcttggtgtcctgcctctaccctcaactgctaccatctattctcacacagcagccagaaggagtgcttggtaacacaagtgagatcatgaccatctatctgcccattaaaatagttacaagcattgaacttctttagtattatattaatataaaaacatttttgtatgttttattgtaatcataaatactgctgtata

SEQ ID NO: 549 - DNA, 916 bp, Homo sapiens
  SIMILAR (359)..(874): 901254mologous to Homo sapiens phenylalanine hydroxylase,accession number K03020,Smith-Waterman Score=778.
  misc_feature (1)...(916): n = a,t,c or g
accagggagattacaggatgagaagtgttcatgactcatagctcacttaggtatatgggagcattccacaggaatattagctcttctgcctggtaccccactgggatactcttaagacccttggctgctgtgccctaccctgcacctggctcttatttttccttccttttcttctttttaccttgtaccctgccttttatgatcccaacctctgcatatcacttattcctgggagagggatcataagcctaaaagagttatttccattctttctgcccattcctcatgtagaaagactgagtctggcttggcttaaacctcctcccctccgagctctctgtgctttctgtctttcagtgacatctgccatgagctgttgggacatgtgcccttgttttcagatcgcagctttgcccagttttcccaggaaattggccttgcctctctgggtgcacctgatgaatacattgaaaagctcgccacaatttactggtttactgtggagtttgggctctgcaaacaaggagactccataaaggcatatggtgctgggctcctgtcatcctttggtgaattacagtactgcttatcagagaagccaaagcttctccccctggagctggagaagacaggcatccaaaattacactgtcacggagttccagcccctgtattacgtggcagagagtattaatgatgccaaggagaaagtagggaactctgctgccacaatacctcggcccttctcagttcgctacgacccatacacccaanggattgagggtctggacaatacccagcaggcttangatttgggctgatttcatttaacagttgaaattggaatcctctgcagtgcccttcagaaaaataaagttaaggccatggacaggatggtggtctgtcaggctgttgaa

SEQ ID NO: 550 - DNA, 1273 bp, Homo sapiens
  SIMILAR (1258)..(737): 1001254mologous to Homo sapiens Human aspartate protease psl 2 protein,accession number AAB10548,Smith-Waterman Score=913.
ctgacgagttgctgacaaatttgacatcctggaaggcatttggatcatttccgataatcaccacagtaacattgcgagtcagttcttgatgaagcctatgcccagaacgaactgcacacccgtcccgagaggacaaatccggaagcctcaaggcaattcgagggtccttcgccgcatggaacgcggctccccacacacttgcctgccaagtctctcctttaccgcccgcaaccccagaaccattccccgcccgggcctgcgtgggtccagtaccattctcctcacggggcggactccggaagggcagcaactccacctcctcctcctccgcggcctgtagccatctatcgggaagcgtctccggaggcggcagcagaggccgccggacaaggaacgcccagggaaaccttctcagaactaactcagctccggcgctagcagcagaagccgagtctttcataattgtgcgaccaactcctccgggtgaccacatacacgcatacaccacaccttctgcaccaaaaactgggttgttcccttgatgtaatatgtacctatccacctttccatttattttgcttttcattatttccaaaaggtccagctgcgagttcaaccatgatactctcaccattctgtcttcatttcgaaacacagcccaaacaacagctactgctatgcacagtccagagagaaaaataagtctcacttccatgtttttgccacgacatgcaatcaattcaactagtccactccagtatccacctaatgccacagtgaacaccgcaattacaaaaataaccaccatagtataatcaaagttaggccacgatggagaatacattttcacagtaatgttatctcctagagtctggttcatatctctaaagtctttgtagcttataaatgcaatcagtattttcacatcaggaaattcagatctgttacctgagggaggaaataggacactgttattgacaactaacattgcttcagcacctcctttctgtgcaattctggctttttcaagaaaatggcagcttccccatggaaccacaactgctttgctctttatgccaacaggaggaatatcagaaaggttgcatagtggtgtggaagtcagattcatcaaactaatggaagttgcattttctagggtacttggaagagctgtccaataagggttataaagcatgcagtagtccttggttgtgccatttccagacgcatgcaagattgcttcctgagcggctgtcaggatattagcctccat

SEQ ID NO: 551 - DNA, 2756 bp, Homo sapiens
  SIMILAR (473)..(946): 421254mologous to Homo sapiens phenylalanine hydroxylase,accession number K03020,Smith-Waterman Score=191.
cagctgggggtaaggggggcggattattcatataattgttataccagacggtcgcaggcttagtccaattgcagagaactcgcttcccaggcttctgagagtcccggaagtgcctaaacctgtctaatcgacggggcttgggtggcccgtcgctccctggcttcttccctttacccagggcgggcagcgaagtggtgcctcctgcgtcccccacaccctccctcagcccctcccctccggcccgtcctgggcaggtgacctggagcatccggcaggctgccctggcctcctgcgtcaggacaagcccacgaggggcgttactgtgcggagatgcaccacgcaagagacaccctttgtaactctcttctcctccctagtgcgaggttaaaaccttcagccccacgtgctgtttgcaaacctgcctgtacctgaggccctaaaaagccagagacctcactcccggggagccagcatgtccactgcggtcctggaaaacccaggcttgggcaggaaactctctgactttggacagggaaacaagctatattggaagacaactgcaatcaaaaatgggtgcccatatcactggatcctcctcacctcaaagaaagaaagttgggtgcattgggcccaaagtattgcgccttatttggaggagaatgatgtaaacctgaccccacattgaatcctagaccttctcgtttaaaggaaagatgagtatggattttttccaccctttgggattaaacgtagcctgccttgctctgacaaacatcatcaagatcttgaggcatgacattggtgccactgtccatgagctttcacgagataagaagaaagacacagtgccctgggttcccaagaaccattcaaggagctggacagatttgccaatcagattctcagctatgggagcgggaactgggatgcttgaccaccctggttttaaagatcctgtgtaccgtgcaagacggaagcagtttgctgacattgcctacaactaccgccatgggcagcccatccctcgagtggaatacatggaggaagaaaagaaaacatggggcacagtgttcaagactctgaagtccttgtataaaacccatgcttgctatgagtacaatcacatttttccaccttcttgaaaagtactgtgcctcccatgaagataacattccccagcttggaagacgtttctcagttcctggcagacttgcactggtttccgcctccgacctgtagctggcctgctttcctctcgggatttcttgggtgacctggccttccgagtcttccactgcacacagtacatcagacatggatccaagcccatgtatacccccgaacctgacatctgccatgagctgttgggacatgtgcccttgttttcagatcgcagctttgcccagttttcccaggaaattggccttgcctctctgggtgcacctgatgaatccattgaaaagctcgccccaatttactggtttactgtggagtttgggctctgcaaacaaggagactccataaaggcatatggtgctgggctcctgtcatcctttggtgaattccagtactgcttatcagagaagccaaagcttctccccctgggagcctggagaagacagccatccaaaattacactgtcacggagttccagccccctgtattacctggccgaggagttttaatgatgcccaaggagaaatttagggaacctttgctgccacaattacctcggcccttctcagttccgccacgacccccatacaccccaaaggattggagggtcctgggacaatacccagcagctttaagattttggcttgattccatttaacagtgaattgggattccttttgcagttgccctccagaatataaagtaaagccatggacagaatgtgggctgtcagctgtgaatctgttgatggagatcccaactatttctttcatcagaaaaagtccgaaaagcaaaccttaatttgaaataacagccttaaatccttctacaagacggagaaccatcaaataagtcaaaattatctgtaatgacaagatatgtagttcatactcaagagcataaatggtaaatcttttggggtcatctttgatttagagatgataatcccccatactctcaattgagttaaatcagtaatctgtcgcatttcatcaagattaattaaaatttgggacctgcttcattcaagcttcatatatgctttgcagagaactcaataaaggagcatataaggctaaatgtaaaacacaagactgtcattagaattgaaatatgtggccttaatataaatcgtaacctatgaagtttatttcctatttaggttaactatgattccaattactactttgttattgtacctaagtaaatttcctttaagtcagaagcccattaaaatagttacaagcattgcaacctccttaggtattatattaatataaaaacatttttgtatgttttattgtaatccataaatactgctgtataagggtaataaaactctgcaccctaatcccccataacttcccagtatcattttcccaattaattatcaagtctgttttgggaaacactttgagggacatttatgatggcagcagatgttgactaaaggcttggttggtagatattcaggaaatgttcactgaataaataaggtaaatacattattgaaaagcaaatctgtataaatgtgaaatttttatttgtattagtaataaaacattagtagtttaaacaat

SEQ ID NO: 552 - DNA, 600 bp, Homo sapiens
  SIMILAR (1)..(225): 631254mologous to Mus musculus gamma actin-like protein,accession number AF195094,Smith-Waterman Score=228.
  misc_feature (1)...(600): n = a,t,c or g
atgcagaagtagatcaccgcctgggcgccagcacccatgaagatcaagatcatcgcaccnccagagcgcaagtactcggtgtggatcggtggctccatctggcctcaactgtccacctccagcagatgtggattagcaagcaggagtacgacgagtcgggcccctccatcgtccaccgcaaatgcttctaaacggactcagcagatgcgtagcatatgctgcatgggttaattgagaatagaaatttgcccctggcaaatgcacacacctcatgctagcctcacgaaactggcaagaaccagttgttttgtcttgcgggtctgtcagggttggaaagtccaagccgtaggacccagtttcctttcttagctgatgtctttggccagaacaccgtgggctgttacttgctttgagttggaagcggtttgcatttacgcctgtaaatgtattcattcttaatttatgtaaggttttttttgtacgcaattctcgattctttgaagagatgacaacaaattttggttttctactgttatgtgagaacattaggccccagcaacacgtcattgtgtaaggacccataaaagtgctgccgtaacc

SEQ ID NO: 553 - DNA, 973 bp, Homo sapiens
  SIMILAR (13)..(330): 501254mologous to Tupaia belangeri beta-actin,accession number AF110103,Smith-Waterman Score=210.
  misc_feature (1)...(973): n = a,t,c or g
tccggggcctgtccagccttcctcgtcgataggaatctgcggcatcacgagaccaccttcaacttaatcatgaagtgtgacgtggacatccgcaaagacctgtacgccaacacggtgctgtcgggcggcaaccaccatgtatccgggcattgctgacaggatgcagaaggagatcacggcccttggccgccaagcacattaagattcagattcatcgcacccccaggaggcgcaagtactcggtgtggatcggtgggctccatcctggcctcactgtccaccttccagcagactgtgcttaggcaagcaggagtacgacgagtcgggcccctccatccgtccaacgcaaatgcttctaaacgacttcagcaagatgcgtagcatttgctgcatgggttaattgagaatagaaatttgcccctggcaaatgcacacacctcatgctagccctcacgaaacttggaataagcccttcgaaaagaaattgtccttgaaagcttgtatccgaaaatcaagcaactggattgtaagaaacttgttgcctgaaatttgacccttgtaantgaaagttaaactgttcccccttggtaantaaacgtgtccagggctgagtgttcctgggatttcctctagaggctggcaagaacccagttgtttttgtcttgcggggtcttgtcagggttggaaaagtccaagccgataggaccccagtttcctttcttaagctgatgtcttttggccagaacaccgtgggctgttaattgcttttaagttgggaagcggtttgcatttacgcctgtaaatgtattcattcttaatttatgtaaggttttttttgtacgcaattctcgattctttgaagagatgacaacaaattttggttttctactgttatgtgagaacattaggccccagcaacacgtcattgtgtaaggaaaaataaaagtgctgccgtaaccaaaaaaaaaaaaaa

SEQ ID NO: 554 - DNA, 2048 bp, Homo sapiens
  SIMILAR (100)..(480): 601254mologous to Trichosurus vulpecula gamma-actin,accession number AF076191,Smith-Waterman Score=359.
  misc_feature (1)...(2048): n = a,t,c or g
atccttaattaaattaatccccccccgctcagtcgccgctgccaactctcgcactctgttcttccgccgctccgccgtcgcgtttctctgccggtcgcaatggaagaagagatcgccgcgctggtcattgacaatggctccggcatgtgcaaagctggttttgctggggacgacgctccccgagccgtgtttccttccatcgtcgggcgccccagacaccagggcgtcatggtggggcatgggccacgaacggactcctacgtgggcgacgaggcccaagaagcaagcgtggcatcctgaccctgaagtaccccattgagcatggcatcgtcaccaactgggacgacatggaagaagatctggcaccacaccttctacaacgagctgcgcgtgggccccggagaagcacccagtgcttgctgaccgaggcccccctgaaccccaaggccaacagagagaagatgactcagaattatgttttgagaccttcaacacccccggccatgtaccgtggcccatccaggccgtgctgtccctctaaagcctctgggcgcaaccaattggcattgtcatggactctgggagacggggtcacccacacggttgcccatcttacgaggggctaccacactgctccacgccatttctgcgtctgggacctggcttggcccgggacctgaccgactacctcatgaagatcctcactgtagcgaggctacagcttcaccacccacgggccgagcgggaaaacgttccgcaacatcaagggagaagcttgtgctacgtcgcccctggacttcgagcagggagatgggcacccgncgcatcctcctcttctctggagaagagctacgagctgcctgatggccaggtcatcaccattggcaatgagcggttccggtgtccggaggcgctgttccagccttccttcctgggtatggaatcttgcggcatccacgagaccaccttcaactccatcatgaagtgtgacgtggacatccgcaaagacctgtacgccaacacgggcgctgtcgggcggcaccaccatggatccgggacattgccgacaagattgcagaagggagatcaaccgccctggcggccccagcaccatgaaaaatcaggaatcatcgcacccccaggagcgcaagtaactcggtgtggatcggtggctccatcctggcctcactgtccacctttccagcaagattttggattaagcaagcaggaagtacgacgagtcgggcccctccattcgtccaccgcaaatgcttctaaaacggactcagcaagatgcgtagcatttgctgcatgggttaattgaagaaatagaaaatttgcccctggcaaatggcacacacctcatgctagccttcacgaaacttggaataagccttcgaaaagaaattgtcccttgaagcttgtatcttgatatccagcactggattgtagaacttgttgctgattttgaccctggtattgaagttaactgttccccttggtatttgtttaatacccctgtacatatcttggagttcaaccctttagtacgtgtggcttggtcactttcgtggctaaaggtaagaacgtgccttgtggaaagacaagtctgtggcttggtgagtcctgtgtggcccagcagcctcctgatctgtgcagggtattaacgtgtccagggctgagtgttctgggatttctctaagaggcttggcaagaacccagttgtttttgtctttgcgggtctgtcagggttggaaagtccaaagccgtaggacccagtttcctttcttagctgatgtcctttgggccagaacaccgtgggctgttaacttgccttgagttggaagcggtttgcatttacgcctgtaaatgtattcaatcctaatttaagtaagggttttttttgtacgcaattctcgattctttgaagaagatgacaacaaacttttggttttctacatgttatgtgagaacattagcgccccacgcaacactgtcattgtggaaaggaaaaataaaagtgctgccgtaaccaaaaaaaaaaaaaa

SEQ ID NO: 555 - DNA, 486 bp, Homo sapiens
  SIMILAR (181)..(477): 771254mologous to Homo sapiens ATP synthase, oligomycin sensitivity conferring protein,accession number X83218,Smith- Waterman Score=348.
  misc_feature (1)...(486): n = a,t,c or g
ncattcccactcgggtttgacctacngccgcccgggagaagatggctgccccagcagtggtccgggctctcccgcnaggtgcgatgcttcagtacctctgtggtcagaccatttgccaagcttgtgaggcctcctgttcaggtatacggtattgaaggtcgctatgccacagctctttattctgttttgaatccctatgtgaagcgttccattaaagtgaaaagcctaaatgacatcacagcaaaagagaggttctctcccctcactaccaacctgatcaatttgcttgctgaaaatggtcgattaagcaatacccaaggagtcgtttctgccttttctaccatgatgagtgtccatcgcggagaggtaccttgcacagtggacctctgcatctcctttaggaagaagccacactctctggaattaaaaactggtccctcaagagcttcctaaggtcaaggncaagtattggaaattgggaggcta

SEQ ID NO: 556 - DNA, 875 bp, Homo sapiens
  SIMILAR (331)..(783): 391254mologous to Homo sapiens ATP synthase, oligomycin sensitivity conferring protein,accession number X83218,Smith- Waterman Score=104.
tttcgtcgccaacgcgcgcgtgcgcccttgcgcgtttttctcttcccactcgggtttgacctacagccgcccgggagaagatgggctgccccagcagtcgtccgggctctccccgcaaggtgcgatgcttcagtacctctgtggtcaagacattttgccaagcttgtggggccctcttgttcaggtatacggcattgaaggtcgctatgccacaggctctttattctgctgcatcaaagcagaataagctggagccaattagaaaaggagttgttgagagtagcacaaaatcctgaagggaaccccaaagtggctgcttcctgttttgaatcccctatgtgaagcggttccattaaaagtgaaaaagccctaaattgacatcaccagcaaaaagagaaggttctctcccccctcaactacccaaccctggatcaaatttgccttgcctgaaaaatgggtccgattaaagcaaatacccccaagggagtccgtttcctgcccttttccctacccatgatgaagtgtcccatccgcgggagagggtacccttgcacagtggacctctggcatctccttttagaaggaagccaaactcctcctggaatttaaaaactgtccctcaagagccttccctaagtcaaaggccaagtattgaaattggaggctaagactgatccgtcaatctttgggtggaatgattgtgcgcattggcgaagaaatatgttgacatgtctgtcaagaccaagattcagaagctggggcagggctatgcgggagattgtctaaaaagtgttggttttctgcccatcagtgaaaattcttaaacttggaagccaacaataaaaagcttccagaccagaaaaaaaaaaaaaaaa

SEQ ID NO: 557 - DNA, 2202 bp, Homo sapiens
  SIMILAR (499)..(1236): 981254mologous to synthetic construct synthetic antithrombin III,accession number A06100,Smith-Waterman Score=1251.
atggcacagttttccattgtggggatgtgccttggtttatttaaccagtctcctacagatggaagtggtgtccaactttttgttattatgaatcaggtcatggcagctaaccttgctgaaacccatgcagctctctgccccaccctgtcctctggaacctctgcgagatttagaggaaagaaccagttttcaggcggattgcctcagatcacactatctccacttgcccagccctgtggaagattagcggccatgtattccaatgtgataggaactgtaacctctggaaaaagcctgccttccacatctcccttggtgccgctgcttctctccggctttgcacctctgttcttgaaagggctgcagaactggactcagaccacgcaagaaggcaagtccccctcagctgccccagcttccagccagccccaggcttgcccaacggaccacgtccgtgaatctgcactgggtgcctgtctttctctcccaggagaagatgggaagatccagaaggtttatcttttgtccttgctgctcattggcttctgggactgcgtgacctgtcacgggagccctgtggacatctgcacagccaagccgcgggacattcccatgaatcccatgtgcatttaccgctccccggagaagaaggcaactgaggatgagggctcagaacagaagatcccggaggccaccaaccggcgtgtctgggaactgtccaaggccaattcccgctttgctaccactttctatcagcacctggcagattccaagaatgacaatgataacattttcctgtcacccctgagtatctccacggcttttgctatgaccaagctgggtgcctgtaatgacaccctccagcaactgatggaggtatttaagtttgacaccatatctgagaaaacatctgatcagatccacttcttctttgccaaactgaactgccgactctatcgaaaagccaacaaatcctccaagttagtatcagccaatcgcctttttggagacaaatcccttaccttcaatgagacctaccaggacatcagtgagttggtatatggagccaagctccagcccctggacttcaaggaaaatgcagagcaatccagagcggccatcaacaaatgggtgtccaataagaccgaaggccgaatcaccgatgtcattccctcggaagccatcaatgagctcactgttctggtgctggttaacaccatttacttcaaggtactcagaatggccctggagagaccccagggacttcctcttgctcttcagcttaccccctttttttttaaatggcgagaccgaagccctgagagggcaaatggactgccgaaagctacacagggcctgtggaagtcaaagttcagccctgagaacacaaggaaggaactgttctacaaggctgatggagagtcgtgttcagcatctatgatgtaccaggaaggcaagttccgttatcggcgcgtggctgaaggcacccaggtgcttgagttgcccttcaaaggtgatgacatcaccatggtcctcatcttgcccaagcctgagaagagcctggccaaggtagagaaggaactcaccccagaggtgctgcaagagtggctggatgaattggaggagatgatgctggtggtccacatgccccgcttccgcattgaggacggcttcagtttgaaggagcagctgcaagacatgggccttgtcgatctgttcagccctgaaaagtccaaactcccaggtattgttgcagaaggccgagatgacctctatgtctcagatgcattccataaggcatttcttgaggtaaatgaagaaggcagtgaagcagctgcaagtaccgctgttgtgattgctggccgttcgctaaaccccaacagggtgactttcaaggccaacaggcctttcctggtttttataagagaagttcctctgaacactattatcttcatgggcagagtagccaacccttgtgttaacctttcagaggccttagctgtcctcgtagtaaatctgactaccttgatgaagagaacacatggagagtccttagacttcatggagagaaagaggagacctgctgagtccatccttctagtctccccaccaaagtgtcagagaactaaaacagggcaaggacttacagtaagaatgaatattgatagatttgaagaacttgctggttatgggggtgattaa

SEQ ID NO: 558 - DNA, 1712 bp, Homo sapiens
  SIMILAR (135)..(971): 451254mologous to Homo sapiens Human antithrombin III mutant 49R,accession number AAR42907,Smith-Waterman Score=423.
acgcctgaccagctctctgccccaccctgtcctctggaacctctgcgagatttagaggaaagaaccagttttcaggcggattgcctcagatcacactatctccacttgcccagccctgtggaagattagcggccatgtattccaatgtgataggaactgtaacctctggaaaaaggaaggtttatcttttgtccttgctgctcgatagcttcggggactgcgtgacctgtcacggcgagccctgtggacatctgcacagccaagccgcgggacattcccatgaatcccatgtggcatttaccgctccccggagaagaaggcaactgaggatgagggctcagtaacagaagatcccggaggccaccaacaaccgggcgtgtctggggaactgtccaaggccaatttcccgcttttgcttaccactttcttattcagcacctgggcagaattccaaggattgacattgattaacatttttctgttcacccctgagtattttccaagggtttttgctatggaccaaggtttggtgcctgtaatgacacccttcagcaactgatggaggtatttaagttttgacaccatatctggagaaaacattctgatcaagatcccacttcttctttgccacaactgaactggccgactctaatcgaaaagccaacaaatcctccaagttagtatcagccaatcgcctttttggagacaaatcccttaccttcaatgagacctaccagggacatcagtgagttggtatatggagccaagctcaggcccctgggacttcaagggaaaatgcagagcaattccagaggcggccatcaacaaatggggtgtccaataagaccgaaggccgaattcaccgatgttcatttccctcgggaaggccattcaatgagctcactgttctgggtggtgggtttaacaccatttactttcaaggggcctgttggaaggtcaaagttcagccctgagaacacaaggaaggaactgttctacaaggctgatgggagagtcgtgtttcagcatctatggatgttaccagggaaggcaagttccgttattcgggcgcgtggcttgaaggcacccggtgcttgtagtttgccctttcaaaggtgatgacatcacccatggtcctcatcttgcccaagccctgagaaggagcctgggccaaggtggagaagggaactcaccccagaggtgcttgccaagagtggctgggattgattttggagggagatgatgctggtggtccacatgccccgctttccgcatttgaggacggccttcaagtttgaagggagcagctggcaaagacatgggcccttgtcggatctgttcagcccctgaaaaagtcccaaactcccccaggtattgttgcagaaggccgagatgacctctatgtctcagatgcattcccataaggcatttcttgaggtaaatgaagaaggcagtgaagcagctgcaagtaccgcgtgttgtgattgctggccgttcgctaaaccccaacagggtgacttttcaaggccaacagctttttcctgggtttttattaagagaagttcctcttgaacactatttatcttcatggggcagagttagccaacccttgtgtttaagttaaaatgttcttattcttttgcacctcttcctatttttggtttgtgaacaagaagtaaaaataaatacaaactacttccatctcacattaa

SEQ ID NO: 559 - DNA, 593 bp, Homo sapiens
  SIMILAR (221)..(361): 1001254mologous to Mus musculus put. altern. eIF-4A (aa 1- 370),accession number X03039,Smith-Waterman Score=238.
tgaacttgacacactatgtgacttgtatgaaccctgaccatcacccagcatcatcttcatcaacacccggaggaaggtgactggctcaccgagaagatgcatgctcgagatttcactgtatccgccatgcatggagatatggaccaaaaggaacgagacgtgattatgagggagtttcgttctggctctagcagagttttgattaccactgacctgctgaatcggtcgaggtggacggtttggccgtaaaggtgtggctattaacatggtgacagaagaagacaagaggactcttcgagacattgagaccttctacaacacctccattgaggaaatgcccctcaatgttgctgacctcatctgaggggctgtcctgccacccagccccagccagggctcaatctctgggggctgaggagcagcaggaggggggagggaagggagccaagggatggacatcttgtcattttttttctttgaataaatgtcactttttgaggcaaaagaaggaaccgtgaacattttagacacccttttctttggggtaggctcttgccccaggcgccggctcttctcccaaaaaaaaaaaaaaa

SEQ ID NO: 560 - DNA, 807 bp, Homo sapiens
  SIMILAR (505)..(648): 1001254mologous to Mus musculus put. altern. eIF-4A (aa 1- 370),accession number X03039,Smith-Waterman Score=243.
gcgtggatctgttttcttggccgcgataaggtctagagacgaacgcgatatagcagttcagtaggctcagcaactcggatatcattccgtgcgggagtaagggcatgatagccagacagaggttgatcctagggattccctttcccgaggacatcagggctttcagtaacgagtgcttggcaaagcatcgggcagcctagggcccctgtggacatgggagggtatttcctctgccttccttggctgcccacatggatgcctaaggtcttcttctccgggatagagtgtcctccgtgcacatgctgaagaggttgtcattcttgacgtaggccagaggcattgatgtgcagcaggtttctttagtcatcaactatgaccttcccaccaacagggaaaactatatccacaggtaagcgtagatctggaacactcccctaccccttcacacctggccctccctgggcttaaagctcctgatattcctcatccccttccttgttttccagaatcggtcgaggtggacggtttggccgtaaaggtgtggctattaacatggtgacagaagaagacaagaggactcttcgagacattgagaccttctacaacacctccattgaggaaatgcccctcaatgttgctgacctcatctgaggggctgtcctgccacccagccccagccagggctcaatctctgggggctgaggagcagcaggaggggggagggaagggagccaagggatggacatcttgtcattttttttctttgaataaatgtcactttttgaggcaaaagaaggaaccgtgaaa

SEQ ID NO: 561 - DNA, 405 bp, Homo sapiens
  SIMILAR (19)..(123): 851254mologous to Homo sapiens antigen NY-CO-16,accession number AF039694,Smith-Waterman Score=146.
agcaagctggctgctgaaatgactgcgaaccggcttgcagagagccttcttgctttgagccaacaggaagaactagcggattttccaaaagactacctcttgagtcagagtcaagatgtagggggacaatgatggagagagaaagcatcataagcttctggaggcaatcagttcccttgatggaaagaataggcggaaattggctgagatgtctgatgttattttgatgatgtaggagtttgtagttgcgtagatattaagctgagtctgttctgagtgtgttgtacatgactataggtgagtagtggttgctgtgggtgctcgtgtattctatgttaataggctatctgaggtggatatagcgtttttattgggagttaaactggtgtgtgagtggctaggctg

SEQ ID NO: 562 - DNA, 2277 bp, Homo sapiens
  SIMILAR (64)..(267): 971254mologous to Homo sapiens eukaryotic initiation factor 4AI,accession number D13748,Smith-Waterman Score=341.
  misc_feature (1)...(2277): n = a,t,c or g
cggttannancctggagtccttgagagcggtcccggnnnncaantnccgggtcgacgatttcgtctgcgagccaggattcccgatccagagacaatggccttgatgggattgagcccgaaggcgtcatcgagagtaactggaatgagattgttgacagctttgatgacatgaacctctcggagtcccttctccgtggcatctacgcctatggttttgagaagccctctgccatccagcagcgagccattctaccttgtatcaagggtgagacctctcagtcccagaagacattgtggactgtccctgacctgggtagagtggcatctggttggtgatgcccatctcatatcagccagggacaaagcaacctccttgttcatcccagcttggcttttgatccgtgcccatgcctggttcatgccttggacacataggtttcctttaaagaggtggtattgtagccagcttatatttgcatctatagccatgtttctagtccagcttggtgtgcaatactagatgagttaataactggtccttgtttctgatctggttcccattgtgtaactgtgttgattgggaaggtagtttgtgagccatgaaatgcttggttcattggttgcttattgacctcattaacctaggacttgaatatcccaaagggtatgctctttaccacattcaactcctaatttatttgtttaggttatgatgtgattgctcaagcccaatctgggactgggaaaacggccacatttgccatatcgattctgcagcagatacaagaaggtggtcatggcactaggaagactacatggggcgcctcctggtcacgcctgtatccggggggcaccaacgtgcgttgctgaggtgcagaaacttgcagatggaagctccccacatccatcgtggggtaccccctggccgtgtgttttgatatgctttaccggaagataccctgtcccccaaatacatccaagatgtttgtactggatgaagctgaacgaaatgtttaagccgtggattcaaaggacagatctatggacatatccaaaaggctcaagcagcaccaccaagggtagttttgctgtcagccacaatgccctttgattgtgcttgaggtgaccaagaagttcatgaggggacccccattccggattcttgtccagaagggagagttgaccccttgagggtatccgccaggttctacatccaacgtggaaccagaggaattgcaacttggacacactatgtgacttgtatgaaaaccttgaccatcaccccaggccagtcatcttccatcaaccacccggagggaaggtggactggcctcacccgagaagaatgcatgctgcagattttcactgtattccgccatgcattggagattttggacccaaaaggaacgtagaacgtgattatgaagggagttttcgttcttggctcttagccagaatttttgatacccaacttgacctgcttggccagagggcattgatgtgccagcaggttttctttagtcattcaaacttatgaccctttcccaccaaccaggggaaaactattaatccacaggaatcgggtcgagggtggaccggtttggccgtaaaggtgtgcctattaacatgttgacagaaagaaaacaaagaggaatctcgaggacattgagaccttttaacaacacctccattgaaggaaatgcccctcaatgttgcttgacctcatctgagggggctgtcctgccaccctagccccagccagggctcaatctctgggggctgaggagcagcagggaggggggagggaagggagccaagggatggacatcttgtcattttttttctttgaataaactgtcactttttgaggcaaaagaaggaaccgtgaacattttagacacccttttctttggggtaggctccttgccccaggcgccggctcttctcccaaaaaaaaaaaaaaaaaaacactaatccatttccctaacctagtaacctccagatcccagaggctctcctcacctcagctgagctcctttgaaagtgattcaagggactatgtcactcagcctcatttgctggaccaaatttggagggagaacccctaaaacccctaagtgaggttgcccagggggttgtccccaggtggggggaagcaggggagagaaaatggtagccatttttacattgttttgtatagtatttattgattcaggaaacaaacacaaaattttgaataaaatgacttggaaactgccaaaaaaaaaaaaaaaaaac

SEQ ID NO: 563 - DNA, 735 bp, Homo sapiens
  SIMILAR (451)..(35): 431254mologous to Homo sapiens PRO2987,accession number AF116719,Smith-Waterman Score=138.
aattttgccctcgaggccaagaattcggcgagggcaataagctccttagtcccagacgcccatgggtcatttcacagaggaggaccaaggctactatcgacaagcctgtggggcaaaggtgaaatgtggaaaaaatgctgggaaggaagaaacccctgggaaaggctccctggttgtcctaccccatggacccccagaggttcctttgaacagctttggcaaacctgtccctctgccctctgcccatccatgggcaacccccaaagtcaaggcaccatggccaagaaggtgctgacttcccttgggagatgcccataaagcaccctggattgatctcaaagggcaccttttgcccaagcctgaagtgaacttgcacttgttgacaagcttgcatgtgggatcctgaagaactttcaagcttcctggggaaatgttgctggtgacccgttttgggcaatcccattttcggcaaaagaatttcaccccctgaaggttgcaggctttcctgggcagaaagatgggtgacttggagttggccagtgcccttgttccttccagataccactgaagcctcttggcccatgaattcagaagctttcaaggataaggcttttattcttgcaagcaattacaaataataaatctatttctgctaagagatcacacatgattttcttcagctcttttttttacatctttttaaatatatgagccacaaagggtttatattgagaa

SEQ ID NO: 564 - DNA, 489 bp, Homo sapiens
  SIMILAR (6)..(434): 631254mologous to Homo sapiens gamma-G globin,accession number X55656,Smith-Waterman Score=395.
  misc_feature (1)...(489): n = a,t,c or g
tgtggaaagatgctggaagnagaaaacccctgggaaaggctccctggttgtcctaccccatggaccccagaggttctttgacagctttggcaaacctgtccctctgcctctgcccatcatgggcaacccccaaagtccaaggcacatggcaagaaggtgctgacttccttgggagatgcccataaagcaccctggatgatctcaagggcacctttgcccagctgagtgaactgcactgtgacaagctgcatgtggatcctgagaacttcaagctcctgggaaatgtgctggtgaccgttttggcaatccatttcggcaaagaattcacccctgaggtgcaggcttcctggcagaagatggtgacctgcagtggccagtgccctgtcctccagataccactgagcctcttgcccatgattcagagctttcaaggataggctttattctgcaagcaatacaaataataaatctattctgctgagagatcac

SEQ ID NO: 565 - DNA, 523 bp, Homo sapiens
  SIMILAR (394)..(2): 791254mologous to Homo sapiens PRO2987,accession number AF116719,Smith-Waterman Score=507.
  misc_feature (1)...(523): n = a,t,c or g
gaacgtctgaggttatcaataagctcctagtccagacgccatgggtcatttcacagaggaggacaaggctactatcacaagcctgtggggcaaggtgaatgtggaagatgctggaggagaaaccctgggaaggctcctggttgtctacccatggacccagaggttctttgacagctttggcaacctgtcctctgcctctgccatcatgggcaaccccaaagtcaaggcacatggcaagaaggtgctgacttccttgggagatgccataaagcacctgggatgatctcaagggcacctttgcccagcttgagtgaacttgcacttgttgacaagcttgcatgtgggatcctgagaacttcaagctcctggggaaatgttgctggtgaccgtttttggcaatccattttcgggcaaagatttcanccctgaggttcaggctttctnggcagaagatngtgatttgaattggccagtncctgttcttccagatancatttagttaatttcccatgattcagagttt

SEQ ID NO: 566 - DNA, 805 bp, Homo sapiens
  misc_feature (1)...(805): n = a,t,c or g
gacactcgctttttggaacgtctgaggttatcaataagctcctagtcccagacgcccatgggtcatttcacagaggaggaccaaggctactatcaacaagcctgtggggcaaaggtgaaatgtggaaaaaatgctggaaggaaaaaacccctgggaaaggctccctggttgtcctaccccatggacccccagaggttcctttgaacagctttggcaaacctgtccctctgccctctgcccatccatgggcaacccccaaagtcaaggcaccatggccaagaaggtgcttgacttcccttggggagatgcccataaaagcacctgggattgatcttcaagggcaccttttgcccaagcctgaagtgaacttgcacttgttgacaagcttgccatgtgggattccttgaggaactttcaaagcttcctggggaaatgttgcttggttgacccttttttggccattcctttttcggcaaaagaatttcaacccttgaggttgcaaggctttcctgggcagaaagatgggtgacttggagttggccagtgcccttgttccttccagataccactgaagcctcttggcccatgaattcagaagctttcaaggataaggctttattcttgcaagcaattacaaataataaatctatttctgctaagagatcaccaaannnnnatnntnnnnnnncccccggattttttatttagcgggccgcacctttttccccttttagggggggtaaatttatattgggccttgggccggggttttcaaaagcggggggannnnnnnnnnaaagagccc

SEQ ID NO: 567 - DNA, 463 bp, Homo sapiens
  SIMILAR (48)..(344): 551254mologous to Homo sapiens BUP,accession number AF078848,Smith-Waterman Score=223.
  misc_feature (1)...(463): n = a,t,c or g
tcgcaacggactttccnnnnaacccacgcgtccgcggcgcgctcacaatggagctctcggagtctgtgcagaaaggcttccagatgctggcggatccccgctccttcgactccaacgccttcacgcttctcctccgggcggcattccagagtctgctggacgcccaggcggacgaggccgtgttagaataataagaattccctagaaatcctactgggaagtataggcagatctctccctcatataacggatgtttcttggcgcttggaatatcagataaagaccaatcaacttcataggatgtacagacctgcatatttggtgaccttaagtgtacagaacactgattccccatcctatccagagattagttntagttgcagcatggaacaattacaggacttgggggggaaacttaaagatgcttcgaaaagcctgggaaagagcactcagttgtaacttg

SEQ ID NO: 568 - DNA, 764 bp, Homo sapiens
  SIMILAR (103)..(453): 951254mologous to Homo sapiens BUP,accession number AF078848,Smith-Waterman Score=582.
  misc_feature (1)...(764): n = a,t,c or g
agaaagggctccaagatgctggcggatcccgcttccttcgactccaacgccttcacgttctcctccggggcggcattccagagtctgctgaacgccagcccggacgagncccgtgttagcacttatctagaagactgtaattttgacagagagcgaatagaactgttttgcacggaatatcagaataataagaattccctagaaatcctactgggaagtataggcagatctctccctcatataacggatgtttcttggcgcttggaatatcagataaagaccaatcaacttcataggatgtacagacctgcatatttggtgaccttaagtgtacagaacactgattcnccatcctatccagagattagttttagttgcagcatggaacaattacaggacttggtggggaaacttaaagatgcttcgaaaagcctggaaagagcaactcagttgtaacttggggaagttaacgatccgcccgagtgcagaggaaaaccagaaacgccttgccttcagctgaaccaccgtttgtgcgagctggatgtccttttcagtagaaaagaattttccttttgaatttataccattcatcaattttgacactttaaaaacgtgtgaaagggttaagagggaaagatactgcccaagtatttgaatcgtttagtagtaactgtccatttatcctattttgatctttttcaagtcttctgaaaggaagtagacagtattacaccctgaataaataaggtgttgttttccacaaa

SEQ ID NO: 569 - DNA, 468 bp, Homo sapiens
  SIMILAR (45)..(191): 951254mologous to Homo sapiens BUP,accession number AF078848,Smith-Waterman Score=225.
gcgtgtcacgtggtgtgcgtgtcgaaggtcacggcgcgctcacaatggagctctcggagtctgtgcagaaaggcttccagatgctggcggatccccgctccttcgactccaacgcctttacgcttctcctccgggcggcattccagagtctgctggacgcccaggcggacgaggccgtgttaggtaagccgctcggctcggctcggagctggatccgccggggtggaggggcgctcggagaagaggagccggcggagcgagaaggggaaagccccgggaagaggaagtctccgggctttgcccttcgctccggacggagtgttggggacgtggctctgccaggactcggagcagactctgagcattgttttggccccacttggcacctgcatagagccaactccacgttcctggcccggtttccctcccagtctctttgttcttttgtaaagccggtgttcaagtctt

SEQ ID NO: 570 - DNA, 1115 bp, Homo sapiens
  SIMILAR (223)..(669): 451254mologous to Homo sapiens BUP,accession number AF078848,Smith-Waterman Score=172.
  misc_feature (1)...(1115): n = a,t,c or g
ggtgtgtnaaattggaccatgcgatagacggccntgaaatcccgcgncgacccacgcgtccgacggcgcgctcacaatggagctctcggagtctgtgcagaaaggcttccagatgctggcggatccccgctccttcgactccaacgccttcacgcttctcctccgggcggcattccagagtctgctggacgcccaggcggaccgaggccgtgttagatcatcccagacttgaaacatatcgaccccagtggttttaaaacattgtccatgcagcagcctgcaacttacatactagaggcaggaaagcaccgagcctgacaagtcaactcttaagcacttatctaagaagactgtaaaattttgacagagaagcgaatagaactgttttttgcacgggaatatcaagaataataaggaattccctagaaattcctactggggaagtattagggcagatctctcccttcatataaccgggtgttttcttgggcgctttggattattcaggtaaaggaccaatcaactttccataggatggtacagaccctgcatatttgggtgaccttaaagtggtacagaacactgggattcccccatccctatcccagagaattagtttttagttgccagccatggaaccaattaccaggacttgggtgggggaaactttaaaggatgcttcgaaaaagccctggaaaagagcaacctcagttgtaaccttggggaaagttaaccgatcccccccgagttccaggaggaaaacccagaaaccgcccttgcccttcagctggaaccaccgtttgtgccgagctggatgtcctttttcagtagaaaagaatttttcccttttgaatttatacccattcatccattttgggcactttaaaaacgtgtgaaaaaaaaaaaaaggagaggggggggggggggggtcttttttttttttttnaaaaagaggggggagggggggggaaaaaaaagatactgcccaagtatttgaatcgtttagtagtaactgtccatttatcctattttgatctttttcaagtcttctgaaaggaagtagacagtattacaccctgaataaataaggtgttgttttccaaaaaaaaaaaaaa

SEQ ID NO: 571 - DNA, 1839 bp, Homo sapiens
  SIMILAR (1455)..(1574): 851254mologous to Homo sapiens peripheral myelin protein 22,accession number M94048,Smith-Waterman Score=195.
atgtccaaaatacacttctcccagactctggttctggctgtgggtgactttggatgtcaaaaacacttagtcatcttctgtttactctctcatcgtggaagaagctgcaaagaaaccgctggcctagatgacgaacagacatttcaatgtgcaattattaagaagagacctgccagattgggttctattgaggtatttgcacataacattgtgtggaaaagggtttcaggatggggaaaatccttcacagctggggatctttcaggggccactatggagaaagctaaagagaaaagggaactcctggggcagggagacatggagacagggcttattagtttaggtgataccaacgtcactcagcagtgtggtgaggagtctccaggtctctccagactggggatccctaacacaagaggaagtcttatgccccaagtgccagaattccaggaaactcatgcaatgaaaccagtcctcttgtgtcagagtttgcagctagaagcggttcaagggatggaggactctctgggagctggagtggtacgctgcaaagaacctaaatatgccataacttcctttacttccctctccaagaatttccaattgctcttccagcctattctgcctgacagtcccgccctcccgcacacgctgacccagggacacaccctactgcagcgacgcaaacagggcgttgttcccgttaaaggggaacgccaggagcctcccactgcccccttgcttcgcgcgcgcgcagccccgcagcgcagctttggcggcgccagcagcggagccaacgcacccgagtttgtgtttgaggccaccctgaggatcgggacagctgttcctttgggctactggacccctaggcgagcacgtgggtctagcgcaagagcagaatgccccctgaccccaggggctgcctggggaagcgcgcggtggacgggaagcgcagggtccgggcaaccctctcgagccattcttttctttccacactactctggctctgcaccacctctccggagccgccagagtctgcgcgaggctgagctggggccaggaccgttcctctacgctggcagagttgggtggaaacttggagacaaacggaatgcggagagcactggggtctgggaaaccagcctcctcgccgctgtctcccccaccgcatgccacggctgtctccaggcagaaactccgctgagcagaacttgccgccagaatgctcctcctgttgctgagtatcatcgtcctccacgtcgcggtgctggtgctgctgttcgtctccacgatcgtcagccccgtgctcctgctggttcaggactgtgttatttgcagacagttggaagtctcagacgtcccagggaagtttctggcaatctgcccccttccagttgctttgagaaaacgagagcagattcagtgataggaaccaagcgagcgctgggctgggatatctatctgattctctctagcaatggatcgtgggcaatggacacgcaactgatctctggcagaactgtagcacctcttcctcaggaaatgtccaccactgtttctcatcatcaccaaacgggtctggctgaagttcccggagcactccggatgggagtctccgtactcgctactgacacctggtggttacaagtagtgactcagcccgaaaagggcaggctttggtgctcacaggcgccatccccaagtggcatctggccacgcggcttggcacagaatcctggactcttgggcccggaagggggcagttttggcaggcgtgttaaaacccggcgaagtttcagcagaaacgaggcggcagaggagttgctaagttgtgcttaa

SEQ ID NO: 572 - DNA, 762 bp, Homo sapiens
  SIMILAR (415)..(759): 851254mologous to Oryctolagus cuniculus elongation factor 1 alpha,accession number U09823,Smith-Waterman Score=489.
gtagtgcagacccaaatcagcaaaactgctgatgagctgatttcctactggggaacaagcttcccacctccctttgctgcatccttaaccttgtatgagcttgaatattgtatcaccattgatatctccctgtggaaatttgagaccagcaagtactacgcgactgtcattgatgccccaggacacagagacttcatcaaaaacatgattacagggacatctcaggctgactgtgctgtcctgatttttgctgctggtgttggtgaatttgaagctgtcacctttgctccggtcaatgtcacaactgaagtcaagtctgttgaaatgcaccatgaagttttgagtgaagctcttcctggggacaatgtggacttcgatgtcaagaatgtgtctgtcaaggaggttcatcatggcaacgttgctggccaaatcagtgctggctgtgctcccgtactggattgccacatggctcacattgcatgcaagtttgctaagctgaagaaaaagactggtagcacttctggtaaaaagctggaagatggccctactttcttgaagtctggtgatgctgccatcgttgatatggttcctggcaagcccatgtgtgttgagagcttctcagtctacccacctctgagtcgctttgctgtttgtgatatgagacagacagttgctgtgggtgtcatcgaagcaatggacaagaaggctgctggagctggcaaggtcaccaagtctacccagaaagctcagaaggctaaatga

SEQ ID NO: 573 - DNA, 1947 bp, Homo sapiens
  SIMILAR (435)..(698): 481254mologous to Homo sapiens peripheral myelin protein 22,accession number M94048,Smith-Waterman Score=145.
cccacgcgtccgcaccagggaacatctcggggagcctgtttggaagctgcaggcttagtctgtcggctgcgggtctctgactgccctgtggggagggtcttgccttaacatcccttgcatttggctgcaaagaaatctgcttggaagaaggggttacgctgtttggccgggcagaaactccgctgagcagaacttgccgccagaatgctcctcctgttgctgagtatcatcgtcctccacgtcgcggcgctggtgctgctgttcgtctccacgatcgtcagccaatggatcgtgggcaatggacacgcaactgatctctggcagaactgtagcacctcttcctcaggaaattgtccaccactgtttctcatcatcaccaaacgaatgggctgcagtcttgttccaggggcaccatggatcctgtcgattcatctttcagcattctgtctctgttcctgttcttctgccaactcttcaccctcaccaagggggggcaggttttacatcactggaatcttccaaattcttgctggtctgtgcgtgatcgagtgctgcggccatctacacggtgaggcacccggagtgggaatctcaactccggatacttcctaacggttcgcctaaattcctggcctgggtggccttccccctcggcccttctcagcggtgtcatctatgtgatcttgcggaaacgcgaatgaggcgcccagacggtctgtctgaggctctgagcgtacatagggaagggaggaagggaaaccagaaagcagacaaaagaaaaaagagctagccccaaaatcccaacactcaaaccaaaccaaacagaaagcagtggaggtgggggttgctgttgattgaagatgtatataatatctccggtttataaaacctatttataacactttttacatatatgtacatagtattggtttgctttttatgttgaccatcagcctcgtgttgagccttaaagaagtagctaaggaactttacatcctaaccagtataatcccagctcagtatttttgttttgttttttgtttgtttgttttgttttacccaggaaataaggataactccatctcgccccttccctttcatctgaaagaaggatacctccctcccaagtccacctcatttagggaaaaccaaagtgtggggtaggaaacccccaaatgtcccaaaagccctttttctgggtgggggtgacccagtggcatcccaacaggaaacaggccggtggcccggaacctctggtgtgaagcttttacgcgccacacgggacaaaatgcccaaaactgggagccctttgcaaaaacacgggtttttgggcattgggcatacttggccctttacaggtgggagtatttttcgtcaccaccatctaaaatggggaatccagtgaccaacaagtcttttggaaatgggtggtatgggattttaccatttccttattatcacttaatcatcttaaccaacttcactgggaaatcccaattaaccaattttaccaacataagatagaattggagacctggaataaattctgtgtaaatataaatggtttaataactgctttttgtaccttagctaagctgctattattactataatgaagtaaatcataaagccttcatcacctttcccacattttttccttacggtcggaggcatcagaacaagcggtctagactccttggggaccgtgagttcctagaagcttggctgggtccttaggctgttcctgtgcctccgaaggactgtctgggcaatggacttgtattgggccaccaactggtagatgtatatatgggtgcccttctggatgctaaagactccaggaccttttggtttttggctttgcattttctgattttaataccaactggtgtgggactaaggatgcattaaaaataaacatcagagtaactcaaaaaaaaaaaaaaa

SEQ ID NO: 574 - DNA, 644 bp, Homo sapiens
  SIMILAR (333)..(368): 781254mologous to Homo sapiens protein methyltransferase,accession number AF167572,Smith-Waterman Score= 47.
  misc_feature (1)...(644): n = a,t,c or g
cctccaaagctgtacaataaggtcgagcctttaaggaaaaaggcccgtgcccctgaggcccagtttgagatgccttatgtggtacggctgcacaactccacccagctctntgcacccaagccntgtttcaccttcagccatcccaacagagatcctatgattgacaacaaccgctattgcaccttggaatttcctgtggaggtgaacacagtactacatggctttgccggctactttgagactgtgctttatcaggacatcactctgagtatccgtccagagactcactctcctgggatgttctcatggtttcccatcctcttccctattaagcagcccataacggccgctcatataccattggcctctagccctgcgtgccaagtgtccagagccttggaagcagcttcaggttctgctcctgtagtacagaagggctcaagccaccaatctatgaagacctcaggccagggggtgaggaattagtgctggatttgaagctacgcactcagcctcaagaactccctggaatatccctgagaacatggggtttgaacggattttcagcctttttctgttcttgttttgatggttttgtgtaagaggaaatacaaataaagttatagccctttactgcaaaaaaa

SEQ ID NO: 575 - DNA, 459 bp, Homo sapiens
  SIMILAR (245)..(457): 1001254mologous to Homo sapiens Skb1Hs,accession number AF015913,Smith-Waterman Score=401.
cagcgcgaggagaaagatggcggcgatggcggtcgggggtgctggtgggagccgcgtgtccagcgggagggacctgaattgcgtccccgaaatagctgacacactaggggctgtggccaagcaggggtttgatttcctctgcatgcctgtcttccatccgcgtttcaagagggagttcattcaggaacctgctaagaatcggcccggtccccagacacgatcagacctactgctgtcaggaagggctttcctgctgccccttaatcaggaagataacaccaacctggccagagttttgaccaaccacatccacactggccatcactcttccatgttctggatgcgggtacccttggtggcaccagaggacctgagagatgatataattgagaatgcaccaactacacacacagaggagtacagtggggaggagaaaacgtggatgtggtggcacaactt

SEQ ID NO: 576 - DNA, 2784 bp, Homo sapiens
  SIMILAR (229)..(1320): 991254mologous to Homo sapiens protein methyltransferase,accession number AF167572,Smith-Waterman Score= 1909.
atggcggcgatggcggtcgggggtgctggtgggagccgcgtgtccagcgggagggacctgaattgcgtccccgaaatagctgacacactaggggctgtggccaagcaggggtttgatttcctctgcatgcctgtcttccatccgcgtttcaagagggagttcattcaggaacctgctaagaatcggcccggtccccagacacgatcagacctactgctgtcaggaagggctcttgaaattggggctgacctcccatctaatcatgtcattgatcgctggcttggggagcccatcaaagcagccattctccccactagcattttcctgaccaataagaagggatttcctgttctttctaagatgcaccagaggctcatcttccggctcctcaagttggaggtgcagttcatcatcacaggcaccaaccaccactcagagaaggagttctgctcctacctccaatacctggaatacttaagccagaaccgtcctccacctaatgcctatgaactctttgccaagggctatgaagactatctgcagtccccgcttcagccactgatggacaatctggaatctcagacatatgaagtgtttgaaaaggaccccatcaaatactctcagtaccagcaggccatctataaatgtctgctagaccgagtaccagaagaggagaaggataccaatgtccaggtactgatggtgctgggagcaggacggggacccctggtgaacgcttccctgcgggcagccaagcaggccgaccggcggataaagctgtatgctgtggagaaaaacccaaatgccgtggtgacgctagagaactggcagtttgaagaatggggaagccaagtgaccgtagtctcatcagacatgagggaatgggtggctccagagaaagcagacatcattgtcagtgagcttctgggctcatttgctgacaatgaattgtcgcctgagtgcctggatggagcccagcacttcctaaaagatgatggtgtgagcatccccggggagtacacttcctttctggctcccatctcttcctccaagctgtacaatgaggtccgagcctgtagggagaaggaccgtgaccctgaggcccagtttgagatgccttatgtggtacggctgcacaacttccaccagctctctgcaccccagccctgtttcaccttcagccatcccaacagagatcctatgattgacaacaaccgctattgcaccttggaatttcctgtggaggtgaacacagtactacatggctttgccggctactttgagactgtgctttatcaggacatcactctgaactctaggaactatccgagctccactccccacaacatactcaaaggaacggagagaaccgggaccccctgcggggacccggaactggatgagcaacaaaggaaagaagttaaaaaggattatcctagcaataccaccagcagcaccagcaacagtggcaatgagaccagtggaagcagcaccatcggggagacaagcaatcgtagtcgagatcgggatcggtatagacggagaaatagtcggagccgaagtccaggtcggcagtgtcgtcaccgtagccgtagctgggatcgtcgacatggtagtgagtcgcgaagtcgggaccatcgtcgtgaggatcgtgtgcattacaggagtcctccacttgccactggggagccagttgataatctgagtcctgaggagcgtgatgcccgcacagttttctgtatgcagttagctgcccgaattcggcctcgagatctggaggactttttctctgctgtaggcaaggttcgcgatgtacgtatcatctcagatcggaactcacgtcgttctaagggcattgcctacgtggaattctgtgaaatccagtctgtgccactggccattgggctgactgggcagcggttgctgggagtgcctatcattgtacaggcttcacaggcagagaaaaaccgactggcagccatggccaacaacctgcaaaagggcaatggtggaccaatgcgcctctatgtgggttccctgcacttcaatatcactgaagacatgctccggggcatctttgagccctttggtaaaattgataatattgtcctgatgaaggactcagatacaggccgctctaaaggttatggtttcatcacgttctctgattctgagtgtgcccggcgggccctggaacagttgaatgggtttgagcttgctggtcgacctatgagggttggccatgtgactgagcgactggatggtggcacagacatcacttttcctgatggggaccaggagctggatctgggatcagcaggtggacgttttcagctcatggcaaaactggcagaaggcgctggaatccaactgccaagcactgctgctgctgctgctgccgccgccgcccaggctgctgccttgcaactgaatggagcagttcccttgggggccctgaatccagcagctctgactggtaaatcagtggcacagtatactgcctccttgtgcctctggatcctgccacttcacatctactcttccatggccccatttctccattttgtggaccaagccatcctgagggcatggacattgtctctgaggaaattggggccacccttaagataccaagaaaagctcctgcccatggtcccactggaaatggactctgctgagcaaagccaccagttgaagagaacagaatccacacctgcattgaatacctgtttctccatgtgtatcgtctctgagattaccttcttgccctttccaacaccttag

SEQ ID NO: 577 - DNA, 607 bp, Homo sapiens
  SIMILAR (215)..(607): 1001254mologous to Homo sapiens Skb1Hs,accession number AF015913,Smith-Waterman Score=684.
attcggcccaagggatttcctctgcatgcctgtcttccatccgcgtttcaagagggagttcattcaggaacctgctaagaatcggcccggtccccagacacgatcagacctactgctgtcaggaagggactggaatacgctaattgtgggaaagctttctccatggattcgtccagactcaaaagtggagaagattcgcaggaactccgaggcgttggaggtgcagttcatcatcacaggcaccaaccaccactcagagaaggagttctgctcctacctccaatacctggaatacttaagccagaaccgtcctccacctaatgcctatgaactctttgccaagggctatgaagactatctgcagtccccgcttcagccactgatggacaatctggaatctcagacatatgaagtgtttgaaaaggaccccatcaaatactctcagtaccagcaggccatctataaatgtctgctagaccgagtaccagaagaggagaaggataccaatgtccaggtactgatggtgctgggagcaggacggggacccctggtgaacgcttccctgcgggcagccaagcaggccgaccggcggataaagctgtatgct

SEQ ID NO: 578 - DNA, 480 bp, Homo sapiens
  SIMILAR (1)..(207): 971254mologous to Homo sapiens Skb1Hs,accession number AF015913,Smith-Waterman Score=377.
ccagagactcactctccgggaatgttctcatggtttcccatcctctccgctattaagcagcccataacggtacgtgaaggccaaaccatctgtgtgcgtttctggcgatgcagcaattccaagaaggtgtggtatgagtgggctgtgacagcaccagtctgttctgctattcataaccccacaggccgctcatataccattggcctctagccctgcgtgccaagtgtccagagccttggaagcagcttcaggttctgctcctgtagtacagaagggctcaagccaccaatctatgaagacctcaggccagggggtgaggaattagtgctggatttgaagtacgcactcagcctcaagaactccctggaatatccctgagaacatggggtttgaacggattttcagcctttttctgttcttgttttggtggttttgtgtaagaggaaatacaaataaagttatagccctttactgcaaaaa

SEQ ID NO: 579 - DNA, 911 bp, Homo sapiens
  SIMILAR (266)..(472): 731254mologous to Mus musculus protein methyltransferase,accession number AF167573,Smith-Waterman Score= 268.
ttttttgggttctttcagttttaatctgtgtgactctgtaaattaacctagtagtggaatcctccatgacagtagttggaagcaggctggcttagtaatgtgacaacatgcatttgtctctttcttccatgcccatgccaacgttggttggttttgacatgggaggtttgatccttctgatccttcagttagtacagacataccatttccctccctctggaactaatttgactctcctgctgtgcagatgatggtgtgagcatccccggggagtacacttcctttctggctcccaattttttctccaaagctgtacaataaggtccgagcctgtaggaaaaaggcccgtgaccttaaggcccagtttgagatgcctattgtggtacgcttgcacaactccaaccagctctctgcaccccagccctgttccaccttcagccatcccaacagagatcctatgattgacaacaacccgctattgcaccttggaatttcctgtggaggtgaacactagtactacaatgctttgccggctactttgagactgtgctttatcaggacatcactctgagtatccgtccagagactcactctcctgggatgttctcatggtttcccatcctcttccctattaagcagcccataacggtacgtgaaggccaaaccatctgtgtgcgtttctggcgatgcagcaattccaagaagggctcaagccaccaatctatgaagacctcaggccagggggtgaggaattagtgctggatttgaacgtacgcactcagcctcaagaactccctggaatatccctgagaacatggggtttgaacggattttcagcctttttctgttcttgttttgatggttttgtgtaagaggaaatacaaataaagttatagccctttactgcaaaa

SEQ ID NO: 580 - DNA, 2503 bp, Homo sapiens
  SIMILAR (343)..(1941): 581254mologous to Homo sapiens Skb1Hs,accession number AF015913,Smith-Waterman Score=1339.
gcgactcgtcccgccttctggggcactagtttgactttgtgattggctactagtatcaaggaatcccggcgtggacagcgcgaggagaaagatggcggcgatggcggtcgggggtgctggtgggagccgcgtgtccagcgggagggacctgaattgcgtccccgaaatagctgacacactaggggctgtggccaagcaggggtttgatttcctctgcatgcctgttttccatccgcgtttcaagagggagttcattcaggaacctgctaagaatcggcccggtccccagacacgatcagacctactgctgtcaggaagggactggaaatacgctaattgtggggaaagctttctccatgggatttcgttccagacttcaaaagtgggagaagattcgcaggaactccgagggcgggccatgtttacaggagctgaattttgggtgcatatttgggtcttccagctttcctgctgccccttaatcaggaagataacaccaacctggccagagttttgaccaactcaaattcacactggccatgacttttacatgttctggagagcggatacacttgaagaaaccagaggacctgcagagatgatataattgagaatgcaccaactacacacacagaggagtacagtggggaggagaaaacgtggatgtggtggcacaacttccggactttgtgtgactatagtaagaggattgcagtggctcttgaaattggggctgacctcccatctaatcatgtcattgatccgctggcttggggagcccattcaaagcagccattctccccactagcattttcctgaccaataagaagggatttcctgttctttctaagatgcaccagaggctcatcttccggctcctcaagttggaggtgcagttcatcatcacaggcaccaaccaccactcagagaaggagttctgctcctacctccaatacctggaatacttaagccagaacccgtcctccacctaatgcctatgaactctttgccaagggctatgaagactatctgcagtccccgcttcagccactgatggacaatctggaatctcagacatatgaagtgtttgaaaaggaccccatcaaatactctcagtaccagcaggccatctataaatgtctgctagaccgagtaccagaagaggagaaggataccaatgtccaggtactgatggtgctgggagcaggacggggacccctggtgaacgcttccctgcgggcagccaagcaggccgaccgggggataaagctgtatgctgtggagaaaaacccaaatgccgtggtgacgctagagaactggcagtttgaagaatgggggaagccaagttgaccgtagtctcatcagacatgagggaatgggtggctccagagaaagcagacatcattgtcagttgagcttcttgggctcatttgctgaccaattgaattgtcgccttgagttccttggattggagcccagcactttccttaaaagatgattggtgttaagcatcccccggggagttacacttcctttctggctcccatctcttcctccaagctgtacaatgaggtccgagcctgtagggagaaggaccgtgaccctgaggcccagtttgagatgccttatgtggtacggctgcacaacttccgccagctctctgcaccccagccctgtttcaccttcagcccatcgcaacagagattcctatggattgacaacaaccgctatttgcacccttgggatttcctgtggaggtgaacacagtactacatggctttgccggctactttgagactgtgctttatcaggacatcactctgagtatccgtccagagactcactctcctgggatgttctcatgggtttcccattcctcttccctattaaggcagcccattaacggtacgtgaaagggccaaaccattctgtgtggcgtttctgggcgatgcaggcaatttccaaggaaggtgtgggtatggagtgggggctgttgacaggcaccagtctgttcctgcctaatccaaaaaccccccaaaggcccgcctcaatatacccattggcccctcctaagcccctgccgtgccccaagtgtcccagaagcccttggaaagccagccttcaggttcctgcctccctgtagtaacagcaaggtgccagtaacatcctatggggctgtgattcccccttggcccattcagaggagggagcattttcaatcgtgctttccctgcccttacatccaaggtgggccaagggattataattaattgccagggctcaagcccacccaatcctatgaagacctcaggcccagggggtgaggaattagtgctggatttgaaactacgcactcagcctcaagaactccctcggaatatccctggagaacatggggtttgaacggattttcaagcctttttctgttcttgttttgatggttttgtgtaagaggaaatacaaataaagttatagccctttactgcaaaaaaaaaaaaaaaaa

SEQ ID NO: 581 - DNA, 398 bp, Homo sapiens
tccctcagtgtctctggtttccctgccctgcataatttaagcattagtgctaaatacatctgtcatattcctctccctggagactgcgaaatgtccagactttttcagactagtggagggaaggaatgttacataactaagtggaggcctggaactgtcaggatttgacagggctggaccagagacccttccgcctctgcctagtgtgtctgtcagggaggcaggcagctgtcacagccacagcggctctgaatggcttgagcttttagtatgtgttcaagtgcaggatactacaaactggtaaagacttccaccatgtgaagaatgtatgtaaattaaagtttattgtaatgaaggtttttactttttgcaattaaaagtgttggttgataagaaaa

SEQ ID NO: 582 - DNA, 563 bp, Homo sapiens
  SIMILAR (401)..(111): 571254mologous to Macaca fascicularis hypothetical protein,accession number AB046642,Smith-Waterman Score=237.
tttttttttttttttttcttatcaaccaacacttttaattgcaaaaagtaaaaaccttcattacaataaactttaatttacatacattcttcacatgggggaagtctttaccagtttgtagtatcctgcacttgaacacatactaaaagctcaagccattcaaagccgctgtggctgtgacagctgcctgcctccctctgctccctgggaccatccagggcccaccacaccctgctcccggaaggagagctgcagctgacccttggcacctgtccccgatcgatgggcgggagcacttgcgctgagtccctgtcttgcctgtgactcctccttccccgaccctcgggcattgggttactgacccttccccaggggtgggagggtgaaggaaggggaaggacttgcaggccaacattttttctgaggggtaaaattttgggaaaggaagtttgggaggggaaggcttttttggataagaatggggctttcttgggaatgtcatgtgtctgcttggctcctgtcacctccctggaaaggtccacagtgctgggggggttgaaaac

SEQ ID NO: 583 - DNA, 924 bp, Homo sapiens; identical to SEQ ID NO: 304
  SIMILAR (277)..(882): 821254mologous to Oryctolagus cuniculus elongation factor 1 alpha,accession number U09823,Smith-Waterman Score=824.

SEQ ID NO: 584 - DNA, 489 bp, Homo sapiens
  misc_feature (1)...(489): n = a,t,c or g
cttgaaacatcnactccccatggtccctccccnggactccccattaaaagtgctgaccgtaaggctttgatgctcatgcggccgttctggagacttgtgtcccacagtgaggtggatggggttgggggcctctcggctgtagtactcgtggattccagcacagagtgctctgtgatgtcatggcccgtagcgtacctgtgaaatggaacacagtggtggactcctgtctatatgtggcgtcaatatcaaacacaacagtggcatgggtgtcttcagggtaccggacacttctacggtaggacacctagtgacaccaactgccaagagcaatacacacaccgaaaactatgtcaaataaaatcaaaggctgacttagtgctgatgaaaaattccaagtcacttacaagggtaattcgaaatatcctggccccacaggatcagaaccaccagcaaaacccactgaattcacagttcctacaggtaacacac

SEQ ID NO: 585 - DNA, 1676 bp, Homo sapiens
  SIMILAR (230)..(958): 521254mologous to Homo sapiens translation initiation factor 3 47 kDa subunit,accession number U94855,Smith-Waterman Score=447.
  misc_feature (1)...(1676): n = a,t,c or g
acccggaactacttagcccagggtttcctgagtgctcctcgggccaaaagcagagcgcacaaattccagaagaaattaccaacggcgggactatttcagtgctccgagaagtatcaccagtaaccaatcagcaaaaagctctagctcacgtggtgtatattcagcctatcaagctcctgatattcatgaatgctgtcatttccgttccgcctccttctttctcgacaagatggccacaccggcggtaccagtaagtgctcctccggccacgccaaccccagtcccggcggcggtcccagcctctgccccagcctcagttccagcgccaacgccagcaccggctgcggctccggttcccgctgcggctccagcctcatcctcagaccctgcggcagcatcggctacaactgcggctcctggccagacccccggcctcagcgcaagctccagcgcagaccccagcgcccgctctgcctggtcctgctcttccagggcccttccccggcggccgcgtggtcaaggctgcacccaagtcattttggcctccattgtggacaagctacgagagacgcaacgagggtgcttgcccgagttaatcgggaaccctgtttgggaaacttgtcgacaaaacactcagtggaaggtcaccaatttgcttttcagtgccgcacaatgagtcagaagatgaagttggctgttgacatggaatttgctaagaaatatgtatgaaactggaataaaaaaagtttcctccaaataagctcatcctggggctggtacgctacgggccatgacatcacagagcactctgtgctggatccacgagtactacagccgagaggcccccaaccccatccacctcactgtgggacacaagtcttccaggaacgggccgcatgagcatcaaagcctaacgtcagcacttttaatggggattcccttggggaggacccatggggagtgatgttcacgcctctgacagtggaaataccgcgtactacgacactgaacgcattcggaggttgaccctgatcatgaaggacctgcttttagcccccaaccagagtgatttggacttctcaagttgacttgcagcaagaaggagggggcattcagcttcgcaatccagggatgcccttgagtaccagtgttgcaaatatgccagagggatgtacctgtctgggaaaggtgtcagctgacaataccatcaggaaggtgggccacttcctgatgagcctgggttaacccaagtaccggaaaataggaaaccgatgacttttgagaccatgctcaacagcaacatcaatgacctttttattggtgacctacctggccaacctcacacagtcacgtgattgcactcaatgaagaacttgtaaacctgtgaatggaccccaagcagtacacttgctggtctaggtattaaccccaggactcagaagtgaaggagaaatgggtttttttgtggtcttgagtcacactgagatagtcagttgtgtgtgactctaataaacggagcctaccttttgtcaattaggggcaaataaggctaggaagtggcaaaagtattggggggggcgcctttaaaataacttgaattcttgtgcggtgccgagggggattannnnnnnnnnnnggggacacttaaatttaatcggcgggcccggttataaaat

SEQ ID NO: 586 - DNA, 3399 bp, Homo sapiens
  SIMILAR (322)..(2382): 911254mologous to Homo sapiens pM5 (3' partial),accession number U91318,Smith-Waterman Score=3192.
atgctggtgggccagggcgcggggccgctggggcccgcggtggtcaccgccgcggtggtgctgctgctgagcggcgtggggccggcgcacggctcggaggacatcgtggtgggctgcggtggcttcgtcaagtcggacgtggagatcaactactctctcatcgagataaagctgtacaccaagcatgggactttgaaataccagacagactgtgcccctaataatggttactttatgatccctttgtatgataaggaccatttggcaatgtctagagacgtttttgttgtgacatctgtggctgtgcgctacagtcacccaggggatttcattctgaagattgagcctcccctagggtggagttttgagccgacgaccgtggagctccatgtggatggagtcagtgacatctgcacaaagggtggggacatcaactttgtcttcactgggttctctgtgaatggcaaggtcctcagcaaagggcagcccctgggtcctgcgggagttcaggtgtctctgagaaacactgggaccgaagcaaagatccagtccacagttacacagcctggcggaaattcatgcctgtcacctctgtcaaacccagtcgaatgttctgtgactggtccctgctgtgctacaaggattggttttatgccagaaatccttgagattaagggagacgtaagcactcctctttccgatcagcacatggagcacccctcttggcacacagcaagcaccacagtgcgtgtaaccaactccaatgccaatgcggccagtcccctcatagttgctggctacaatgtgtctggctctgtccgaagtgatggggagcccatgaaaggcgtgaagtttcttctcttttcttctttagtaactaaagagccccaagacgagagtctggtgtatttgtgctacacggtctccagagaagatggctcgttctctttctattccttgccaagtgggggctacactgtgattccgttctatcgaggggagaggattacctttgatgtggcgccttccagacttgacttcacagtggagcatgacagcttgaaaatcgagcccgtgttccacgtcatgggattctccgtcaccgggagggtcttgaacggacccgaaggagatggtgttccagaagcagtagtcaccctgaataaccaaatcaaagttaaaacaaaagctgatggctcattccgccttgagaacataaccacagggacatacaccatccatgctcagaaagagcacctctactttgaaacggtcaccatcaaaattgcaccaaacacacctcagctggctgacattgttgcaacagggttcagtgtctgtggtcagatatcaatcattcgcttccccgacaccgtcaagcagatgaataaatacaaagttgtcctgtcatctcaagacaaggacaagtctttggtcaccgtggagacagatgctcatggatcattttgttttaaagcaaacccagggacttacaaagtgcaggtgatggttcctgaggcagaaaccagagcagggctgacgttgaaaccccagacatttcctcttactgtgaccgacaggcctgtgatggatgtggcctttgtacagttcttggcatcagtttctgggaaagtctcttgtttggacacctgtggtgacttgctggtgactctacagtccctgagccgccagggtgagaagcggagcctccagctctccggcaaggtcaacgccatgactttcacctttgacaacgtgctccctggaaaatacaaaataagcatcatgcatgaggattggtgctggaagaacaagagcctggaggtggaagtgctggaggatgacgtgtctgcagttgagttcaggcagacgggctacatgctgagatgttccctgtctcacgccatcactctggaattttatcaggatggaaatgggcgtgagaatgtggggatttataacctctccaaaggagtcaaccgattctgcctgtccaagcctggtgtgtacaaagtgacccctcgctcctgccaccggtttgagcaagcgttctacacctatgacacgtcttcacctagtatcttgacattgacagccattcgccaccatgtccttggaactatcaccaccgacaaaatgatggatgtcactgtgactatcaagtcttccatcgacagtgaacccgccttggtcttaggccctctgaagtctgtgcaggagctgcggagggagcagcagctggctgagatcgaggcccgcaggcaggagagggagaaaaacggcaaagaggaaggcgaagaaagaatgaccaagcctcccgtgcaggagatggtagatgagttacaaggccccttctcgtatgatttctcttactgggcgcgtgtcctctgttttgtggggacaggacccgccaaactgaagtatattaattattttaggtctggagagaaaatcactgttacaccgtcatctaaagagctgctcttttatcccccttcaatggaagccgttgtcagtggagaaagctgcccagggaagctgatcgagatccacgggaaggcaggcctgtttttagaaggccagatccaccccgagttggaaggagtcgagattgtcatcagtgaaaagggggcaagttcaccgctgatcacagtctttactgatgacaaaggtgcctacagtgttggccccctgcacagtgacctggagtacacggtgacctcacagaaggagggctatgttctgactgcggtggaaggaaccatcggagacttcaaggcctatgccctggcaggcagccctggccagtattacttcaaacccatgatgaaggagttccggtttgagccatcctcacagatgatcgaggtgcaggaaggccagaacctgaagatcaccatcacggggtaccgaaccgcttacagttgctatggcacagtgtcttccttaaacggagagcccgaacaaggggttgccatggaagcggtgggccagaacgactgcagcatttacggagaagacaccgtgacagacgaagagggcaagttcagattacgtggattgctggttgggaataatgacatcgatgatgtaaacatcatagttttccggcagattaatcaatttgatttaagtggaaatgtgatcacttcctctgaataccttcctacgttatgggtcaagctttacaaaagcgaaaacctcgacaatccaatccagacagtttcccttggccagtccctgttcttccatttccccccactgctcagagatggcgagaactatgttgtgcttctggactccacactccccagatcccagtatgactacatcttgcctcaagtttctttcaccgcagtgggctaccataaacacttcaccttgatttttaatcccacg

SEQ ID NO: 587 - DNA, 3129 bp, Homo sapiens
  SIMILAR (2334)..(2375): 641254mologous to Homo sapiens polycystic kidney disease 1 protein,accession number L43619,Smith-Waterman Score=50.
atggcaagcaccacagtgcgtgtaaccaactccaatgccaatgcggccagtcccctcatagttgctggctacaatgtgtctggctctgtccgaagtgatggggagcccatgaaaggggtgaagtttcttctcttttcttctttagtaactaaagagccccaagacgagagtctggtgtatttgtgctacacggtctccagagaagatggctcgttctctttctattccttgccaagtgggggctacactgtgcccgtgttccacgtcatgggattctccgtcaccgggagggtcttgaacggacccgaaggagatggtgttccagaagcagtagtcaccctgaataaccaaatcaaagttaaaacaaaagctgatggctcattccgccttgagaacataaccacagggacatacaccatccatgctcagaaagagcacctctactttgaaacggtcaccatcaaaattgcaccgaacacacctcagctggctgacattgttgcaacagggttcagtgtctgtggtcggatatcaatcattcgcttcccggacaccgtcaagcagatgaataaatacaaagttgtcctgtcatctcaagacaaggacaagtctttggtcaccgtggagacagatgctcatggatcattttgttttaaagcaaaaccagggacttacaaagtgcaggtgatggttcctgaggcagaaaccagagcagggctgacgttgaaaccccagacatttcctcttactgtgaccgacaggcccgtgatggatgtggcctttgtacagttcttggcatcagtttctgggaaagtctcttgtttggacacctgtggtgacttgctggtgactctacagtccctgagccgccagggtgagaagcggagcctccagctctccggcaaggtcaacgccatgactttcacctttgacaacgtgctccctggaaaatacaaaataagcatcatgcatgaggattggtgctggaagaacaagagcctggaggtggaagtgctggaggatgacgtgtctgcagttgagttcaggcagacgggctacatgctgagatgttccctgtctcacgccatcactctgctacttcgctgcctgtgttcaccatacctcttgtcattgtcatcgtctctcacgtattctggtcttatactcatcgtgtcgcttattcgtggttactgcctactcgtactcatctatcggtgttttgatgattctttcaatgctgaccgggctctggtcctggggtttggaggagggggaccctgggggttggtggcctgtcccagcctgagctggcaagattccgaatgccaggcccctcaagtgtgcaacagggcacagggtgacctcgtgggcagagacgtctcccacaacctgctccgggcgctggacgttgggctcctggcgaacctctcggcgctggcagagctggatataagcaacaacaagatttctacgttagaagaaggaatatttgctaatttatttaatttaagtgaaataaacctgagtgggaacccgtttgagtgtgactgtggcctggcgtggctgccgcgatgggcggaggagcagcaggtgcgggtggtgcagcccgaggcagccacgtgtgctgggcctggctccctggctggccagcctctgcttggcatccccttgctggacagtggctgtggtgaggagtatgtcgcctgcctccctgacaacagctcaggcaccgtggcagcagtgtccttttcagctgcccacgaaggcctgcttcagccagaggcctgcagcgccttctgcttctccaccggccagggcctcgcagccctctccgagcagggctggtgcctgtgtgggtcagcccagccctccagtgcctccttcgcctgcctgtccctctgctccggccccccgccgcctcctgcccccacctgtaggggccccaccctcctccagcacgtcttccctgcctccccaggggccaccctggtggggccccacggacccctggcctccggccagctagcagccttccacatcgctgccccgctccctgtcactgccacacgctgggacttcggagacggctcccccgaggtggatgccgctgggccggctgcctcgcatcgctatgtgctgcctgggcgctatcacgtgacggccgtgctggccctggggaccggctcagccctgctggggacagacgtgcaggtggaagcggcacctgccgccctggagctcgtgtgcccgtcctcggtgcagagtgacgagagcctcgacctcagcatccagaaccgcggtggttcaggcctggaggccgcctacagcatcgtggccctgggcgaggagccggcccgagcggtgcacccgctctgcccctcggacacggagatcttctctggcaatgggcactgctaccgcctggtggtggagaaggcggcctggctgcaggcgcaggagcagtgtcgggcctgggccggggccaccctggcaatggtggacagtcccgccgtgcagcgcttcctggtctcccgggtcaccaggagcctagacatgtggatcggcttctcgactgtgcagggggtggaggtgggcccagcgccgcagggcgaggccttcagcctggagagctgccagaactggctgcccggggagccacacccagccacagccgagcactgcgtccggctcgggcccaccgggtggtgtaacaccgacctgtgctcagcgccgcacagctacgtctgcgagctgcggcctggaggcccagtgcaggatgccgagaacctcctcgtcatggtattcccgggcctgcgtctgagccgtgaagccttcctcaccacggccgaatttgggacccaggagctccggcggcccgcccagctgcggctgcaggtgtaccggctcctcagcacagcagggaccccggagaacggcagcgagcctgagagcaggtccccggacaacaggacccagctggcccccgcgtgcatgccagggggacgctggtgcgctggagccaacatctgcttgccgctgacgcctcctgccaccccaggcctgcgccaatgctgcacagaagtgactatttcaacacccctggagaaagaggaggagaaaattccgtga

SEQ ID NO: 588 - DNA, 426 bp, Homo sapiens
  SIMILAR (151)..(342): 681254mologous to Homo sapiens pM5 (3' partial),accession number U91318,Smith-Waterman Score=198.
cagtgcggtggaattcgattaggtcccctgtcctcctttgagtaacaataaaagaaaaaaaccttgtaaaaatgacctcttgacttgtggaactgttattttcataggtagtaggagtttaaccttgctctggtctcaccttctcatccccagataaaagctgaggatgaccagcccctcccgggagtcctcttatccctgagcggtggcctgtttcgttccaacctcttgacccaggacaacggcattctgacattctcaaacctggtaacgtgttctgcaatttaccacctgcctgtcttccctgagagagagccaggatgcagcatgcgagacttacgtgttgcttgacaacgtgagaagagaaagccaatgtggagtggtttcagtttcttgggggcccacggtcattagagtattgctctt

SEQ ID NO: 589 - DNA, 553 bp, Homo sapiens
  SIMILAR (6)..(374): 861254mologous to Homo sapiens pm5 protein,accession number X57398,Smith-Waterman Score=528.
tttcatttcaccccactgttcagagatggcgagacatatgttgtgatctggactccacactccccaggtcccagtatgcttacatcttgcctcaagtttctttcaccgcagtgggctaccataaacacatcaccttgatttttaatcccgcgaggaagctgcctgaacaggacatcgcacaaggatcctacattgccctgccattgacgctgctggttctgctggccggttacaaccatgacaagctcattcctttgctgctgcagttgacaagccggctacagggagtcggcgcgctcggccaggcagcctctgacaatagcggcccagaagatgcaaagagacaagccaagaaacagaagacaaggcggacccttcgtttgcaagaagagttccagttgatgtggtgtttggttccatggcggggtaccctagggattcatctgttttcttcacttccctttgcatctgagatcctgctggaaaccacggcaacctgtatccactattaggaggtaaaaatcaataaaatggcccattcaaaaaaaaaaaa

SEQ ID NO: 590 - DNA, 891 bp, Homo sapiens
  SIMILAR (137)..(3): 1001254mologous to Escherichia coli phnB protein,accession number J05260,Smith-Waterman Score=231.
atggcatcgctcatcatgatgtcgcttccggcaatgcgcacattggcgtgggcgatggcggtatcgggaaattgcattccggaagggcagttctcggcgctgtcctgcgctgattttggcatttcgccgaagctgattggtatagagcagttccgcgcccaacgtacgttgataataggcaatcgcgtcggaacagttaccggccaacgagagttcgaaatttatacggatgagaggcggcctgataagacgcgcgagcgtcgcatcaggcagtcggcactgttgccggatgcgggcgtaaacgccttatccggcctacggagggtgcgggaatttgtaggcctgataagacgcgcaagcgtcgcatcaggcagtcggtaccattgccggatgcggcgtaaacgccttatccggcctacggagggtgcgggaattcgtaggcctgataagacgcgcaagcgtcgcatcaggcagtcggcaccgatgccggaactacctggtcccccggtgattgaaacttcaactaggaacttcaaagaaaactgggaagaaaacttctgttatctggaattcacaattgccaaattaggaaccaccaggaaaagaatacaggaaaactgcaaagggcagcccctgggtcctgcgggagttcaggtgtctctgagaaacactgggaccgaagcaaagatccagtccacagttacacagcctggcggaaaaccaaaagtagataaaaccacaaagatggggaaaaaacagagcagaaaaactggaaactctaaaaagcagagcacctctcctcctccaaaggaacacagttcctcaccagcaacggaacaaagctggatggaggatgactttgacaagttgagaaaagaaggcttcagatga

SEQ ID NO: 591 - DNA, 4713 bp, Homo sapiens
  SIMILAR (808)..(1581): 941254mologous to Homo sapiens polycystic kidney disease 1 protein,accession number L33243,Smith-Waterman Score=1288.
atggggtctacaggtgtgtacaaagtgacccctcgctcctgccaccggtttgagcaagcgttctacacctatgacacgtcttcacctagtatcttgacattgacagccattcgccaccatgtccttggaactatcaccaccgacaaaatgatggatgtcactgtgactatcaagtcttccatcgacagtgaacccgccttggtcttaggccctctgaagtctgtgcaggagctgcggagggagcagcagctggctgagatcgaggcccgcaggcaggagagggagaaaaacggcaatgaggaaggtgaagaaagaatgaccaagcctcccgtgcaggagatggtagatgagttacaaggccccttctcgtatgatttctcttactgggcgcgtgtcctctgttttgtggggacaggacccgccaaactgaagtatattaattattttaggtctggagagaaaatcactgttacaccgtcatctaaagagctgctcttttatcccccttcaatggaagccgttgtcagtggagaaagctgcccagggaagctgatcgagatccacgggaaggcaggcctgtttttagaaggccagatccaccccgagttggaaggagtcgagattgtcatcagtgaaaagggggcaagttcaccgctgatcacagtctttactgatgacaaaggtgcctacagtgttggccccctgcacagtgacctggagtacacggtgacctcacagaaggagggctatgttctgactgcagtggaaggaaccatcggagacttcaaggcctatgccctggcaggcgtcaccctccacagccaggatgtcctcatgctccctggtgacctcgttggcttgcagcacgacgctggccctggcgccctcctgcactgctcgccggctcccggccaccctggtccccaggccccgtacctctccgccaacgcctcgtcatggctgccccacttgccagcccagctggagggcacttgggcctgccctgcctgtgccctgcggctgcttgcagccacggaacagctcaccgtgctgctgggcctgaggcccaaccctgggctgcggctgcctgggcgctatgaggtccgggcagaggtgggcaatggcgtgtccaggcacaacctgtcctgcagctttgacgtggtctccccagtggctgggctgcgggtcatctaccctgccccccgcgacggccgcctctacgtgcccaccaacggctcagcctcggtgctccaggtggactctggtgccagcgccacggccacggctcgctggcctgggggcagtgtcagcgcccgctttgagaatgcctgccctgccctggtggccaccttcgtgcccagctgcccctgggagaccaatgataccctgttctcagtggtagcactgccgtggctcggtgagggggagcacgtgatggacgttgtggtggaaaacagcgccagccgggccaacctcagcctgcgggtgacggcggaggagcccatctgtggcctccgcgccacgcccagccccgaggcccgtgtactgcagggagtcccagtggtcctgctggctggctcctcaggctacctggtgggctttaaattcctggaaagtcacggctctgacagcggctccgctaactcattccaccgtctcatttcacgaaatgaatttaaaactccgctccctgacctcacacgagtccccaggtacagccccgtggtggaggccggctcggacatggtcttccggtggaccatcaacgacaagcagtccctgaccttccagaacgtggtcttcaatgtcatttatcagagcgcggcggtcttcaagctctcactgacggcctccaaccacgtgagcaacgtcaccgtgaactacaacatcaccgtggagcggatgaacaggatgcagggcctgcgggtctctacagtgccagccgtgctgtcccccaatgccacgctggcactgacggcgggcgtgctggtggactcggccgtggaggtggccttcctgtggacctttggggatggggagcaggccctccaccagttccagcctccgtacaacgagtccttcccggttccagacccctcggtggcccaggtgctggtggagcacaatgtcacccacacctacgctgccccagctgcacttggaggcggtgccgtcctcaccaggcagccctcagtgctgctgcacctgtgctccgtcccgcacgtggcttgggagcctgggacccttaaggctgggccgcaggtgagtacagtcctgaccgtgctggcatctaatgccttcgagaaccggacgcagcaggtgcctgtgagcgtgtgcgcctccctgccctctgtgagcgtgtgcgcctccctgactggggcctgctggtaccccagagtgctgatccgcagtggccgggtgcccattgtgtccttggagtgtgtgtcctgcaaggcacaggccgtgtacgaagtgagccgcagctcctacgtgtacctggagggccgctgcctcaattgcagcagcggctccaagcgagggggatacaccttcacgctgacggtgctgggccgctctggcgaggaggagggctgcgcctccatccccctgtcccccaaccgcccgccgctggggggctcttgccgcctcttcccactgggcgctgtgcacgctctcaccaccaaggtgcacttcgaatgcatgggctggcatgacgcggaggatgctggcgccccgctggtgtacgccctgctgctgcagcgctgtcgccagggccactgcgaggagttctgtgtctacaagggcagcctctccggctacggagccgtgctgcccccgggtttcaggccacaattcgaggtgggcctggccgtggtggtgcaggaccagctgggagccgctgtggtcgccctcaacaggtctctggccatcaccctcccagagcccaacggcagcgcaatggggctcacagtctggctgcacgggctcaccgctagtgtgctcccagggctgctgcggcaggccgatccccagctcgtcatcgagtactcgctggccctggtcactgtgctgaacgagtacgagcgggccctggacgtggcggcagagcccaagcacgagcggcagcgccgagcccagatacgcaagaacatcacggagactctggtgtccctgagggtccacactgtggatgacatccagcagatcgctgctgcgctggcccagtgcatgaggaagctgcctgaacaggacatcgcacaaggatcctacattgccctgccattgacgctgctggttctgctggccggttacaaccatgacaagctcattcctttgctgctgcagttgacaagccggctacagggagtcggcgcgctcggccaggcagcctctgacaatagcggcccagaagatgcaaagagacaagccaagaaacagaagacaaggcggacacttgcaacatccatcaacaccagccgagagcccagtacagacgaccagctcccagcccacaatcagaccatgccacagagacacgcacgccgtagcgcacccccaagagcctacgaccgcaaaacaagacaagaagagaacccacaccaaacgagaagtcacgccgctgcgaagcgccgcgagagaccgccccacgacctacagaaacaagcaaccacgcggctgatccccgccggaccgagacgcagagacgggacatccccgagacggacacaaccaccaccgaacacgcgacgcccagcggcggcgggccacctagcacgatttcggcgagccgcgcccggcgcccgcggcgcccgccctcccacagcccgaagggggcgagaagaactcgaccccgcccacatctacgccgccgcccccggactaccaaccccgcccagggcgggaaggacgccccccaccccggaaaggcgagacaggaacacgcgacgccggcggacccgagaagagggagaaggcgagtttagacccgtgtctttcctgaagactatcttcccgtctcaaaatggacatgatggatccacggatgtacagcagagagccaggaggtccaactgccgtagacaggaaggaattaaaattgtcctggaagacatctttactttatggagacaggtggaaaccaaagttcgagctaaaatccgtaagatgaaggtgacaacaaaagtcaaccgtcatgacaaaatcaatggaaagaggaagaccgccaaagaacatttctctacagagaaactaagacctgacgatgacatctgccgccgctcgacatcaaaacattatagaaaattcacgaagggatctacggaggtcctcagcaaatggcagcccctgggtcctgcgggagttcaggtgtctctgagaaacactgggaccgaagcaaagatccagtccacagttacacagcctggcggaaattcatgcctgtcacctctgtcaaacccagtcgaatgttctgtgactggtccctgctgtgctgcaaggattggttttatgccagaaatccttgagattaagggagacgtaagcactcctctttccgatcagcacatggagcacccctcttggcacacagtgccatctctatttcccaagccttcaagcaaaagtctaaagaaaaataggcaatttgaatttgctaaaacacttgatatgcatcgcacgttcacgacattctcttgcttccgccagcagagatga

SEQ ID NO: 592 - DNA, 4533 bp, Homo sapiens
  SIMILAR (1655)..(3244): 541254mologous to Homo sapiens pM5 (3' partial),accession number U91318,Smith-Waterman Score=1163.
tgaggggcgggacccggctgccggcggtgggtctagctggggttaggtttgtccatgctggtgggccagggcgcggggccgctggggcccgcggtggtcaccgccgcggtggtgctgctgctgagcggcgtggggccggcgcacggctcggaggacatcgtggtgggctgcggtggcttcgtcaagtcggacgtggagatcaactactctctcatcgagataaagctgtacaccaagcatgggactttgaaataccagacagactgtgcccctaataatgggtactttatgatccctttgtatgataagggggatttcattctgaagattgagcctcccctagggtggagttttgagccgacgaccgtggagctccatgtggatggagtcagtgacatctgcacaaagggtggggacatcaactttgtcttcactgggttctctgtgaatggcaaggtcctcagcaaagggcagcccctgggtcctgcgggagttcaggtgtctctgagaaacactgggaccgaagcaaagatccaggccacagctacacagcgctggcggaaagtttgcattttttaaagttctgcctggagattatgaaatcctcgcaactcatccaacctgggcgttgaaagaggcaagcaccacagtgagtgtaaccaactccaatgccaatgcggccagtcccctcatagttgctggctacaatgtgtctggctctgtccgaagtgatggggagcccatgaaaggcgtgaagtttcttctcttttcttctttagtaactaaagaggatgaccctgggctgcaatgtctcaccagtgccctgggttccagcccccaatacgagaagtctggtgtaatttgtgctacacggtctccagagaagatggctcgttctctttctattccttgccaagtgggggctacactgtgattccgttctatcgaggggagaggattacctttgatgtggcgccttccagacttgacttcacagtggagcatgacagcttgaaaatcgagcccgtgttccacgtcatgggattctccgtcaccgggagggtcttgaacggacccgaaggagattggtgttccagaagcagtaagtcaccctgaataaccaaatcaaagttaaaacaaaagcttgatgggctcattcccgccttgagaacataaccacagggacatacaccatccatgctcagaaagagcacctctacttttgaaacggtcaccatcaaaattgcaccgaacacacctcagctggctgacattgttgcaacagggttcagtgtctgtggtcggatatcaatcattcgcttcccggacaccgtcaagcagatgaataaatacaaagttgtcctgtcatctcaagacaaggacaagtctttggtcaccgtggagacagatgctcatggatcattttgttttaaagcaaaaccagggacttacaaagtgcaggtgatggttcctgaggcagaaaccagagcagggctgacgttgaaaccccagacatttcctcttactgtgaccaacaggcccatgatggatgtggcctttgtacagttcttggcatcagtttctgggaaagtctcttgtttggacacctgtggtgacttgctggtgactctacagtccctgagccgccagggtgaagaagcggagcctccagctctccggcaaggtcaacgccatgactttcacctttgacaacgtgctccctggaaaatacaaaataagcatcatgcatgaggattggtgctggaagaacaagagcctggaggtggaagtgctggaggatgacatgtctgcagttgagttcaggcagacgggctacatgctgagatgttccctgtctcacgccatcactctggaattttatcaggatggaaatgggcgtgagaatgtggggatttataacctctccaaaggagtcaaccgattctgcctgtccaagcctggtgtgtacaaagtgacccctcgctcctgccaccggtttgagcaagcgttctacacctatgacacgtcttcacctagtatcttgacattgacagccattcgccaccatgtccttggaactatcaccaccgacaaaatgatggatgtcactgtgactatcaagtcttccatcgacagtgaacccgccttggtcttaggccctctgaagtctgtgcaggagctgcggagggagcagcagctggctgagatcgaggcccgcaggcaggagatgtgtttattacggcaaagaggaaggcgaagaaagaatgaccaagcctcccgtgcaggagatggtagatgagttacaaggccccttctcgtatgatttctcttactgggcgcggtctggagagaaaatcactgttacaccgttcatctaaagagcttgcttcttttatccccctttcaatgggaagccgttgttcagtgggagaaagcttgcccggggaagctgattcgagatccatgggaaggcaggcctgtttttagaaggccagatccaccccgagttggaaggagtcgagattgtcatcaagtgaaaagggggcaagttcaccgcttgattcacagtctttactgatgacaaaggtggcctacagtgtttgggccccttgcacagtgaccgggagtacacggtgacctcacagaaggaggggctatgtcctgacttgcggtggaaggaaccatgggagactttcaaggcctatgcccttggcaggcgtaagctttgagataaaagctgaggatgaccagcccctcccggggagtcctttttatccctgaaccggtggcctggtttcgttccaacctcttgacccagggacaacgggcattcttgacattctcaaacctgaagcccctggccagtatttactttaaacccatgaatgaaaggagttccggtttgagccatcctcacagatgatcgaggtgcaggaaggccagaacctggaagatcaccatcacggggtaccgacccgcttacagttgcttatggcacagtgtccttccttaaaccgagagcccgaacaaggggttggccatgggaagcggtgggccaagaacgactgcaagcattttacggagaagacaccggtgacagacgaagaggggcaagttcagattaccgtggattgctgccggggatgtgtgtaccacggttcagctcaaggccagaaggcaacggaccacattgagcgggcgctcccccaccatagggtgattgacggttgggaataatgacatcagatgatgtaaacatcataagttttccggcagattaatcaatttgatttaagtgggaaatgtgattcacttcctctggaataccttccctacattatggggttcaagcttttacaaaagcgaaaaacctcgacaatccaatccagacagtttcccttggccaagtccctgttcttccatttccccccactgctcagagatgggcgagaactatgtttgtgcttctgggactccacacttcccagatcccagtattgactaccatcttgcctcaagttttcttttcaccgcagttggggctaaccattaaacacatcaccttggatttttatttcccacggagggaagctgcctggaacagggacattcgcacaaaggatccttacattgccttggccattgaccgctgctggttctgctgggccggttacaacccatgacaagctcattccttttgctgctggaagtttgacaaagccggcttacaggggagtcggcgcgctcgggccaggcaagccctcttgacaatagcgggccagaaagatgccaaagagacaagccaagaaacagaagacaaggcggactttaaggaaggaaggggacagttgcagtctcacttgggaacagtccacagccagggggttccggccactacccggccctgtggattaaaagccaaaaagcatgcgtcagctaactttcagcctgtgctgctgggcccggcaccccatgtcccttgttcactgtggcatcctgcaccccatcctcaccccttccgtagaagcccctcgttgcaattgcaattgaaatggaccctcctgtcactctggcttgaacagaatttaatttttcttgagtcaaattattaatttaataattaatttttggtcaaaagaagtattttaagctgtgctgtggtgtgagaatgtcattcttgatcttcagccttcgtttgcaaggagagttccagttgacgtggtgtttggttccatggcggggtaccctggggattcatctgttttcttcacttccctttgcatctgagatcctgttggaaaccacagcaacctgtattcattattaggaaataaaaatcgaaaaaaaggttcattcttttgtgttgtagctcacccaacacctaagaaagacaaccatactcaaatacacactgccccgctccccccctcttacagctggtgtacccctcttcttgtgccccccctcttttttccctgttctagaacccaaccaacttgcgcgtgtcgtccgctaattacctcatccctggtg

SEQ ID NO: 593 - DNA, 477 bp, Homo sapiens
  SIMILAR (1)..(474): 1001254mologous to Homo sapiens SNAP23B protein,accession number Y09568,Smith-Waterman Score=800.
atggataatctgtcatcagaagaaattcaacagagagctcaccagattactgatgagtctctggaaagtacgaggagaatcctgggtttagccattgagtctcaggatgcaggaatcaagaccatcactatgctggatgaacaaaaggaacaactaaaccgcatagaagaaggcttggaccaaataaataaggacatgagagagacagagaagactttaacagaactcaacaaatgctgtggcctttgtgtctgcccatgtaatagcataactaatgatgccagagaagatgaaatggaagagaacctgactcaagtgggcagtatcctgggaaatctaaaagacatggccctgaacataggcaatgagattgatgctcaaaatccacaaataaaacgaatcacagacaaggctgacaccaacagagatcgtattgatattgccaatgccagagcaaagaaactcattgacagctaa

SEQ ID NO: 594 - DNA, 424 bp, Homo sapiens
  SIMILAR (97)..(276): 901254mologous to Homo sapiens glucocorticoid receptor AF-1 specific elongation factor,accession number AF174496,Smith-Waterman Score=276.
gtagtgcagacccaaatcagcaaaactgctgatgagctgatttcctactggggaacaagcttcccacctccctttgctgcatccttaaccttgtatgagcttgaatattgtatcaccattgatatctccctgtggaaatttgagaccagcaagtactacgcgactgtcattgatgccccaggacacagagacttcatcaaaaacatgattacagggacatctcaggctgactgtgctgtcctgatttttgctgctggtgttggtgaatttgaagctgtcacctttgctccggtcaatgtcacaactgaagtcaagtctgttgaaatgcaccatgaagttttgagtgaagctcttcctggggacaatgtggacttcgatgtcaagaatgtgtctgtcaaggaggttcatcatggcaacgttgctg

SEQ ID NO: 595 - DNA, 1557 bp, Homo sapiens
  SIMILAR (202)..(693): 961254mologous to Homo sapiens synaptosome associated protein of 23 kilodaltons, isoform A,accession number AJ011915,Smith- Waterman Score=839.
atgctatcctgctataaacagaagtttcctcttgctgcggatgcattggttaccatggacgtagacttctatcaagccaaagagaatgctgaacttaaaaatgccattaaccagccccatcacctggcccaagttgtgacaatcaagcaactccagacattgccagattcctggggtcaaatctgtaataagaaccagagtttatctgtgtcattgacctctcaggatgcaggaatcaagaccatcactatgctggatgaacaaaaggaacaactaaaccgcatagaagaaggcttggaccaaataaataaggacatgagagagacagagaagactttaacagaactcaacaaatgctgtggcctttgtgtctgcccatgtaatagaacaaagaactttgagtctggcaaggcttataagacaacatggggagatggtggagaaaactcaccttgcaatgtagtatctaaacagccaggcccggtgacaaatggtcagcttcagcaaccaacaacgggagcagccagtggtggatacattaaacgcataactaatgatgccagagaagatgaaatggaagagaacctgactcaagtgggcagtatcctgggaaatctaaaagacatggccctgaacataggcaatgagattgatgctcaaaatccacaaataaaacgaatcacagacaagtctcacctcggtcagccctcggtccttaagctgaaagacaccagttttctgcgccgtttccacatgagcgcggagcgcactgtttcccatcctagcgccgcggctcaggtccctgcgggaaggaagcgctgctgtcaccgcccagtccacccggtcggcctcccggctggggctcctgccccagctctcaactcccgccgatccctggctcctggggcccgacccaagagcgacaaggaagaatcggaagaacacacagcccgaccaccaagccctgccgcctttgcagctctgcggaggccaggcgcctctgggagcctacggaagatcagggagccccggactcgcctcccaccgctcagctgccgtaaggctccgcaggagatgttaaacatgtctaagaaaacagtttcttgttttgtgaacttcaccagactacagcagatcacaaatattcaagctgaaatctaccagaaaaacctggaaattgaactcctgaaactagaaaaagatacagcagatgttgttcatcctttctttttggggaagaatcccactgatgcataccttgatgccacgatgaatgaggcaccagggcccattaatttcactatgtttggtgagaagttaaatggcacagatcctgaagatgtcatcagaaatgcttctgcttgctttgatgaagaagcaacaggcaccattcaggaagattacctgagagagctgatgacaaccatgggggatcagtttacagatgaggaagtggatgagctgcacagagaagcacctattgacaaaaagggaaatttcaattacatcgagttcacaagcatcctgaaacatggagtaaaagacaaagatgactga

SEQ ID NO: 596 - DNA, 2449 bp, Homo sapiens
  SIMILAR (93)..(515): 381254mologous to Homo sapiens synaptosome associated protein of 23 kilodaltons, isoform A,accession number AJ011915,Smith- Waterman Score=145.
  misc_feature (1)...(2449): n = a,t,c or g
ctcgaggccacgaaggccgccaggtccggtgttggggtgtccgagttgccgccggagaggagtggcctcgcccgcttgagttttgattcatcatggataatctgtcatcagaagaaattcaacagagagctcaccagattactgatgagtctctggaaagtacgaggagaatccctgggtttagccattgagtctcaggatgcaggaatcaagaccatcactatgctggatgaacaaaaggaacagactaaaccgcataggaagaagcctgggcccaaataattaaggacatgagacgagacagagaagactttaacagaactcaacaaattgctgtggcctttgtgtctgcccatgtaatagaacaaaagaacttttgagtctggggcaaggctttattaagacaacatgggggagatggtgggagaaaacttcaccttggcaatgttagtattctaaacagccagggcccggtggacaaatggtcagcttcagcaaccaacaacgggagcagccagtggtggatacattaaacgcataactaatgatgccagagaagatgaaatggaagagaacctgactcaagtgggcagtatcctgggaaatctaaaagacatggccctgaacataggcaatgagattgatgctcaaaatccacaaataaaacgaatcacagacaaggctgacaccaacaggagattcgtattggattattgcccaatgccagagcaaaaggnaactcatttgacagctaaagcttactgctgttcttctttatcatttattcacttccgtagctccttcttggaaaagttattaccttttcagagtttaagttttcggttccacgctcttctaattgggagataatatggaagaagggccagagcagttacagccctccttcttttttgttttctgttgagggccgactgctgctctgccttccttctagtattttctttctcaattcatacgcttagattggttttcatatgtcatgtttagtgttttcatcctcctcatatacttcagcaggttcttttgctttcaagatttggaagcattgccaaagacagccatgaagaaggaagctgtagaggtgttttttgttgttggttattttcgctctttggggtgaggcgaaggacaggagataagaggttggttacctcagtaaaaacctttttgccacatatttttaaagttgcatagccacaacgaagatctagttgggatatagtttttgatttaagttgcagttatagccaatttaggctaatgcttgggtttttggagcttttaaacacaaacgtttttgttagggcatcacagttttggcaacctctggctccaaaagaggaaaaatagaatgagttttctttctttttttttttttttgggagtccagagtctcgctctcttgtccagggctgggagttgcaatagcgcgatctggggctcactgcaacctccgcctccctgggttcaagcaattctcctgccttgcctcctgagtagctggggattacaggcgtgtgtcacccacgcttcggcctaatttttgtatttttagttagagacaggggtttcacccatgtcaagctgggtcttgggactccctgacgtcgtgatccacccgccttggcctcccaaagtactggggattacagggcgtgagccactgtgcctggctgagttttcttaaagtgagcttaatttctgaactcttagtgattcatatatgtacataaatctgtgatcccatttcttattgcaccattcaggaacactttatataaatgagtgggctttttatttcatattattagtagtatcatgggttccattacaggcctattaacatcatacattgtcattagtctttggaaggaaaaaatatgtaaataatatatgtgtaacatgagaatttctctctaaagcaggggcttaaaatttttttgggaaaagtttgacaaaggcataccacatggaattcaggatttacctcaaatgctaaggaattatgtttagttagggaaaaagggaaaggtcattttgacctcaggtaggaaaaataggattgctttggagttttatgtaggctttaggacttttaaaacgttaggaatttattctgtaacttaaaaattatttgaaaaaattatgccctctgggtttaattattgggtgattacacactctttctccttaccccttgtgtattgaactatgtcccataatcaagttgatgtggatcctgaaaagtgttatgaacatctgattggtatttgtcacatttattttaaaattagcatctgaacacttcaaagctgtcagtgtgtaattggtttcaccaataacccactgcttgatccttacaattaaattttttaactaaaaaaaaaaaaaaaaagtcgacgcggccgcgaatttagtagtagtaggc

SEQ ID NO: 597 - DNA, 456 bp, Homo sapiens
  SIMILAR (132)..(359): 981254mologous to Homo sapiens RNaseP protein P30,accession number U77665,Smith-Waterman Score=389.
atcaaaattataaggacttaaatttatgtaatttttttatttttggatacttaaattttctattaatttgctataagtcattgaaatgttataaataattttctcatatctactctttgttcattttatttcagcctttagaaataagagggccatatgacgtggcaaatctaggcttgctgtttgggctctctgaaagtgacgccaaggctgcggtgtccaccaactgccgagcagcgcttctccatggagaaactagaaaaactgcttttggaattatctctacagtgaagaaacctcggccatcagaaggagatgaagattgtcttccagcttccaagaaagccaagtgtgagggctgaaaagaatgccccagtctctgtcagcactcccttcttcccttttatagttcatcagccacaacaaaaataaaacctttgtgtgatttaaaaaaaa

SEQ ID NO: 598 - DNA, 528 bp, Homo sapiens
  SIMILAR (253)..(360): 1001254mologous to Homo sapiens RNaseP protein P30,accession number U77665,Smith-Waterman Score=190.
accattagagataacactgtcctgcagttttacccatgaggtaatctttaggaatgaattagatgttaataatatactgatatttgtgtctgttgggaaaaaaagataatgacggtaaatggcactagcagccatagcagttcattatggcttatcatttgctattgctgtaagccaaagtaatatgttaaaccacctcattttaaattatgtcttaacttcaagcacagtggtttccctgtttgttttacagaaactagaaaaactgcttttggaattatctctacagtgaagaaacctcggccatcagaaggagatgaagattgtcttccagcttccaagaaagccaagtgtgagggctgaaaagaatgccccagtctctgtcagcactcccttcttcccttttatagttcatcagccacaacaaaaataaaacctttgtgtgatttactgttttcatttggagctagaaatcaatagtctataaaaacagttttacttgcaatccattaaaacaacaaacgaaaa

SEQ ID NO: 599 - DNA, 689 bp, Homo sapiens
  SIMILAR (3)..(290): 1001254mologous to Homo sapiens RNaseP protein P30,accession number U77665,Smith-Waterman Score=481.
caatttccagtgccctcaatttgatgcaaatctgcaaaggaaagaatgtaattatatctagtgctgcagaaaggcctttagaaataagagggccatatgacgtggcaaatctaggcttgctgtttgggctctctgaaagtgacgccaaggctgcggtgtccaccaactgccgagcagcgcttctccatggagaaactagaaaaactgcttttggaattatctctacagtgaagaaacctcggccatcagaaggagatgaagattgtcttccagcttccaagaaagccaagtggtctcactctgtcacccaggctggagtgcagtggcacaatctcggctcactgcaacctttgcctcttgggcttcaagccattcctcccaccttcagcctcccaaggaactagaatttcaacaaagacaacttttgatctctcatcagagagatcatactcccaagaacaggctttgacccttctttaaaagaggattgtcctgggctgatgagagtcactttacctgaagatacctgggaagttttgtctcctctgaggttggcccatgcagatggactgatgcaggacattacagcctggcccactggctgcggtggtacaatttatgctcctgagcaccccatgggattacgctgtgtgtggatttctcctgaaaccacatatttgcctcttctg

SEQ ID NO: 600 - DNA, 1185 bp, Homo sapiens
  SIMILAR (282)..(869): 601254mologous to Homo sapiens RNaseP protein P30,accession number U77665,Smith-Waterman Score=461.
  misc_feature (1)...(1185): n = a,t,c or g
gaattcggcacgaggtgggacttcagcatggcggtgtttgcagatttggacctgcgagcgggttctgacctgaaggctctgcgcggacttgtggagactagccgctcaccttggctattcagttgttgctatcaatcatatcgttgactttaaggaaaagaaacaggaaattgaaaaaccagtagctgtttctgaactcttcacaactttgccaattgtacagggaaaatcaagaccaattaaaattttaactagattacaaattatgttgtcggatcatctccnccgcaaaggttttgaaaaacactctcaaaagaggggccgggctttaagatggttggtgcaggttttccaaaagcagaaaaggcttttttcatattgctttgcacacatttaagatgtggatttaggtctgcataactgtaacagagaaactaccattttacttcaaaagacctcctattaatgtggcgattgaccgaggcctggcttttgaccttgccctaatacccctgctatccaaagactccacaatgagaaggtatacaatttccccagtgcccctccaattttgatgcaaatcttgcaaaggaaagaatgtaattatatcctagtgcctgcaagaaaaggcccttttagaaaataagagggcccatattgacgtgggcaaatcctaggcttgcctgtttgggggttctctgaaagtgaacgccaagggttcgggtgtccacccaactgccgagcagcgccttctccatggagaaactagaaaaactgcttttggaattatctctacagtgaagaaacctcggccatcagaaggagatgaagattgtcttccagcttccaagaaagccaagtgtgagggctgaaaagaatgccccagtctctgtcagcactccctttttcccttttataggttccatcagcccacaacaaaaataaaaccctttgtgtgatttacctgttttcatttggagctagaaatcaatagtctataaaaacagttttacttgcaatccattaaaacaacaaacgaaacctagtgaagcatctttttaaaaggctgccagcttaatgaatttagatgtactttaagagagaaagactggttatttctcctttgtgtaagtgataaacaacagcaaatatacttgaataaaatgtttcaggtaaaaaaaaaaa

SEQ ID NO: 601 - DNA, 713 bp, Homo sapiens
  SIMILAR (183)..(464): 521254mologous to Homo sapiens hemoglobin gamma-G,accession number AF110493,Smith-Waterman Score=153.
gacactcgctttctggaacgtctgaggttatcaataagctcctagtccagacgcccatgggtcatttcacagaggaggacaaggctactatcgacaagcctctggtgcaaggtgaatgtggaaagatgctggaggagaaaccctgggaaggctcctggttgtctacccatggacccagaggtttctttgacagctttggcaacctgtcctctgcctctgccatccatgggcaaaccccaaaagtcaaggcacatggcaagaaggtgctgactttccttggggagatgccattaaagcacctgggatgatcttcaaggggcaccttttgcccaagcctgaagtgaacttgcacttgttgacaagcctgcaatgtgggatccttgaggaacttcaaagcttcctggggaaattttgctggtgacccgttttgggcaatccctttttcggcaaaagaatttcacccctggaggtgcaagggtttcctggggcagaaagatgggtgacttggagttggccagtgcccttgttccttccagattaccactgagctcactggcccatgaatgcagagcttttcaaggataaggcttttattcttgcaagcaattacaaataataaatctatttctgctaagagatcacacatgattttcttcagctcttttttttacatctttttaaatatatgagccacaaagggtttatattgagaa

SEQ ID NO: 602 - DNA, 4157 bp, Homo sapiens
  SIMILAR (2822)..(2280): 1001254mologous to Homo sapiens band 7.2b stomatin,accession number U33931,Smith-Waterman Score=874.
  misc_feature (1)...(4157): n = a,t,c or g
tttttttttttttttttttattagtgaaagtgcatacacctttattatgtacattgttggaaagggaggccacctggagaaacttctgcactggcaactgtgttcctagagctcccttctatgcgtcccttccccnaagtgatttaatttcaagctggattggactacggaattcacaaggcagaaaagtcaaggtcatttggttttatctttggagacaggagaactcaaggaaccaaaagtacttgttactctaagtctcagaaaaggttttcagtcaggatatgggaggctcctgggtcctcaaggggtgaaccactttcacacaacaggataaaaccatcatttttaaaattcaaaaatgttaaggtgcaacttggagtttaaagttggcactggctgccattacctctaaattaaactccaggctagggagcccagggattacatgggttagtttcaaggggcttccctaaaaattaagccttggaaaattggggggtacagggggaaggggacatccattggctgggatggacagagtgggttgagcctaaagagagcctataaagggctccgtgctggggaaaagaaagctgttatgacttggaacttctctaaggtgaaactcagagtctccaaagagggaaatgttaacaaatgtcacaccgccagctttctgggcccagtaagcagaatgccccaggttgcctcagatccaccggacatttggcaaaacagaagatgtctccctaatattataggacctaaggaatttgttgtcccaggaggagctgacccagttccctctttccagcatccaatataccatggataggaagaatggactaggtaaatgtaaaaagacctacatctatatagatattgtaagtttgacagtatctggcccaagatcattggacactatatagtcaatatactgtgaattccttatactatgtaatgaatgggtttgtaatcaacatatttcacagtgtaccacagttaacagcatgcagatagtaaaatataatggtttcctgaagttatctcttaaaaaagtatttctagtccttcagctattcaaatagatatataacaattgcatatagaacgtagagaaaaattttattaaaaaattaaaactatttaaaacctgatatatgaaaataggccaaccagtgagaaaaaagtgcacttttgtgaccaaatatttagctggtttgaaagaccagaacaaggaggaatcatttactcataaaagaaaggctcaaaataagttaaaacatggatgtatttttaaaatgaccactctagtagtgaattttaaaagtctttttaagggttagagtaatcttttcaattagtcttggctatttcctctagttctgacaagtacaggcaagaaaatggctactctcaagtaaggattattctgaaacacggtctggatttagaaaataaatgaacattagggaaatttcaattccttaagactctccaaaacccagttgtgtgctcattgcctgtatccccacacttttgggaggcagaggtgggtggatcacctgaggttaggagttcgtgactagcctggccaacatggtgaaaccccgtctctactaaaaaacaataataataatacaaaaattagctgggcatggtggcatgagcctgttaatcccagctactgggggaggctgaggcaggagaatctcttgaacccagggaggcggaggttgcagtgaagccgagatcatgctattgcactccagcctggggcaacaagagtgaaactccatcttcagaaaaaaaaaaaaaaaaagacttctctgggagggtaagggcacatattgacctggggggaagctggttgtgggtgttaaggtcattcacttttcttgcaaagcattttaggccagttcaggcggtgttcaggtggcagttacagcccaggttcttgcctgtggcctgggtgcttagggggttcagaatgagtcagtggaagtcaaaacaagagggatctaacctactacataataatctaaaaatacaaacttttaactattttaagactaacagattaccttatataaatcaccaatctctcagtatttacaagctaacaattctttcacctatttttataactgctatacattctgggaacaccacaattgacatatggaaaaagaaaagccctaccctctctttatgagttaaaggctaatttggtccccgacttcatgcttggaaggctagcgctcatctctacactagcctagatggctgtgttttgcccctatgattccttgcagcatatctatgggcagagggaagacaattgttgagtttttctcagcagcaatggtggtcagtgtctgcaggtatcggagctgaagggctgcaggagattcagtgatgaccatggaggcttctttcagagccctggatgcattcatttctccttcggctgcaataaccttggcgcgggcctcgcgggacgcttctgcttctgcagccatagctctctggagctgcacaggtagtttcacatccttaatttccacacgctccacctttattccccaggcatcagtggcatcatccagagtagactgcatgttgtgtgcaatttcttctctgtcagagaggatctgagaaagattcttggtgcccagaacattcctcagagtagtttgtgccaaaagacgggttgctgagtcagcgttggtgatatttgccacagccagggttgcattctgaacgcggtaatagaccacaccatccacgctaattgtcactgaatcctttgtgaggatagcattcttctgtccttcccccttcatgatgttttcaggttttctgtatgcaacggttattaagtctcctaaggacatggttcccaggatggccatcactttttcgggggctncctgaggaggaatatcaaatgaaatagttctcatgtccactttgatgaagctgtcagtgcatggcagaataaaaaacaaaccaggtcctttggctcctccttgtaaaatgcgacccaatctaaagatgatggctctttcatactcttttataatcttttgggatctgggcactatggagaaaatatcaactaacaatctgcttggggactctatctccttgaaggagtcggggagccgctgggcttcggagtcccgtgtgtgccgcttctcggccatgctgcccgagacgcagtcgcactcccccgtcctcgttgccaaacccggagccgccgggaatgccctttctttatattgactattctctgcatctatgcatttgttcacgtggatgtacccaagtccctggtcagaccaggagcacctcagtggctcgttgcccaggtccaggatgaagcagtcgccattgttgaagctctcccaggacacaggtacctggaagagtctctgcaccaccacctcgttgggtaccacgtgcttgaatcctgatgccacacctcctttcttgtacttcaggccagacttgaagtagcctaggaaggtggccgactcgaagccctggacctcacggtgctgcacggcccggccgttcaggtagtcatccagctgcacggtaaagatggcggccgccccgctctcatcctggctgcactcattgcccagccagtagtggaggtcatactgcagatttccgttcctcagctgcactgtcttcaggatgacgtaggcgtcgcccgtgaagaagtctccataaaggttggtgggcacgggcaccagatcgaacttctccacacgccagatctgcaggccaggctccttcccacccacaaatttcatttcttggaagaggagaagaggatgcaccagggtctgcaggaggctgttggagatgaagtggttaaaaatggggaggctattacacatgcactggggctggggccggggagggtgcaggagggttaggctggagtcgaggacaaaaatcagcaggtgcaggtcacctctggccggagaagagatccgcgcctcgggcacccgcccctggggcgcccccgcctgggacgccccccgcgacgcagtggccgcgcggacgggcagcgacagcgcgcacagcgccagggacagcgcgcaaagcagcgcgggcgcggggcggtgcggagccat

SEQ ID NO: 603 - DNA, 510 bp, Homo sapiens
  SIMILAR (238)..(507): 871254mologous to Mus musculus putative,accession number AK010440,Smith-Waterman Score=390.
atgagtatgctcaggcttcagaagaggctcgcctctagtgtccttcgctgtggcaagaagaaggtgtggttggaccccaataagaccaatgaaatcgccaatgccaattcccatcagcagatctggaagctgatcaaagatgggctgatcatccgcaagcctgtgacggtccattcccgggctcgatgccagaaaaacaccttggcccactggaagggcaggcacataggcatagataaaagatactgtgaatctaagaagattgatcgccacatgtatcacagcctgtacctgaaggtgcaggggaatgtgttcacaaacaagccgattctcatggaacacagccacaagctgaaggcagacaaggctcacaagaagctcctggctgaccaggctgaggcccgcaggcctaagaccaaggaagcacggaagcgcagtgaagagcgcctccaggccaagaaggaggagatcatcaagactttgttcaaggaggaagacaccaagaaataa

SEQ ID NO: 604 - DNA, 447 bp, Homo sapiens
  SIMILAR (15)..(395): 901254mologous to Mus musculus putative,accession number AK010440,Smith-Waterman Score=578.
ggcacgaggcagccatgagtatgctcaggcttcagaagaggctcgcctctagtgtcctccgctgtggcaagaagaaggtctggttagaccccaatgagaccaatgaaatcgccaatgccaactcccgtcagcagatccggaagctcatcaaagatgggctgatcatccgcaagcctgtgacggtccattcccgggctcgatgccggaaaaacaccttggcccgccggaaggtcaggcacatgggcataggtaagcggaagggtacagccaatgcccgaatgccagagaaggtcacatggatgaggagaatggagattttgcgccatttgctcacaagataccgtgaatgtgagactatcaatcgggccatgcatcacctgctgaacctgaaggtgatgaggtaatggttttaaatatagttttccagttgctccaccctgacaaccg

SEQ ID NO: 605 - DNA, 1661 bp, Homo sapiens
  SIMILAR (3)..(359): 1001254mologous to Oryctolagus cuniculus elongation factor 1 alpha,accession number U09823,Smith-Waterman Score=618.
atatcaacattgtcgtcattggacacgtagattcgggcaagtccaccactactggccatctgatctataaatgcggtggcatcgacaaaagaaccattgaaaaatttgagaaggaggctgctgagatgggaaagggctccttcaagtatgcctgggtcttggataaactgaaagctgagcgtgaacgtggtatcaccattgatatctccttgtggaaatttgagaccagcaagtactatgtgactatcattgatgccccaggacacagagactttatcaaaaacatgattacagggacatctcaggctgactgtgctgtcctgattgttgctgctggtgttggtgaatttgaagctgggtatctccaagaatgggcagacccgaggagcatgcccttctggcttacacactgggtgtgaaacaactaattgtcggtgttaccaaaatggattccactgagccaccctacagccagaagagatatgaggaaattgttaaggaagtcagcacttacattaagaaaattggctacaaccccgacacagtagcatttgtgccaatttctggttggaatggtgacaacatgctggagccaagtgctaacatgccttggttcaagggatggaaagtcacccgtaaggatggcaatgccagtggaaccacgctgcttgaggctctggactgcatcctaccaccaactcgtccaactgacaagcccttgggcctgcctctccaggatgtctacaaaattggtggtattggtactgttcctgttggccgagtggagactggtgttctcaaacccggtatggtggtcacctttggtccagtcaacgttacaacggaagtaaaatctgtcgaaatgcaccatgaagctttgggtgaagctcttcctggggacaatgtgggcttcaatgtcaagaatgtgtctgtcaaggatgttcgtcgtggcaacgttgctggtgacagcaaaaatgacccaccaatggaagcagctggcttccctgctcaggtgattatcctgaaccatccaggccaaataagcgccggctatgcccctgtattggattgccacacggctcacattgcatgcaagtttgctgagctgaaggaaaagattgatcgccgttctggtaaaaagctggaagatggccctaaattcttgaagtctggtgatgctgccattgttgatatggttcctggcaagcccatgtgtgttgagagcttctcagactatccacctttgggctgctttgctgttcgtgatatgagacagacagttgcggtgggtgtcatcaaagcagtggacaagaaggctgctggagctggcaaggtcaccaagtctgcccagaaagctcagaaggctaaatgaatattatccctaatcctcccaccccactcttaatcagtggtggaagaccggtctcagaactgtttgtttcaattgccatttaagtttagtagtaaaagactggttaatgataacaatgcatcgtaaaacctttcagaaggaaaggagaatgttttgtggacacgttggttttcttttttgcgtgtggcagttttagttattagtttttaaaatcagtactttttaatggaaacaacttgacccccaaatttgtcacagaattttgggacccattaaaaggttaactggg

SEQ ID NO: 606 - DNA, 800 bp, Homo sapiens
  SIMILAR (66)..(527): 441254mologous to Homo sapiens Human secreted protein, SEQ ID NO: 7925,accession number AAG03844,Smith-Waterman Score=171.
aggatccttaataaattaatccccccccccccgctttcctttcgctgctgcggccgcagccatgcagtatgctcaggcttcagaagatggctcgcctctaggtgtcctccggctgtggcaagaagaaggtctggttagaccccaatgagaccaatgaaatcgccaatgccaactcccgtcagcagatcccggaagctcatcaaagatgggcctgatcatccgcaagcctgtttgacgggtccattcccgggctcgatgccggaaaaacacccttggcccgccggaagggcacggcacactgggcataggtaagcgggaagggtacagcccaatgccccgaatgcccagagaaaggtcacatggatgaaggagaatgaaggattttggcgccggcttgcttcagaaagataccggtgaaatctaaagaagattcgattcgccacattgttatcacaagccttgtaccctgaagggtgaagggggaatgttgtttcaaaaacaaggcgggtttttcatgggaacacattccacaagcttgaaggcagacaaaggccccgcaagaaagctccctggcttgaccaggcttgaggccccgcaggtcttaagaccaaggaaagcacggaaagcgccagtgaagagcggcttccagggcaaaggaaggaggagatcaatcaaagactttattccaaggaggaagagaccaagaaataaaacctcccactttgtctgtacatactgggcctctgtgattacatagatcagccattaaaataaaacaagccttaaaaaaaaaaaaaacc

SEQ ID NO: 607 - DNA, 419 bp, Homo sapiens
  SIMILAR (135)..(419): 951254mologous to Homo sapiens IFN-alpha responsive transcription factor,accession number M87503,Smith-Waterman Score= 485.
gatggcatcaggcagggcacgctgcacctcaaatctccggaactgggtggtggagcaagtggagagtgggcagtttcccggagtgtgctgggatgatacagctaagaccatgttccggattccctggaaacatgcaggcctgggcaatatttaagggaaagtataaggagggggacacaggaggtccagctgtctggaagactcgcctgcgctgtgcactcaacaagagttctgaatttaaggaggttcctgagaggggccgcatggatgttgctgagccctacaaggtgtatcagttgctgccaccaggaatcgtctctggccagccagggactcaaaaagtaccatcaaagcgacagcacagttctgtgttctctgagaggaaagaggaagaggatgccattgcaaactgcacactt

SEQ ID NO: 608 - DNA, 431 bp, Homo sapiens
  SIMILAR (56)..(430): 981254mologous to Homo sapiens IFN-alpha responsive transcription factor,accession number M87503,Smith-Waterman Score= 643.
cagccaggagttaagctgaggtcgactgagccctgcgacagcctggacagcaactcaggcctgggcaatatttaagggaaagtataaggagggggacacaggaggtccagctgtctggaagactcgcctgcgctgtgcactcaacaagagttctgaatttaaggaggttcctgagaggggccgcatggatgttgctgagccctacaaggtgtatcagttgctgccaccaggaatcgtctctggccagccagggactcagaatgtaccatcaaagcgacagcacagttctgtgtcctctgagaggaaggaggaagaggatgccatgcagaactgcacactcagtccctctgtgctccaggactccctcaataatgaggaggagggggccagtgggggagcagtccattcagacattgggagcagcagcagca

SEQ ID NO: 609 - DNA, 400 bp, Homo sapiens
  SIMILAR (251)..(400): 1001254mologous to Homo sapiens IFN-alpha responsive transcription factor,accession number M87503,Smith-Waterman Score= 269.
ccagtgtggtggaattcgtcgggctgtgctgtgatctgctacttctaagcacttatatgaggcaggggcaccctttcctatttgcacatgggtgagtagcacttagttccaagtacttctgaccttgcagctcctgctctggcaagaccccctcctacctctctccatcatgggttcctcactattgcctccctgcctgtggccctctctcttctttttgttcttcgaacccttgaccctttctctttcagacttggtcaggtactttcagggcctgggccccccaccgaagttccaggtaacactgaatttctgggaagagagccatggctccagccatactccacagaatcttatcacagtgaagatggagcaggcctttgcccgatacttgctggag

SEQ ID NO: 610 - DNA, 457 bp, Homo sapiens
agcgacctcggctggcccagcctcccatcttggtggtggattcccgagatgctggcatttgcctgcaaccccttcagcagggggatgctttgctggcctctgcccaaagtcaagtctggtactgtattcactgtaccttctgcaactcgagccctggctgggtgtgtgttatgtgcaaccggactagtagccccattccagcacaacatgccccccggcacctatgctagttttttgaaaaagggaccccccaagcctgggcccccacgacgccttagtgcccccctgcccagttcctgtggagatcctgagaagcagcgccaagacaagatgcgggaagaaggcctccagctagtgagcatgatccgggaaggggaagccgcaggtgcctgtccagaggagatcttctcggctctgcagtactcgggcactgaggtgcctctgcagtgggtgcgct

SEQ ID NO: 611 - DNA, 693 bp, Homo sapiens
  SIMILAR (474)..(692): 891254mologous to Mus musculus muscle protein 534,accession number AJ250189,Smith-Waterman Score=353.
ggaagggtggggggtgccattggctttgagaggcacaggctattgaagagtggccccggggaagagaagaggtcaacgggatgtaaagcacaactctctgtccccttaccctttgcttgctcctccaatgactccatctcccctcacccttacacccctcacgcaggggttcctgagaggccaggaccccaacaagatccaacttcctctctcccatctgggtttctgccagaaatgtccagagcctaactgcagggtgaaaaagtccctgcacggccaccaccctcgagactgactcttctacctagcggactggactgctctccggcttcagaagctgctacaggtcagaggtggccaggagagaagaagacagggcccagggtgggcaagaatggaaaaggctccgtgctaggaattgcaacagggacttggcatcaaggggaatgtaacacccatctgtctctcctcctcaggacaataacgtcatgtttaatacagagcctccagctggggcccgggcagtccctggaggcggctgccgagtgatagagcagaaggaggttcccaatgggctcagggacgaagcttgtggcaaggaaactccagctggctatgccggcctgtgccaggcacactacaaagagtatcttgtgagcctcatcaatgcccactcgctggacccagccacct

SEQ ID NO: 612 - DNA, 4434 bp, Homo sapiens
  SIMILAR (3249)..(4028): 431254mologous to Homo sapiens IFN-alpha responsive transcription factor,accession number M87503,Smith-Waterman Score= 427.
  misc_feature (1)...(4434): n = a,t,c or g
atgccgggggaggaagaggagcgggccttcctggtggcccgcgaggagctggcgagcgccctgaggagggattccgggcaggcgttttccctggagcagctccggccgctactagccagctctctgccgctagccgcccgctacctgcagctggacgccgcacgccttgtccgctgcaacgctcatggggagccccgaaactacctcaacaccctgtccacggctctgaacatcctggagaaatacggccgcaaccttctcagccctcagcggcctcggtactggcgtggtgtcaagtttaataaccctgtctttcgcagcacggtggatgctgtgcaggggggccgagatgtgctgcgattatatggctacacagaggagcaaccagatgggttgagcttccccgaagggcaggaggagccagatgagcaccaggttgctacagtcacactggaagtactgctgcttcggacagagctcagcctgctattgcagaatactcatccaagacagcaggcactggagcagctgttggaagacaaggttgaagatgatatgctgcagctttcagaatttgaccccctattgagagagattgctcctggccccctcaccacaccctctgtcccaggtattattggtcctaaattggggaccagctctttggaaaagggaccccccaagcctgggcccccacgacgccttagtgcccccctgcccagttcctgtggagatcctgagaagcagcgccaagacaagatgcgggaagaaggcctccagctagtgagcatgatccgggaaggggaagccgcaggtgcctgtccagaggagatcttctcggctctgcagtactcgggcactgaggtgcctctgcagtggttgcgctcagaactgccctacgtcctggagatggtggctgagctggctggacagcaggaccctgggctgggtgccttttcctgtcaggaggcccggagagcctggctggatcgtcatggcaaccttgatgaagctgtggaggagtgtgtgaggaccaggcgaaggaaggtgcaggagctccagtctctaggctttgggcctgaggaggggtctctccaggcattgttccagcacggaggtgatgtgtcacgggccctgactgagctacagcgccaacgcctagagcccttccgccagcgcctctgggacagtggccctgagcccaccccttcctgggatgggccagacaagcagagcctggtcaggcggcttttggcagtctacgcactccccagctggggccgggcagagctggcactgtcactgctgcaggagacacccaggaactatgagttgggggatgtggtagaagctgtgaggcacagccagggaccgggccttcctgcgccgcttgcttgcccagggagtgtgccgtgtgtggctggggcccttgcccaacaaaccggatgcaggccctgacttcctgttgagtgcaccatctgtcgtgactgcttccgccagcacttcaccatcgccttgaaggagaagcacatcacagacatggtgtgccctgcctgtggccgccccgacctcaccgatgacacacagttgctcagctacttctctacccttgacatccagcttcgcgagagcctagagccagatgcctatgcgttgttccataagaagctgaccgagggtgtgctgatgcgggaccccaagttcttgtggtgtgcccagtggctcctttggcttcatatatgagcgtgagcagctggaggcaacttgtccccaagtgtcacccagaccttcctgttgttgctgcaagcgccagtgggaggagcagcaccgaggtcggagctgtgaggacttccagaactggaaacgcatgaacgacccagaataccaggcccagggcctagcaatgtatcttcaggaaaacggcattgactgccccaaatgcaagttctcgtacgccctggcccgaggaggctgcatgcacctttcactgtacccagtgccgccaccagttctgcagcggctgctacaatgccttttacgccaagaaataaattgtccagaagcctaacttgcagggttgaaaaagtccctgcacggccacccaccctcgagacttggcctcttctacctgcgggactggactgctctccggcttcagaagctgctacattacaataacgtcatgtttaatacagagcctccagctggggcccgggcagtccctggaggcggctgccgagtgatagagcagaaaggaggttccccaatggggtcaagggcgaaagcttgtggcaaggaaactcccagctggctatgccggcctgtgcccagggcacacttacaaagagtatcttgttgagcctcattcaattgcccactcggttggacccagccaccttgtatgaggtggaagagctggagacgggccactgagcgctacctgcacgtacgcccccagcctttggctggacgagggatccccctgcttaccaggcccgcttgttacagaagctgacagaagaggtacccttgggacagagtatcccccgcaggcggaagtagctgagggcaagggtcccgatgagggtcccatggcctgctccctcaggaacagctccagcaccaataaagaggcatcttaccacccaggcttcttggtggtccttcttcctgaatttgactggtatttgaagtcacccaatatgtatcaggtgggcactgtgggggaatgcagatgcacaggtgtacacagcagtccagaggtcccaggcctgactccaggaaactggcctccctggggaagccacggtgtcacccagaggatggcatcaggtatgggctcgctgcacccgaaaactccggaactgggtggtggagcaagtggagagtgggcagtttcccggagtgtgctgggatgatacagctaagaccatgttccggattccctggaaacatgcaggcaagcaggacttccgggaggaccaggatgctgccttcttcaaggcctgggcaatatttaagggaaagtataaggagggggacacaggaggtccagctgtttggaaaacttgccttgtgctgtgcactcaacaagagttttgattttaaggaggttcctgagaggggccgcatggatgttgctgagccctacaaggtgtatcagttgctgccaccaggaatacttctctggccattccagggactcagaaagtaccatcaaagcgacagcacagttctgtgtcctctgagaaggaaggaaggagaaggatgccatgcagaactgcacactcagtccctctgtgctccaaggactccctcaataatgaagaaggaggggggcagtgggggagcagtccatttcagacatttgggagcagcagcagcagcagcagccctgagaccacaaggaagattacagacacaactgaaggccccctttcaaggggatcagaaggtccctggagtttctgccttcctccagagccagactaatcactgctgctcaccttcatactacaacgggcgcgtggtgggcgaggcccaggtgcaaagcctggattgccgccttgtggctgagccctcaggctctgagagcagcatggagcaggtgctgttccccaagcctggcccactggagcccacgcagcgcctgctgagccaggcttagaaggggcatcctagtggccagcaccccccagggcctctttcgttgcagcgccttttgccccatccccatcttctggggaattgcaccccagggntccacctggggccaggcccgcatctgctgcccagcaacgagtgcgtggagctcttcagaaccgcctacttctgcagagacttggtcaggtactttcagggcctgggccccccaccgaagtttccaggtaacactgaatttctgggaagagagccatggctccagccatactccacagaatcttatcacagtgaagatggagcaggcctttgcccgatacttgctggagcagactccagagcagcaggcagccattctgtccctggtgtagagcctgggggacccatcttccacctcacctctttgttcttcctgtctcctttgaagtagactcattcttcacacgattgacctgtcctctttgtgataattctcagtagttgtccggtgataatcgtgtcctgaaaatcctcgcacacactgggctggtggagaactcaaggctaattttttatccttttttttttttttaattttgagatatacgccctctttcaactgtaaaggggcctgggaatttcaaatggtgttaacccagggggcctttccctcttccctgacctcccaactctaaagccaagcactttatattttcctcttagatattcactaaggacttaaaataaaattttattgaaagaggaaaaaaaaaaaaaaaaaaaaaaaaaaaaaaa

SEQ ID NO: 613 - DNA, 598 bp, Homo sapiens
  SIMILAR (104)..(247): 831254mologous to Homo sapiens neuropolypeptide h3,accession number S76773,Smith-Waterman Score=220.
  misc_feature (1)...(598): n = a,t,c or g
ggggtcggggtggaccgagctgggcaaagtctgacgcccacccaggttaagaatagacccaccagcatttcgtggtatgtctttgattcaggaagctctacaccttgtcctgacagacccggatgctccagcaggggatgatcccaaatacagagaatggcatcatttcctggtggtcaacatgaagggcaatgacatcagcaatggcacagtcctctccgattatgnntgtgctgcgcctcccaaggccccaagccatgttccccagttcagtgttgcatgtataatagatttctcctcttcctgccccccttggcatgggtgagacctgaccagtcagatggtagttgagggtgacttttcctgctgcctggcctttataattttactcactcactctgatttatgttttgatcaaatttgaacttcattttggggggtattttggtactgtgatggggtcatcaaattattaatctgaaaatagcaacccagaatgtaaaaaagaaaaaactggggggaaaaagaccaggtctacagtgatagagcaaagcatcaaagaatctttaaggaaggtttaaaaaaaaaaaaaaaaaaa

SEQ ID NO: 614 - DNA, 408 bp, Homo sapiens
  misc_feature (1)...(408): n = a,t,c or g
ttaaaaacccagatttccagttttcttccaaactttcaacgagcgctttgccggtttaaatttccatgttcccacaacaaaaaaacccccctccctcctggttttttcagggttggttttttaaggggccagaggggcatttttatgccttcttagggattttaaatgccctttgttgggggttaaccccaaatcccccctttggtttttttggggaggggcctccccctaaaatccccttggggtcccttttgggctcagggttccaaaggcaaaggccccccannnnnnnnnnnnnnnnnnnnnnnaaaccttccttaaagattctttgatgctttgctctatccctgtagacctggtctttttccccccagtttttttcttttttacattctgggttgctatttt

SEQ ID NO: 615 - DNA, 332 bp, Homo sapiens
acatctcaccaaagccactgcagcacattcttaactgtgtccaagtggtaataattaaaaacagcttactgtctttatcattatcactcttaacccaccctaaaatttcctaaaggtatcccgttgacctcaggatacattaaagctacttagtggtgactggtttctgcctaccacttcctcccctaccacctaacactcacacatacaaatacttggttctctgtgcccagctagcagttacccatcctttaaaactcatcccctctaagatgtgccctaccacctgcagatttgggttaagtgtctcaataaaatcttaaatgaataaa

SEQ ID NO: 616 - DNA, 1581 bp, Homo sapiens
  SIMILAR (203)..(700): 461254mologous to Homo sapiens Phosphatidylethanolamine binding protein,accession number AAR64268,Smith-Waterman Score=231.
  misc_feature (1)...(1581): n = a,t,c or g
gggtggaattcttctcgagccagagagctgagctctacgcgacgcctctgacgcccgcgcctgggcctaacgggggaattcccgggtggaccctttggttggccctgccaaggccggggaacctaagaaaggggcccggccccttgagcctgcaagaagtggacgagcagccgcagcacccgctgcatgtcacctacgccggggcggcggtcgcgacgagctgggcaaagtgctgacgcccacccaggttaagaatagacccaccaagcatttcgtgggatggtcttgattcaagggaaagctctacaccttggtcctgacaagacccggatgctcccaagcaaggaaaggatccccaaatacagagaattggcatcatttccttggttggtcaacattgaaagggcaaatgacatcagcaantggcacagtcctctccggattatgttgggctcgggggcctcccaaagggcacaggcctccaccgcctatgtctggctggttttacgagcagggacaggccgctaaaagtgtgacgagccccatccttcagcaacccgatcttggagaccaccgtggcaaaattcaaaggtgggcgtcccttcccgttaaaaagtaatgaagctccagggcccccggtggctgggcaccgtgttacccccagcccgaagtggggatgaaccaatgtgcccccaaactgtaacgaagcagctgtcctggggaaagtagggggttaagcttgggggaccctgaactggcccctggaggcccccaagcccatgttcccccagtttcagttgtttgcatgtataatagatttctccctcttcctgccccccttggcatgggtgagaccctgaccagtcagatggtaagttgagggtgacttttccctgctggcctggccctttataattttactcactcactctgatttatgttttgatcgaaatttgaacttcattttggggggtatttttggtactgtgatggggtcatcaaattattaatctgaaaatagcaacccagaatgtaaaaaaagaaaaaaactgggggggaaaaaaagacccaggtctacagtgattagagcaaaagcatcaaaagaatcttttaaggaaggtttaaaaaaaaaaaaaaaaaaaaaaagattggttgcctctgcctttgtgatcctgagtcccagaatggtacacaatgtgattttatgggtgatgtcactcacctaggacaaccagaggctgggcattgaggctaacctccaacacagtgcatctcagatgcctcagtaggcatcaggtatgtcactctggtccctttaaagagcaatcctgggaagaagcaggagggagggtggctttgctgttgttggggacattggcaatcttagaccggcagcagcgcctcgcttgacagcttggggaggaaaccctgagatcctgtgtttttttaaatttgatcgttccttccatgggggggtaagaaaagcctgggtctggagttgcctgaatgttgcattaattgtgctgtttgcttgtagttgaataaaaatagaaacctgaatgaaaaaaaaaaaaaaaagat

SEQ ID NO: 617 - DNA, 2648 bp, Homo sapiens
  SIMILAR (1794)..(1970): 661254mologous to Homo sapiens dJ127B20.1 (Rho GTPase activating protein 8),accession number Z83838,Smith-Waterman Score= 164.
tcttgaagcccctcatcaggtatgcgtcactctgggagaggacctcgctggggttggaggtttcacccctcagggtccatgggacggaccagctggtcatccctcccgaagttttgcggtaagtgcctgttagaccccagaagccgcatcaatacatcttcgtgcttccaaagggcttggttcagttgccaactaatggtcatgtgcccccccatcctgtggccgggtccctgctgtatgcacagtgcccggcacatagtagggcttcaatacgtatttgcctgtgttaaggaaggactgttacctgagcacagagggtcttttctagcaagccctttccaggcactggggataaagtaattaacaaaagggacgaggttcctttagcattaccggccagctctcgtcttaaattcagacacttgcgagagctgagggtggtcacgcccaccttggggctgaccgcatggtaagcaggtgaggctgctctgctggccaggggcctcaggagagactggacatttgctggaggttggaggcccccgctgcccacacagcagtttggcgtcagtctgcaatagtaagtgagccggggatgtgcctgctcctatgccctggagccctgggagctgtggggcgcttctgggtctaagcacatctcccgaggggaggggtacaagcaagaattctatgctgagagtccccgatgccctccagtgggtggacgactgtcggaaagccaggtgggagtcactggccacagagaacgctgtgctgaccaacaaactgtgctctgtgctccagagtcctcgcagaactcggccaggcgagtttgcccatggggcgttggcagagggcacgtggtggtgtccagctggtggctggctaggatcatccaagacatgccttatgttcctgcacctctggcctcagtggggactgttggccagtgcacctgcccgcagtgtccccagcctgatgttcccacggtagctgtgcttcttccagggcagctcagggtttccagcaaaaaggttcccgagatcacaggtgggaagagtcaggctctttaggacaggagagaaggacctggcccagaaactgaacagttgcttctgtacgttgttgatgacctgtggactctaaggatcagggagaggaccctgcatccagaggtgggcagttggaatgtaaacccctcacgaggccagctgtggacaggcacggaagcctttctctctctagaaaggtgagacggggccggctccagctggatgacgtgagggctgctgggtgcacctctctgggtggtttgtcaagcacttcgggcagtgctggtctgtaggaagccctctcgaaatggggactcctctgatgggatcaactttgatttgcagataccattgccagtagggtgggtgcagtcaagaacttggagtggggtgagccttgtgggctctccacagctcctgaggctagaacatgctgacttccatcagggagaaggccctgccagaccggggtccctgttaggggggttgaccttgttggggggcttccctgagggaggggcagtggagctgagctctgaggacggggagaagctggccatgccgtgtgacagaaaggccccagagaggagagcaggtgaaggggctcgtggctgtgggagtgcgggagcgtgcggggcttcgaggaagttgggaggagaagggtacaaccaaggtgagggtgtcccgcagtcctgagccccgagctgcctggtcagcgagcacagcgctccggggcctcagcgagagctgccccagccgcttctgaccttccaggcctacgagcagattctcgggatcacctgtgcgtagctgccctggcgcaggggtggggggcttggtcctcagatgctgtcccccagctactggcccgtcgtcctccgctacctcatgggcttcctgcatgcggtgagtggggaaggggggagcttggggtgaagcccagtggccttccctcccatgctgggcccgcatggggtcaccaagttcgtaccgtctgtgctacagcccatccccaagattgcatctccccagaaggtgcagtggaagaggagatagtggggggttgaggctgtcacagaaggtcagagccagagggtcctccagatctggcctatcccagggggtctcctccctgagtgcccttgtgcccctgaacaatgtttcactgaactgctaatcgagtactatgaaaagatcttcagcacccccggaggcacctggggagcacggcctggcaccatgtgaacaggggagcagggcagcccctttgcaggaggctgtgccacggacacaagccacgggcctcaccaagcctaccctacctccgagtcccctgatggcggccagaagacgtctctagtgttgcgaacactctgtatatttcgagctacctcccacacctgtctgtgcacttgtatgttttataaacttggcatctgtaaaaataaccagccattagatgaattcagaaccttttaatgaaaactccatgcctctggtccttggacttttgtccatggttcctaaactgtggaccgggatagaataatgcaaaaaaaaaaaaaaaaaaaaaaaaaaaaaaaaaaaaaaaaaaaa

SEQ ID NO: 618 - DNA, 443 bp, Homo sapiens
  SIMILAR (4)..(252): 971254mologous to Mus musculus putative,accession number AK002592,Smith-Waterman Score=438.
  misc_feature (1)...(443): n = a,t,c or g
tcgacgatttcgttgtgccgccgctgtggctctaaggcctaccaccttcagaagtctacctgtggcaaatgtggctaccctgccaagcgcaagagaaagtataactggagtgccaaggctaaaagacgaaataccaccggaactggtcgaatgaggcacctaaaaattgtataccgcagattcaggcatggattccgtgaaggaacaacacctaaacccaagagggcagctgttgcagcatccagttcatcttaagaatgtcagcgattagtcatgcaataaatgttctggttttaaaaaatacatatctggttttggtaaggtatttttaatcaattaggcttgtagtatcagtgaaatactgtaggtttagggactgggctagcttcatatcagatttacttgttaagtgactgttttggaatgtttacttttggactggn

SEQ ID NO: 619 - DNA, 429 bp, Homo sapiens
  SIMILAR (15)..(305): 981254mologous to Mus musculus putative,accession number AK002592,Smith-Waterman Score=519.
  misc_feature (1)...(429): n = a,t,c or g
tccgcacaagcgagatgacgaagggaacgtctttttttggaaagcgtcgcaataagacgcacacgttgtgccgccgctgtggctctaaggcctaccaccttcagaagtcgacctgtggcaaatgtggctaccctgccaagcgcaagagaaagtataactggagtgccaaggctaaaagacgaaataccaccggaactggtcgaatgaggcacctaaaaattgtataccgcagattcaggcatggattccgtgaaggaacaacacctaaacccaagagggcagctgttgcagcatccagttcatcttaagaatgtcaacgattagtcatgcaataaatgttctggttttaaaaaatannnnnnnnnnnnnncataataaaacttatataaaaaataaaaaaatatttaatctcctccgggggggggccct

SEQ ID NO: 620 - DNA, 670 bp, Homo sapiens
  SIMILAR (91)..(291): 801254mologous to Bos taurus ribosomal protein L37,accession number S79980,Smith-Waterman Score=269.
attccgactccacttatagggaattttggccctcgaggcccaagaattcggcacgagcggccgcagaagcgagatgaccgaagggaaccgtcatcgtttggaaagcgtcggcaataagacggcacactgttgtgccagccgctgtggctcctaaggccctaccaccttcagaagtcgacctgtggcaaatgtggctaccctgccaagcgcaagagaaagtataactggagtgccaaggctaaaagacgaaataccaccggaactggtcgaatgaggcacctaaaaattgtattaccgcagattcagggcatgggatttccgtgaaggaacaacacctaaacccaagtagggcagcttgttgcagcattccagttcatcttaagaattgtcaacgattagtcatgcaattaaatgttctgggtgtaaagaatacatatctggttgtggagtttggattcataatacaagagaagcacagggcaaagacactgcattaacctccaagaactaaggaatgggaggactgggccaggcctgggtgggtgcacacctggtaattcccagctacttcaggaggctgaggcgagagaatcgcttgagccttggggggcagaggttgcagtgagctgagagaacggcgggcggcagagcgagactccatctcaaaaaa

SEQ ID NO: 621 - DNA, 711 bp, Homo sapiens
  SIMILAR (406)..(35): 491254mologous to Homo sapiens PRO2987,accession number AF116719,Smith-Waterman Score=182.
aattttgccctcgaggccaagaattcggcgagggcaataagctcctagtcccagacgcccatggggtcatttcacagaggaggaccaaggctactattcacaagcctgtggggcaaaggtgaatgtggaaagatgctggaggagaaaacccctgggaaaggctccctggttgtctaccccatggacccagaggttctttgacagctttggcaacctgtcctctgccttttgcccatcatgggcaaacccccaaagtcaaggcacatggcaaagaaggtgctgactttccttgggagatgccataaaagcacctggatgatctcaagggcacctttgcccaagcctgagtgaacctgcacctgtgacaaagctgcaatgtggatccttgagaactttcaagctcctggggaaatgttgctggtgacccgtttttggcaatccatttccggcaaacgaattcacccctggaggttgcaaggcttcctgggcagaagatgggtgacttgcagttggccagtggccctgttcctccagataccactgaagcctcttggcccatgaattcagaagctttcaaggataaggcttttattcttgcaagcaattacaaataataaatctatttctgctaagagatcacacatgattttcttcagctcttttttttacatctttttaaatatatgagccacaaagggtttatattgagaa

SEQ ID NO: 622 - DNA, 1369 bp, Homo sapiens
  SIMILAR (180)..(19): 901254mologous to Homo sapiens Human secreted protein, SEQ ID NO: 6374,accession number AAG02293,Smith-Waterman Score=227.
tcagaagtctttgtggtctgctgccaagacatgtccaaagatgacctcagacacatcttccggagccacagtggccctcttcaagacttctttgatgacagtggagcccaggtcctggacaggaacagcagctaaggcaccattgaaggaacctacaatagaaaggcggagagcgtggacatcacaagcctgcgggtaatacgggaaccacgagcaggggagcctcatgaccctgtttggcaaggccacgcgaggaggcagtgccctctcctcccacacgttcctacacctgctggtctgagcaaaggtcaaggtgggtgccacaactcgcagcagccgagggctggacaggcgacctccagaacggcctatggacgccgctgtagcccttctatttgcccaaatccgaaggacggcttcctccacatacgcccctctcctacacaagtccggccctcggcgctcctgccgaagcagcaggcgcctcggactctgcgcggctcccgccggccactcacctatgatggtccgcgccgccgagacgatgaccacaggatctgagcctgcattcatcttgcttctcctgccgccgactgccctgcgctgcctgcaagctaggcaaagctcctcctcgcagcccacaggcctgccgcgggcgggacctgagctcaggactggaatcccacgggcgagaatctcgagtgcgagcccggcccgcagcgggtctcagcacagcttctgatggggtccttttgctctcggcggcttcgggaggtcctatgcgtttctcctggcgccagtcattcgctcgcgtgaggggcttgctaggagcgtctcggtgcgagccccctgccttctaagatcaactctggctgtgaacgggtgaggacgccgggagcgtcttagcgtcacaaaagttcctttggttgacgtttggacagtgaaaggagcatgtaacaagtggggtcagttttgtttaaaaccctttctgacttcccagcctcttactgggcaaagttcataatttttctgagctttctagggtttccaggcaagcttatgaggggccaccgttacagcaacttgttgggaacacctggatagtggaacaagaaagctttgtcacaaagtcatgaaggggaaaactgttgacggacctggagaatcttcctgaagaactttaaagttgattgaaagaatcattaaatcctggaaacctacattaagactttgcagagatatgcggatgggtcatataaatcagagaaggtaaagagtgtaggccccagaggtggggcaatagagaaggaaaaaaattgcctaacagtgccttttcaggagaaatctttagggtctggaatagtggtga

SEQ ID NO: 623 - DNA, 554 bp, Homo sapiens
  SIMILAR (194)..(532): 941254mologous to Mus musculus putative,accession number AK002387,Smith-Waterman Score=594.
cggccgctggacatgggaaagcggaaccaccaaaaggagtgatgatcaacgatctcatgataaatctggatgctagttctcatgcctcaggacatcctactgggaacgacacaccagctcctgggatcagactttcatctacttaggacccctctttgcccagactactaaagccagtcttcactagccacgaatggctacccaaaggaaacacttggtgaaagattttaatccttacattacctgctatatctgtaaagggtatctgatcaagccaacaacagtgacggaatgcctccatacattctgtaagacttgtattgttcagcactttgaagatagcaatgattgcccaaggtgtggcaaccaagttcatgagacaaatccattagaaatgttgaggttggacaatacattagaggaaattatatttaagctggtccctggactacgggaacaagaacttgagcgtgaatctgaattttggaaggaaaataagcctcaaggaaatggacaagatgatactttcaaaagcttgacaaaccgaaagtagg

SEQ ID NO: 624 - DNA, 3444 bp, Homo sapiens
  SIMILAR (22)..(1716): 781254mologous to Homo sapiens t-complex 1,accession number BC000665,Smith-Waterman Score=1979.
acgtgtatcgctgccgtcaagatggaggggcctttgtccgtgttcggtgaccgcagcactggggaaacgatccgctcccaaaacgttatggctgcagcttcgattgccaatattgtaaaaagttctcttggtccagttggcttggataaaatgttggtggatgatattggtgatgtaaccattactaacgatggtgcaaccatcctgaagttactggaggtagaacatcctgcagctaaagttctttgtgagctggctgatctgcaagacaaagaagttggagatggaactacttcagtggttattattgcagcagaactcctaaaaaatgcagatgaattagtcaaacagaaaattcatcccacatcagttattagtggctatcgacttgcttgcaaggaagcagtgcgttatatcaatgaaaacctaattgttaacacagatgaactgggaagagattgcctgattaatgctgctaagacatccatgtcttccaaaatcattgggataaatggtgatttctttgctaacatggtagtagatgctgtacttgctattaaatacacagacataagaggccagccacgctatccagtcaactctgttaatattttgaaagcccatgggagaagtcaaatggagagtatgctcatcagtggctatgcactcaactgtgtggtgggatcccagggcatgcccaagagaatcgtaaatgcaaaaattgcttgccttgacttcagcctgcaaaaaacaaaaatgaagcttggtgtacaggtggtcattacagaccctgaaaaactggaccaaattagacagagagaatcagatatcaccaaggagagaattcagaagatcctggcaactggtgccaatgttattctaaccactggtggaattgatgatatgtgtctgaagtattttgtggaggctggtgctatggcagttagaagagttttaaaaagggaccttaaacgcattgccaaagcttctggagcaactattctgtcaaccctggccaatgtggaaggttaagaacgttttgaaggtgcaatgtgggaccaggcagaagaagtggtacaggagagaatttgtgatgatgagctgatcttaatcaaaagtactaaggcttcgtacgtctgcatcgatcatctcacgtgtgccaattgattccatgtgtgatgagatggagcgctctttaccatgatgcactttgctgtagtgaagagcagttctggagtcaaaaatctgtggttccccgttgggggtgctgtagaagcagccctttccatatacccttgaaaactatgccaaccagcatggggtctcgggaacagcttgcgattgccagagtttgcaagatcactctctggttattccccaataccactagcagttaatgctgcccaggactccacagatctggttggcaaaaattaaagagccttttccataatgaggcccccgggttaaccccagaaccgtaaaaatcctaaaatggattggtcttgatttgagcaatggtaaaccctcgagacaacaaacaagcaggggtgtttgaacccaacccatagttaaagttaagagtttgaaatttgcaacagaagctgcaatcacccattcttcgaattgatgatcttattaaattacatccgagaaagtaaagatgataaacatggaagttatgaagatgctgttcactctggagcccttaatgattgatctgatgtttcccttttatttataacaatgttaaatgcaattgtcttgtaccttggagtggagtattacacattaaagtaaagtaccaagcttgtaaacttggggtttttgtgatgtaggaaatgggtttccaatcttgtacttttggtcctctgatttcacatattgcaacctagtacttttattagtttaaaaaagaaattgaggttgttcaaagtttaaagcaattcattctctctgaacacacattgtcattctctctgaacacacattgctattcccaatcccaccccccaaatgcacagggctgcaaacaccacgacttctgcccattctctccagtggtgtgtaacagggtcacaaagaattcgacagccagatgctccaagaggggtgggcccaagggcttatagccccctcctttcaatattgaccttctctggggggtaatcccaaaggtctttaactattggcagcagaggacagctgcaaaggcttcattgatttcaaatatggtcaacatcttccaggtggaccaacctgcttttgttaacagcttgctttatgggctgggaattgggtcctatttcccataatgggaaggctccacacccacttggggaccagggggaactatccgtggctaaagggtgtaaggcccacggtttatcaggtttctggactttcttcataagaacgaacagctggaagcaccattcatttattcctgaagcaattggctggggtgactgtttcccgttccatcagtaagaaagtaaggctttagcttggacatggcttcctatgttgctcccatggcgaggaaactcatctgttttaacttcaataagacctcttctaagttgacaccaaaactggtacaatctctttgtcaaaatggccagctttctgtgcattctctgtcctgttctgggacagaactgcaaccttgtcctgatcttctctactcacttgccattttttggctacattttcagctgtaatacccatatgacagttgtgaaatgcatctgtaagaccatcacagagtatactgtcagtcaagtggcatctcacctatctttactcctgttctcaagtaagccaagtgaggagccttgctcatattttccatggcctccggcaaccacaatgctgggagtctccctatccctattgactggaactgcaaaggcacacagcttttaggcctgaccccacagatcatctggcagctcccatgctggaacagagtagagaattcctgcacccacactggcttgtctaacaggattctggccacagcctgctgccaagacatgtccatagatgacctcagacacatcttccggagccacagtggccctcttcaagacttctttgatgacagtggagcccaggtcctggacaggaacagcagctaaggcaccattgaaggaacctgctggtctgagcaaaggtcaaggtgggtgccacaactcgcagcagccgagggctggacaggcgacctccagaacggcctagggacgccgctgtagcccttctatttccccaaatccgaaggactggatgcgaccccatgcttcccaaacaaaaggaaccggcgggtcaagggcgttgaaaaaccatgcggcacgaaggagacgaagtcacgacttctagccattgtgtgacagcccgaccccagcccaaagccgggctcagaccacctagcagttccgcccc

SEQ ID NO: 625 - DNA, 513 bp, Homo sapiens
  SIMILAR (397)..(453): 471254mologous to Homo sapiens phosphate carrier,accession number X77337,Smith-Waterman Score=44.
ccacgcgtccgcaacctttccagggagtggttgtgtgatcgccatcttagggaaaagatgttctcgtccgtggcgcactctggcgcgggcgaaccccttcgacacgccacatcctgcagctggtgcacgatggtctcggggacctccgcagcagctccccagggcccacgggccagccccgccgccctcgcaacctggcagccgccgccgtggaagagcagtatagctgtgactatggatctggcagattctttatcctttgtggacttggaggaattattagctgtggcacaacacatacaagcattggttcctctagatcctggttaaatgcagaatgaaggttggacccccaaaagtacaagggcatatttaacgggattctcagttacacttaaagaggatggtgttcgtggtttggctaaaggatgggctccgactttcctttggctactccatgcagggactcttgcaagttttggccttttatgaagtctttaaagtcttgtataa

SEQ ID NO: 626 - DNA, 1413 bp, Homo sapiens
  SIMILAR (65)..(190): 731254mologous to Bos taurus phosphate carrier protein,accession number X05340,Smith-Waterman Score=163.
tgctctctgtgagccgcaacctttccaagggagtggttgtgtgatcgccatcttagggagaaagatgttctcgtccgtggcgcacctggcgcgggcgaaccccttcaacacgccacatctgcagctggtgcacgatggtctcggggacctccgcagcagctccccagggcccacgggcaagccccgccgcccctcgcaaccatggcagccgcgcccgtggaagagcagtatagctgtgactatggatctggcagattctttatcctttgtggacttggaggaattattagctgtggcacaacacatacagcattggttcctctagatctggttaaaatgcagaatgcaggtggacccccaaaagtacaaagggcatatttaacggattctcagttacacttaaagaggatggtgttccgtggtttggctaaaggatgggctccgactttccttggctactccatgcagggactctgcaagtttggcttttatgaagtctttaaaagtcttgtatagcaatatgcttggagagggagaatacttatctctagcgcacatcactatatttggctgcctctgccagtgactgaattctttgctgacattgccctggctcctatggaagctgctaaggttcgaattcaaacccagcccaggttatgccaacacttgagaggggatcagcttcccaaaatgtattaaggaagaaggccttacaagcattctacaaggggggttgctccctctctggatgagacagataccatacaccatgaattgaagttccccatgccttgaacgtactgtttgaagccactgtacaagtttgtgggttcctaagaccccgacgtgaatgattcaaacgccagagcagactggttgtaaccatttggtagcaggttaccatagctcgagtcttttgtgccaattgtttctcacccctgcctgaattcctggggtaaccggtgttggattaaggaaaaaaggttagccagtgcttcctctgggtccttcaaagagacttgggatttaaaaggtgtaatggaagggactgtttgccccgtatcatccatgattggtacccctgactggcactacagtggtttatatattactcagtaaagggttactttaggacttcctcggccctcctccaccccgagatgcaagagtcttttgaagaagaagcttggggttaactcagtagttaggatcaaagcaaattgtggactgaatctgcttgttgatccagtgtttgaagaaagtgcaaaaggaacttttatatatttgacagtgtaggaaattgtctattcctcgatacaattactgtaggtactcttgcttaaggcaagaagtttcagatttactgttgtaaataaacccgaactcttcatgaaaaaaaaacaacaaaaa

SEQ ID NO: 627 - DNA, 433 bp, Homo sapiens
  SIMILAR (347)..(433): 961254mologous to Homo sapiens cytoplasmic phosphotyrosyl protein phosphatase,accession number M83653,Smith-Waterman Score= 145.
  misc_feature (1)...(433): n = a,t,c or g
actgataccgtctgaggnaccggnccctggattacggtctgcaagcaccggcccgcggtaacaggctaccaagtccgtgctgtttgtgtgtctgggtaagagggcgccgacttactcatgttgtgacgtcctctggagagttggatcgggcttgtgcgctgtaacatttgtcgatcacccattgcagaagcagttttcaggaaacttgtaaccgatcaaaacatctcaaagaattggagggtagacagcgcggcaacttccgggtatgagatagggaacccccctgactaccgagggcagagctgcatgaagaggcacggcattcccatgagccacgttgcccggcagagatttgaatagaaaaagtaatcgagttaaaacctgcaaagctaaaattgaactacttgggagctatgatccacaaaaacaactg

SEQ ID NO: 628 - DNA, 828 bp, Homo sapiens
  SIMILAR (32)..(496): 1001254mologous to Homo sapiens cytoplasmic phosphotyrosyl protein phosphatase,accession number M83654,Smith-Waterman Score= 830.
  misc_feature (1)...(828): n = a,t,c or g
ccagcgtggtggaattcggaagatggcggaacaggctaccaagtccgtgctgtttgtgtgtctgggtaacatttgtcgatcacccattgcagaagcagttttcaggaaacttgtaaccgatcaaaacatctcagagaattgggtcattgacagcggtgctgtttctgactggaacgtgggccggtccccagacccaagagctgtgagctgcctaagaaatcatggcattcacacagcccataaagcaagacagattaccaaagaagattttgccacatttgattatatactatgtatggatgaaagcaatctgagagatttgaatagaaaaagtaatcaagttaaaacctgcaaagctaaaattgaactacttgggagctatgatccacaaaaacaacttattattgaagatccctattatgggaatgactctgactttgagacggtgtaccagcagtgtgtcaggtgctgcagagcgttcttggagaaggcccacttaggcaggttcgtgccctgctgcggccagcctgactagaccccaccctgaggtcctgcatttctcagtcggtgtgtaatcacgttccagggcccaaagcccagctctttgttcagttgacttactgtttcttaccttaaaaagtaattgtagatggaaatcagttgtgtttggcaggagaatcaataaaaatctttgattctgaannnnnnnnnnnnnnnnnnnnnnnnnnnnnnnnnnnnnnnnnnnnnnnnnnnnnnnnnnnnnnaannannnnnnggaaaaanaanannnnntttattttnaaaaataaaaataatttaggggggggg

SEQ ID NO: 629 - DNA, 2722 bp, Homo sapiens
  SIMILAR (957)..(1295): 461254mologous to Homo sapiens cytoplasmic phosphotyrosyl protein phosphatase,accession number M83654,Smith-Waterman Score= 186.
aggacttcggaaccgccccgtcctcaagatcgaaaagcccagagccgcgcgctcaagcacggtgttgggggtggggtctcaggagcgcccagcaaggcgcccctgtcggcgtggacccgcgggctcaaaggcagttccccggtgacccgcccagcccctctatgcgaactcgaacgacagcaccacagcccgccagcgtcgagactcgcgctgtgccccaacccaggtgggcgccgcggagccgcgagcctgagcccgccctgcaggtgacccgcggcccttcctcctccaggtaccccttctcctgcggccccgtcccctataggtaacctttacctcccgcggctccttcccctccaagcgacccgcagcgcccgggccctccaggtgactgcgcccccgccaacccccgccccaccacacacacacaccccctcgccttcttccgccctactccctccaggtgaccccacccccgcagctcctcctcctccggacaacctgcagccccgcccctgcaggtgaacggcggcccagtccctgcaggtgacccgcggaccctccccgcccgtcctactaccgtcataggacgcctccgcaggcgcactggagccgattgcgcaggagccgattgcgcaggcgtggctctcacacgcgctgccctgttggcgttggtgcgggactgcgcaggcgcgcgggggcaagactggcagtgcgcctgcgcgcgtcggcgtgcggaacgccgcggtgtctcggcgcctctgcgcgcgggaagatggcggaacaggctaccaagtccgtgctgtttgtgtgtctgggtaacatttgtcgatcacccattgcagaagcagttttcaggaaacttgtaaccgatcaaaacatctcaaagaattggagggtagacagcgcggcaacttccggtgggtcattgacagcggtgctgtttctgactggaacgtgggccggtccccagacccaagagctgtggagctgcctaagaaatcatggcattcacacagcccataaagcaagacagattacccaaggaggtttttcccacatttgattatatactatgtatggatgaaagcaatcttgagagatttgaatagaaaaagtaatccgagttaaaacctgcaaaagctaaaaatttgaactaccctgggagctatgatccccacaaaaacaacttattattgaagatctcctattatggggaatgactctggactttggagacggtgtaccaacaggtgtgtcagggtgctgcagagcgtttcttggagaaggcccactgaggcaggtttcgtgccctgctgctgccagtcctgaattgaccccaccctgaggtcctgcatttctcagtcggtggtgtaatcacgtttccagggcccaaagtctcagctctttgttcagttgacttactgtttcttaccttaaaaaagtaattgtagatggaaatccagttgtgtttggcaggagaatcaataaaaatcctttgattccagaccagccttatgggggtatttttaagcattcttagactagttgaacatctcactttgccccagttacaaaaatagtagaacaagcaacataaaacaatgaaggaaaacctcacttgaaggcccaggtcaacatctaagcctgttgagacttagataatcgagtctacctcttcaagtaggtttgtgtggatggcctggagggcaggtgccctctggctccccagtgctacctctctcttccctaggggccttttggggaattgacaatagtccccccccgtagggagccccacagtctaggattaggaagtgtttttaattttcttacacacccataagtgcacacttgttttatttgaaaaagataggggaaggagaggaaacatttatgggaatccagtccgttgggcacccttccaataccttccatgattttttgttcgagtttacttccatggaggaggtccagccccattggctccccatctgaacccactttgccctctgaaaccttaattaccatcccagaaagaaggacacttgtatgctaagtctaatggtcagttgagggatatgactggtttttatatgccacatgtaaccccaaatgtcccaatataaattgggcttatttttttaaaataattttaaaagttgggggaaaagtgttattatttgggcctgcttaaatattggaataagtattcttcatcagcatttaataaatgtataggcagatgtaaggtaatttctgtgtattttgagataatgtcaaaatcatgaatatttcaaaataaactggggagttataaaaatacaactagagatataaatctggtgtctgcctgtttttttattgacaggtaaggaagcatttgaaaacattgtattgtcctttttacatgatctgtgatgttaggtgtgcatattttatcttcaggataaggaagtaaaatgatgaaaataagcacattgctgccccatgtcatcatgtctagtttctgaaggaagtttgaggttctacagctggaactgtccttgcccagtaccatcctctggacatgttgcctctacgctgtgccctcctgtgcagtgatgcacagctgcctggccaggacatctgcactcctgacctcagtatcatgagggtcccaggcagtgccatggggaggagacacgtttgatccttgactccctagtatctggaggataag

SEQ ID NO: 630 - DNA, 1239 bp, Homo sapiens
  SIMILAR (93)..(4): 501254mologous to Mus musculus putative,accession number AK018586,Smith-Waterman Score=76.
atggaaagggcagagtttgtcttcactggaatagacgcttactccagatacgggtttgcctatcctgcatgcaatgcttctgccaagactacctctgtggactcatggaatgccttatccactgtcatggtattccacacagcattgcctctgaccaaggcactcaccttacggctaaagaaactagtgaccgtgtccttggttgattccacagtggttttatggctctggcagctgcaaacacaactcaaggtggccaaagacagagctttctccccttgtccctccgtcggggaggaaaaccctccctatgagtccctgcagatttcccctgatgtcccattgaggaggacaaggtcacgttgtcaggttcacaactataccaaatgccctgcttggggtcaggttccagcccatgctgaggttcgaggggagtgggcagatgggcagttacctcagcctatccttgaccaaagcacacccatgatcctgacacgcgtgctctggccttacagcaagggaggcaagaaagtgagtctgccattgtcagcccctggggagaaaggagggccctgccggcagggcagcaagtcgggagcagctgtgggtggtgtcctacaggctctgctgtggaggaagagctgctgccctgagtggaggcaaggatggatgtgggtggacaatcagctcattggtaccacgcagcccttcatgctctatgtgactcccctgagcaatgagaatgaggtcatcgagaccggcccagctgtgcaagtcaacgcagtgaagttccccagtaagagtgcactgaccaacatctacaagcatctgatgatcacagctcagagattcacagtgcaaattgaggagaaactgctcctcaagctgctaagtttctttggctacgatcaagcagaatcagaggtggaaaaatatgatgaaaacctccatgaaaagacagctgagcaaggtggaacaccaattcgatactactttgaaaatctcaaaatcagcattcctcagatcaagctaagtgtgttcacctccaacaagctcccattggatcttaaggaactcctcagccaggcagctcgaatcctgggatcagtggattttcttggcaatcctatggggcttttgaatgatgtttctgaaggggttactggactgataaaatatggaaatgtcgggggcctcatcagaaatgttacacacggagtatcaaactctgctgccaag

SEQ ID NO: 631 - DNA, 408 bp, Homo sapiens
  SIMILAR (395)..(180): 1001254mologous to Homo sapiens TAXREB107,accession number D17554,Smith-Waterman Score=370.
  misc_feature (1)...(408): n = a,t,c or g
caaaaataaaggtccttctcaaaaatccccaggtaggttataatacgcctccctataaggaaaaaactattaccttgccagcccgcgtaaactttggcccccccaaggatcctttaaaacggcccccccnnnnnnnnnnnnnngtagtcagctatttaattaggttcttaagacatttagaacaccaatttgtgaggataaattccattcgtcagagcaaacacagatcgcaggtagccctggagctgaggaatagctttgatttttggtaaaatttgtgagtccacagctttctgatcaatcttgcgctgctccgtaatctcatatttctctttttctgtgtcgaagatctcaccttcctggtgtctgggcttccgcagcttcttcttcttgaagcggacgcgtggg

SEQ ID NO: 632 - DNA, 422 bp, Homo sapiens
  misc_feature (1)...(422): n = a,t,c or g
cccacgcgtccggatttgtttacaaatgtgcaaattatttagagcatagactttataagcattaaaaaaaactaatggaggtaaaacctaaatgcgatgtgaaataattttagtgttgataccgtatgtgtatttttattctaataaacttttgtgttccagattgnnnnnnnnnnnnnnngggggggccgttttaaagaatccttgggggggccaaagtttacccgggcttgcaaggtaatagttttttccttatagggagccgtattataacctacttgggaatttttgnnnnnnnnnnnnnnnnnnnnnnnnnnnnnnnnnnnnnnnnnnnnnnnnnnnnnnnnnnnnnnnnnnnnnnnnnnnnnnnnnnnnnnnnnnnnnnnnnnnnnnnnnnnnctgcatatgctggctgtttgaaa

SEQ ID NO: 633 - DNA, 492 bp, Homo sapiens
  misc_feature (1)...(492): n = a,t,c or g
attgatcgcctgcggnaccgattgataaccntcgggacgacccacgcgtccggccccctccaaatagccatacttagcctcagcaggagcctggcctgtaacttataaagtgcacctcgcccccgcaagccccagccccgaggaccgtccatggaccttatttttatatgagattaataaagatgtttgcnnnnnnnnnnnnnnnnnngggggggccgttttaaagaatccttgggggggccaaagtttacgcgggctggcaaggtaatagttttttccttatagggggccgatttaaaacctacttgggaatnnnnnnnnnnnnnnnnnnnnnnnnnnnnnnnnnnnnnnnnnnnnnnnnnnnnnnnnnnnnnnnnnnnnnnnnnnnnnnnnnnnnnnnnnnnnnnnnnaaagggggaaacctaactggattagcttgctggttggaagttttgctttactgggttgattttttgaaattttttcccccgg

SEQ ID NO: 634 - DNA, 1106 bp, Homo sapiens
  SIMILAR (351)..(470): 771254mologous to Mus musculus putative,accession number AK002387,Smith-Waterman Score=162.
tgagccgagtggccccacagagccggcgcgctcccgcctgcagggggagagcagacggggcgcggggaccggccaggccgcggcgggtgctgtttctgtttcactttccttcactctgaggccggcgcgctggcgggcgaggagcggcggcggtggcggccgctggacatgggaaagcggaaccaccaaaaggagtgatgatcaacgatctcatgataaatctggatgctagttctcatgcctcaggacatcctactgggaacgacacaccagctccttgggatcagactttcatctacttaggacccctctttgcccagactactaaagccagtcttcactagccacgaatggctacccagaggaaacacttggtgatagattttaatgcttacattacctgctatatctgtaaagggtatctgatcaagccaacaacagtgacgggaatgcctccatacatctgcagaatcctactggatggtccacttgggatgtcctggaagccacctggaactcagcatatctacggaatgattcaaatggggatgccaagcacttcagttatccaagcaagaaatatgctccatgcttgactctttaccctcactaacaaaactgggcaaagtcctggctggtctctctccttaatacttctcaaatctgtccctttagtttcatccctctggttactgttctcattcagattcttattacatctccaccaaagccactgcaggcacattcttaactgggtccaagtggtaataattaaaaacagcttactgtgctttatgcattatcactctttaacccaccctaaaatttcctaaaggtatcccgttggacctgcaggatacattaaagctacttagtggtgactggtttctgcctaccacttcctcccctaccacctaacactcacacatacaaatacttggttcaactgtttgctctccttgaaatgaatgcctcctctgtggcccagctagcagttacccatcctttaaaactcatcccctctaagatgtgccctaccacctgcagactttgggttaagtgtctcaataaaatcttaaatgaataaatagaatggctaataagtt

SEQ ID NO: 635 - DNA, 1286 bp, Homo sapiens
  SIMILAR (828)..(1025): 1001254mologous to Homo sapiens dJ888M10.1 (KIAA0453),accession number AL031296,Smith-Waterman Score=322.
gatgtttttcctttgtgtttgtaaggcattcttctaggcactgcagagaatatgaaacattaattactgctgacttcccaccagaagcctcttatttgatgtcactgtgtagctggtcagtgaccactatggtagcattcttggcacaaagcaggccctcaggaagtgctggtgcccaccgtcattctcgtgttaggtctagcacagcactggggcacagcaagcgcttagcagatactgacctggctctcatgaagccagcatggacgccagcttttcagcattgtatgcagcaccccaaccagccttgtgaagaaaagagatatgaacaaatggtcacacaacagtcggatacccacactcagaaagccacgtgcagaggcagcacatgctgggcactagggcagccgcagctcctagttagccacgtgatcatgaagagggaacaaatactctacagtgggccctgctgccagatgacttcgcccagctgtcagctaatattgtcttgtgacaaaacagagttttatgtcctttttatcccagctttgatggatgagacagcttttctggttaaatttgctggaacattatcagatggcttagggaagacgatggacaatcggcatcagtcagagcgggagtacatcaggtaccatgcagccacaagtggtgaacaccttgtagccggcatccatggcctggctcatggtaagtcatgggtgacatcaggctctgctgctgctggtcctcagaggcgcctttgtatcaatctgattgcagctataaaaaaagaaaggttacaacagcccttgtctttttcactaggtatcattggtggactgaccagtgttataacttcgacagtggaaggtgtgaaaacagaagggggtgtcagcggtttcatatctggccttggaaaagggcttgttggcactgtaaccaagccagtggcaggcgccctggattttgcatcagaaacagcccaggcggtgagagacacagccacactcagcggccccagattaaaatacttccaagttcctctccttgttggagtgcgctggcattccaagcgacagccacctaactttcctctgaaatttccaggcaacccaatagttctcaggaaggcagatgaggcactaaaaagccaattgggagctcttggtttgaggctgagggggccttactgtggaatgatcaagtggggacctgctgactctgggctcctgttgagaggagcaaaactgaatggggatgagagaggggacctgaagctctaa

SEQ ID NO: 636 - DNA, 6994 bp, Homo sapiens
  SIMILAR (2934)..(3458): 791254mologous to Homo sapiens dJ888M10.1 (KIAA0453),accession number AL031296,Smith-Waterman Score=668.
  misc_feature (1)...(6994): n = a,t,c or g
gacagcctgggcataccatatatctcctgccaactgtggtaatctgcaacttgctaccctgtgaacttgatttttatgttaaaggaatgccaattaatgggacgctgaaacctggcaaggaggcagctctccatacagctgatacatcccagaacattgagctgggggtatcactggagaatttccccctctgtaaagaattgctcattccacctggaacccaaaactatatggtgagaatgcgactctatgacgtcaaccgtcggcagctgaacctcaccatccggattgtgtgtcgagcagaaggatccttaaagatcttcatttctgctccatattggctgattaacaaaacagggttgccactgatcttcagacaggacaatgccaagacagatgctgcaggccagtttgaggagcatgagctggcccgtagcctgagtcctctcttattctgctatgctgacaaagagcagccaaacctctgcacgatgagaatcggaagggggattcatccagaaggcatgccgggctggtgtcagggcttctccctggatggtggtagtggtgtccgagctttgaaagtcatccagcaaggaaaccgcccagggctgatctataacattggtattgatgtcaagaaaggccgaggtcgatacattgatacctgcatggtcatctttgccccccgttacctgttagataataaatcatctcacaagcttgcatttgcacagagggaatttgccaggggacagggaacagccaatcccgaaggttacatttccacccttcctggttccagtgtggtgttccactggcctcggaatgactatgatcagctattgtgtgtcagactgatggacgttcccaattgtatttggtctggaggctttgaagtcaacaagaataattccttccatatcaacatgagggattctcttgggaaaatgcttcttcctacgagtggaaattactctccgaggagctacgtataggatctcatttagtgacacagatcagttacctcctcctttccgaattgacaacttttctaaagtcccggttgtctttactcagcatggcgtagctgaacccaggctccggactgaagtgaagcccatgacttcattggattatgcctgggacgaacccaccttgccaccttttatcactctgactgttaaaggggcagggtcctctgagatcaactgcaacatgaatgatttccaggataatcggcagctttattatgaaaatttcatttacattgctgctacatatacattctctggcttgcaggagggaacaggcaggcctgtggcttccaacaaggccattacctgtgcggagctcgttttggatgtctcacccaagacacaaagagtcattttaaaaaagaaggaaccaggaaagcgttctcagctgtggaggatgacaggaacaggaatgctggcccatgagggctcctcagttcctcacaatcccaataagccctcagccgcccgctccaccgaggggtctgccatcttagatattgctggtctcgctgcagtgactgacaacagatacgagccactgatgctgagaaagcctgaccgcaggcgaagcacaactcagacgtggagtttccgagaaggaaaactgacctgtgggttacatgggttggtcgtccaggccaaaggaggactttctggtttgtttgatggagctgaagttgttcttggtcctgacacttccatggagcttttggggccagttccacctgaacaacaatttattaatcaaaaaatgagacctggttctggaatgttatccatcagagtcatcccagatggaccaactagagcactccagataacagatttctgccaccggaaaagcagccgttcatatgaagtggatgaacttcctgtcaccgaacaagagctgcagaaattaaagaatccagatacagagcaggaattggaagtgcttgtgaggttagaaggtggaattgggttgtccttaattaataaagtcccagaagaactggtctttgcaagtcttacaggaatcaatgtgcactatacacagctggcaaccagtcacatgcttgaactcagcatacaggatgtacaggtggacaatcagctcattggtaccacgcagcccttcatgctctatgtgactcccctgagcaatgagaatgaggtcatcgagaccggcccagctgtgcaagtcaacgcagtgaagttccccagtaagagtgcactgaccaacatctacaagcatctgatgatcacagctcagagattcacagtgcaaattgaggagaaactgctcctcaagctgctaagtttctttggctacgatcaagcagaatcagaggtggaaaaatatgatgaaaacctccatgaaaagacagctgaccaaggtggaacaccaattcgatactactttgaaaatctcaaaatcagcattcctcagatcaagctaagtgtgttcacctccaacaagctcccattggatcttaaggccctaaaaagcaccttggggtttcctttgatacggtttgaagacgctgtgattaatctagatccattcactcgggtacatccctatgagaccaaggagttcatcatcaatgatatcctcaaacatttccaggaggaactcctcagccaggcagctcgaatcctgggatcagtggattttcttggcaatcctatggggcttttgaatgatgtttctgaaggggttactggactgataaaatatggaaatgtcgggggcctcatcagaaatgttacacacggagtatcaaactctgctgccaagtttgctggaacattatcagatggcttagggaagacgatggacaatcggcatcagtcagagcgggagtacatcaggtaccatgcagccacaagtggtgaacaccttgtagccggcatccatgggcctgggctcatgggtatcattgggtgggcttgaccagtgttataacttcgaccagtggaagggtgtgaaaacagaaagggggtgtcagcggtttcatatctggccttggaaaagggcttgttggcactgtaaccaagccagtggcaggcgccctggattttgcatcagaaacagcccaggcggtgagagacacagccacactcagcggccccaggactcaagcacagagggttcggaaaccgcgttgctgcacggggccccaggggctgcttccccgatattctgagagccaggcggaaggacaggagcagctcttcaaactcacagacaacatacaggacgaattcttcatcgctgtggagaacattgacagctactgcgtggcttcatctcctccaaagctgtttacttcctgaaaagtgggagactacgtgggatcgagaagccattttcctaggaagttcaaatacgatgacctctaccactgccttgtctccaaagaccatgggaaggtgtatgtgcaggtgaccaagaaagccgtgagcacgagcagtggagtgtccatccccggcccctcccaccagaagcccatggtccatgtgaaatctgaggtccttgctgtcaagttgtcacaagaaataaactacgcaaagagcctctactatgaaccagcagcttatgttaagactcagcgaaaaccgagagccgctggagctggactcctgaagccccgctgctgagatgggcgctcccgacacagcgcagacccaccaggaggaaagaaggcccagctctcagctgacgatggaggcagaaccggagtcgggtttggggaagttgtcaaggaatgagggaaagtaaatcctcatgaggaaaaagtacaaatggaaatcgtattaatttgtgaggcagggagttattttagattatgggaaataatttttaaaggtattggttaaataacgtttaaaaacatgtactgagatgaatctaatttttagattgccctgtattttgttaacatgtatatatgtacaacagtgtgtttgtaaatatataggaacgtttctgaacagggtctgtgctatgtgtaaaggtttgttaactgtaaagtaatataaagttatattggatcttctattgcactaattctagatgtctaattcaggatactgtctatagaaaggcattcttaaaagttaaagaatagctacgtcttatttttggagactatagtaatcacagtaaagcggcttgtagtgagggctgcggccctgacagggacacctttgacatcgaggatgttcacttgttctgccagctgtgcttcccaggactggcgctggcccttcagaaggatctaggagagggggcttgggagcccacttttaatttctcacccccattttacaaagagtgcttagattcttacaaattatgatgtaagttatccatttggctttttcctaactagtcttaccaaacttagggggaaacctgtgctccattaccacatgggtgcaagtcagcattgtaagttttctcaggttattattattagagaggttggaaacattggtaaactctgttgattgagaaggaaaaaaaaaagtccccattgaactgttgcaacaaattcagaaatccaccataaaagtgctctccctgcctgggcagcaacaacccaagaacaaagccccgggactgttttctttttaataataccacaggcagggcatcgtagctccacagcccgaggggacacaggatgggaaaccccagggntgagaagggagcaggggagagttcccagaaagggggatgaaatagggagtttttaaaaagcctgccgttggtaagtttttcatggaaccaagatttgacaaaggcatctcttatccttggttttaaattcctgctgggagcaaggcctggtatgagcgccctgggtcttgtttttggtgtttcgcttttctgtaaggattaagcagatagggagaagggaaaaggggcctcactttagaatgaatgagtcaccttgtgatttttaaatttttattttaataaagctaatcaatttctacaaccttgtcacatgtagctgagtctgggatgactcagtggatcagtggatgcgtggaaggttttggtgtttataactcatgacccaaatccttccaagacacaaatgaagctaatcttcttcccctccctttcctctcccacttcccctctgtgtctgtgtctgtgtgtgtgtgtgtgtgtgtgtgtgtgcgcgcgcgcgcgtgcatgcagagaggaaggaagggagctttagcacaagtagctacatagtgttcaaggatcagctttcttgaactccgaggcttggttgcctttgctgaactccaagttagtggattgcagaatggaaacttggcttttgcggcactgggtgagttttagtttgtgtgtgtcttgctggggggtggtgatgattgtctcagcactcacgcactgcacaagatggcagcaggatacagcactgcacaagatggcagctcctctgcagcttcctcctcagcctccctcgcttgcacccccacaggtttggcttgtggtttttgtcatcagtaacctactgcctgagatcatgatctcttaaaagatgagactctcggaagggttgattgtatgcgtcagtgagccttctatcaccttctggaacaaagtcacttgaaatctcttgatgagattaaggagtttagtgttactaagaccatctgctttgggccgcagcagtgctgggtgttctcagacctgactgaggaagttagctgcgggctgccctgtgggctggtgcttcaggaggaatccagagaagtgttcagatgccccccttgggctcctttctaattttaatcagctctttaaatagctgcccatctcctgtgattgcacaaccaagcactttgacatttgcaccttaggagaggcagatgttaaaatggaatccaaagaccacctagggcggggctgggtgggagatgggagggccaactgcgagctgctccacttctcagctctcccctgccctgcagccctgggccagacaaggccagaaggtttcaggggcatttgacatcccctcctggttctcaccaggaaaacatccaaagctttggaggaaacaggccctgcccctggctccttaaatgccccgtctctttgtaaactgatattcagccagcaatgcctaagactttgttaagatcatttctactgcttttctttctgcttcaaacacacagttcgtctctgaggaaagtaaaataaatggaataagagtaaatttgggtaaggagatatccaaaagctacccaagtcccttgaccccagcacaagttggccgacccgtgtcaactcccctgggctgtcgctgcttctctgtgctcacttgaagggtgaagccaggccagtgcttcccccaggccctgggcgctggtcactacacagtggaaaacagacaagcggccccttccccaaatcccaaaagtgttcttgctgcttggtgggtgctcatcgcaatgttctgaagggtggcagggccactttgtttgtaggtatgatctgggcctcaaaataccatagtagctgcttgataaaattctaaaaatatctggttctctattatgtaaacacttattacagtcaccaagtgtgtgaagactcttgagtctggttctcatatcagagtcatcatttttcttcctgtggagataaaatgccttaatggacttcccacnnnnnnnnnnnnnnnnnngggggggcgcttttaaggttcccttgggggggccaaactttacgcgggcttggcaaggaaatagttttttccttatggggggcggaattaaaacctacttgggaatttttggaaagaacctttctttttggggggggacttattgggccaaccttccctacaaaatttaaaggctttagggnnnnnnnnnnnttttaaggggaaaagggggtaaaacaacctccaaatccttgctgttgaaaaagtggg

SEQ ID NO: 637 - DNA, 820 bp, Homo sapiens
  SIMILAR (720)..(439): 571254mologous to Danio rerio 17-beta-hydroxysteroid dehydrogenase type 4,accession number AF241285,Smith-Waterman Score =273.
  misc_feature (1)...(820): n = a,t,c or g
tttttttttaaaggtatcaaaggcctttattgatttaattttcctttcaacttatcaatgctatcacaaattctaaggaaacaggacttgggcaaaatttttttattatgaagatacagatctaagaacagaaggataattatgtgctagcttatatatagttccttgtaaaaataatgatacatgaaaaattagtagaaaatgaaaatctgcagttatctgatatctgaaaatgttaagcaatttcccctgcatcttagttctaatcacttttgcagaataatcaagcatatttgggtgaagagagtatttaatgattccatttttattaatagtgtagtgtgcccttcagagcttggcgtagtctttaagaatcatctgaagtttctggctcagcatgatgttccctctggccttcagcctgccactaaagaatgccttccacatctcagtttgtagagtttgtcctggatatactggttttgcaaaacgagccttaactgccttgaatcttgacacatcattatctgcaaactgctgtaacacaccgcctgcagaanatccaaatgtacataatccatgttatatgggcttgtcaaaacctgctagactnagcaagttaggatcaatgtgtaagggatccagtcntcactgaggcngtacaaagcancctgattaagagaggtgtatctgtagtacagcatcaggaggtctattaggtatgctacagctactttgactttgtctgatgtccgtttccaccaaagcctncaagagcaaccagaaagaagagagactgattggtgcatataagtcctct

SEQ ID NO: 638 - DNA, 933 bp, Homo sapiens
  SIMILAR (454)..(591): 931254mologous to Homo sapiens Human host cell protein NS1I- 1,accession number AAW16329,Smith-Waterman Score=232.
atggcgatggatgcgctggcatacacacagatgtttttgttgttgatgaatggcggggactgggttattgcgctggcaaatctcaacacgctgattaaccactcattacagctggtaagtcaggatgcaaacagccgggagatccagttacgctttaccgccaacgacacattaccggaaattcaggccgacccggacaggctgactcagtggggagtagtggagggacagataatcaagaaatacatatgtaaaaatataataggtgtaggtgctgtggagaaaaaaatgagtgaatggaacagaaaatgctttaaggagagactgcaggaagtgaaggagtgcgccttgaggagatctgctgtcgcggcatccctggcagaagaagcagctgaagccaggttactgaggctgcagcaggcatgtacctccctgagtcaatttccaaacagcattgcaggggtacgctgggagcggactcttggagctattgtaagacaaaagaatcacccaatgactcctgaggcagtcaaggctaactggaagaagatctgtgactttgagaatgccagcaagcctcagagtatccaagtctattcttattctgagaaggaacttatatgccacaatcagttctctctctttcttgttggctctggaggctttggtggaaaacggacatcagacaaagtcaaggatcacaggtcctcaccagcaatagaacaaagctggacaaagaatgactttgacaagctgacagaagtaggcttcagaaggttggtaataacaaacttctctgagctaaaggagcatgttcgaacctatcgcaaggaagctaaaaaccttgaaaaaaggttagacgaatggctaactagaataaacagtgtagagaagaccttaaatgacctgatggagccgaaaaccatggcatga

SEQ ID NO: 639 - DNA, 455 bp, Homo sapiens
tcccgcgtcgacgatttcgtgtcgttgcaggccttattcatgggctcaccgctgaggttcgacgggcgggtggtactggtcaccggcgcggtggcaggtgagcatgcgaaggttggaggccgcgccccttgctgaggcgcagctggctgctcttttcgggccggcatacgcgcgcagccgcagctgaggtcaccccgctgaggtggtggggaggggaatggttattcttgaggcaccgcatctcttgaggaggaaagagccggaaacacctggcctctcaagcaggtacagcccgcttctccccagcaccccggtgtgggcttcccaaggtcctgcctgagaggagaggccaggctgggctgctgattgcaaaactgggtgaaagttctccctgacccttatctgtgggcatcgattgttactcttcctgcaattaactctcttagatctttgcc

SEQ ID NO: 640 - DNA, 2741 bp, Homo sapiens
  SIMILAR (1668)..(2360): 371254mologous to Homo sapiens 17beta-hydroxysteroid dehydrogenase,accession number X87176,Smith-Waterman Score=169.
cccacgcgtccgtctgtcccgcagttggcgtccagcggctctgcttgttcccgtgtgtgtcattgcaggccttattcatgggctcaccgctgaggttcgacgggcggtttttttctggtcaccggcgcgggggcaggattgggccgagcctatgccctggcttttgcagaaagaggagcgttagttgttgtgaatgatttgggaggggacttcaaaggagttggtaaaggctccttagctgctgataaggttgttgaagaaataagaaggagaggtggaaaagcagtggccaactatgattcagtggaagaaggagataaggttgtgaagacagccctggatgcttttggaagaatagatgttgtggtcaacaatgctggaattctgagggaatcaattcctttgctaggataagtgatgaagactgggatataatccacagagttcatattgcggggttcattccaagtgacaccagcagcatgggaacacatgaagaaacagaagtatggaaggagtattatgacttcatcagcttcaggaatatatggcaactttggccaggccaattatagtgctgcaaagttgggtcttctgggccttgcaaattctcttgcaattgaaggcaggaaaagcaacattcattggaacaccattgctcctaatgcgggatcacggatgactcaaacagttatgcctgaagatcttgtggaagccctgaagccaaagtatgtggcacctcttgtcctttggctttgtcaccagagttgtgaggagaatggtggcttgtttgaggttggagcaggaaggattggaaaattacgctgggagcggactcttggagctattgtaagacaaaagaatcacccaatgactcctgaggcagtcaaggctaactggaagaagatctgtgactttgagaatgccagcaagcctcagagtatccaagaatcaactggcagtataattgaagttctgagtaaaacagattcagaaggaggagtttcagcaaattatactagtcgtgcaacgtctacagcaacatcaggatttgctggagctattggccagaaactccctccattttcttatgcttatacggaactggaagctattatgtatgcccttggagtgggagcgtcaatcaaggatccaaaagatttgaaatttatttatgaaggaagttctgatttctcctgtttgcccaccttcggagttatcataggtcagaaatctatgatgggtggaggattagcagaaattcctggactttcaatcaactttgcaaaggttcttcatggagagcagtacttagagttatataaaccacttcccagagcaggaaaattaaaatgtgaagcagttgttgctgatgtcctagataaaggatccggtgtagtgattattatggatgtctattcttattctgagaaggaacttatatgccacaatcagttctctctctttcttgttggctctggaggctttggtggaaaacggacatcagacaaagtcaaggtagctgtagccatacctaatagacctcctgatgctgtacttacagataccacctctcttaatcaggctgctttgtaccgcctcagtggagactggaatcccttacacattgatcctaactttgctagtctagcaggttttgacaaagcccatattacatgggattatgtacatttgggattttctgccagggcgtgttgttacagcagttttgcagataaatggatgttgttcaaggtttcaagggcaattaaagggctcgttttggcaaaaccagtatatccgggggcaaacttctaccaaacctgagaatgttggaaggaacggaaaccggaattcatttttcaaacccaaggtccaaggaaacttggagacattggtcatttccaaatggcatatgtgggatcttggcacccaacattctgggtacttcagcttaaggacaccctctgaggggccgggaagcttcagagtacctttggtatttgaggaaaataggacgccgcctaaaggatattggggcctgaggtggtgaaagaaagtaaatgctgtatttggagtggcatattaccaaaggcggaaatatttggggctaagtggactattgacctgaaaaagtggttcctgggaaaagttgtaccaagggccttccaaaaaggtgctgctgataccaccattcattactttcagatgaagattttcatgggaggtggtcctggggcaagcttgaccctccaggaaggcattctttagtgggccaggctgaaggccccaggggggaacatccatggcttgagcccaggaaactttcagatggattccttaaagactacgccaagcttctgaagggcacacctacactattaataaaaatggaatccattaaaatacctcctcctcacccccaaatatgccttgattattctgccaaaagttgattaagaactaaagatgcaggggaaattgcttaacattttcgagatatcagaaaactgccgaatttccattttccactaatttttcatggtatcattatttttacaaagggaactatatataagctagcacataattatccttctgttcttagatctgtatcttcataataaaaaaattttgcccaagtcctgtttccttagaatttgtgatagcattgataagtatgaaaggaaaattaaatcaataaaggcctaatgatacctttaaaaaaaaaaaaaaaaaaa

SEQ ID NO: 641 - DNA, 414 bp, Homo sapiens
  SIMILAR (255)..(311): 891254mologous to Homo sapiens apolipoprotein H,accession number M62839,Smith-Waterman Score=91.
acaacatgcgatgtttggaaatgatacaattacctgcacgacacatggaaattggactaaattaccagaatgcagggaagtaaaatgcccattcccatcaagaccagacaatggatttgtgaactatcctgcaaaaccaacactttattacaaggataaagccacatttggctgccatgatggatattctctggatggcccggaagaaatagaatgtaccaaactgggaaactggtctgccatgccaagttgtaaagaacacgagttctctggctttttggaaaactgatgcatccgatgtaaagccatgctaaggtggttttcagattccacataaaatgtcacacttgtttcttgttcatccaaggaacctaattgaaatttaaaaataaagctactgaatttattgccgca

SEQ ID NO: 642 - DNA, 397 bp, Homo sapiens
  SIMILAR (28)..(393): 991254mologous to Homo sapiens apolipoprotein H,accession number M62839,Smith-Waterman Score=688.
  misc_feature (1)...(397): n = a,t,c or g
cccacgcgtccgcggacgcgtggggtttgtttgccatttcatgcgatgtttggaaatgatacaattacctgcacgacacatggaaattggactaaattaccagaatgcagggaagtaaaatgcccattcccatcaagaccagacaatggatttgtgaactatcctgcaaaaccaacactttattacaaggataaagccacatttggctgccatgatggatattctctggatggcccggaagaaatagaatgtaccaaactgggaaactggtctgccatgccaagttgtaaagcatcttgtaaagtacctgtgaaaaaagccactgtggtgtaccaaggagagagagtaaagattcaggaaaaatttaagaatggaatgctacatggtgataaaagtn

SEQ ID NO: 643 - DNA, 410 bp, Homo sapiens
  SIMILAR (185)..(370): 581254mologous to Mus musculus putative,accession number AK010926,Smith-Waterman Score=161.
tccacaatgatttctccagtgctcatcttgttctcgagttttctctgccatgttgctattgcaggacggacctgtcccaagccagatgatttaccattttccacagtggtcccgttaaaaacattctatgagccaggagaagagattacgtattcctgcaagccgggctatgtgtcccgaggagggatggagaaagtttatctgccctctcacaggactgtggcccatcaacactctgaaatgtacacccagagtatgtccttttgctgggaatcttaggaaaatgggagccgtacggcttattacggactttttgaattattccccaacacggttcagtttttctttgttaacatggggttttattctggaatgggcgctggattctggccaagtgcattgagggaggg

SEQ ID NO: 644 - DNA, 1330 bp, Homo sapiens
  SIMILAR (831)..(1211): 521254mologous to Homo sapiens apolipoprotein H,accession number M62839,Smith-Waterman Score=220.
agaaaaccactttggtagtgccagtgtgactcatccacaatgattttctccaggtgctcatctttgttctcgagttttctctgccatgttgctattgcaggacggacctgtcccaagccagatgatttaccattttccacagtggtcccgttaaaaacattctatgagccagggagaagagattacgtattcctgcaagccgggctatgtgtcccgaggagggattgaggaaagtttatcttgccctcttcacagggactgtgggcccattcaacacttctggaaatgttacacccagagtatgtcctttttgctgggatttttaggaaaatgggaggccgtacgcttattacgactttttagaattatcccaacacggatccagttttttctttgttaacactggggttttgattctggaatggggcgctggatttctggccaagttgcactggagggaagggaaaatgggagcccgggagcttcctggtctggtggctcccatcatctggccctccaaccatccatacctacggttttgcaacacttcatgttttattaaggccattcaggttgggaaacaattcccctcctatcggggacacagcagtttttgaatgtttggcccacaacatggcgatgtttgggaaatgatacaattaccctgcacgacacatgggaaattggacctaaattacccagaatgcaggggaagtaaaatgcccccattcccccatcaagacccagacaatgggatttggtgaacctacccctgccaaaaccccaacactttatttacaagggttaaagccccacatttgggcctgccccatgatgggatattctctgggatgggcccccggaaggaaataggaatgttaaccccaaacttgggggaaacctgggtcctggcccctggccccaagttggtaaaagccatccttggtaaaaggtacccctgtgaaaaaaaggcccactgtggtgtaccccaaggagagagagtaaaggattccagggaaaaatttaaggaatgggaatgcctacatgggtgataaaagtttctttccttctgcaaaaataaggaaaagaagtgtagctatacagaggatgctcagtgtatagatggcactatcgaagtccccaaatgcttcaagggaacacagttctctggctttttggaaaacctgatgcatcccgatgtaaagccatgctaaggtggttttcagattccacacaaaatgtcacactttgtttcttgttcatccaagggaccctaattgaaatttaaaaataaagctactgaatttattgccgcaaaaaaaaaaaaaaa

SEQ ID NO: 645 - DNA, 323 bp, Homo sapiens
  SIMILAR (321)..(217): 941254mologous to Rattus norvegicus rRNA promoter binding protein,accession number U77931,Smith-Waterman Score=166.
aaagttcatcgagttcagatttcgctggtcagacgctataaagtacacaaacggtacagaattagttcaaaaaagtccttaaaccaggacgtctatatcccgtaccaatagcaaccatgggaataaaggagcctctgatttcctgagtcccccccttggggtgtttaaaaatccctttttcaataacggcaaaaaataaaaaattaggcaaagaatcaacagcggagatgggcgccgcgaggcgtccagtgcggtaacgcgaccgatcccggagaagccggcgggagccccggggagagttctctcctctttgtgaagggcag

SEQ ID NO: 646 - DNA, 921 bp, Homo sapiens
gtttatgatcttagcaaatgatggattgaaagggacttacttaattgcataaagagacttaaactacaacaaacaatatgcttaatgatgaaatagtgaacatttctcctaagattataaaaataagacaaggatatctgctgtcaatgattttattcggcattgttcagaaggacctaaccagaaaactaatgcaaggaagagaaacaaaaggcatagagattagaaaagaagtaaaactttaaaaacgaaaaagaatataaatctctatttgcagatgccatgagtaaatttggtaagttccctgcataaaagttatgcaaaaagcattttatgatataccagcaaaaaacatggaaaatgaaattttgaaaaagcaatgccacttcaaagatccctcaagtgcctagagggagaaaatgaggttaatatgctttgaagaactgtatccagaaaataaaattacaaaggaggagagggataggattccaggacaatctcaaaactattgctttttcctaaatttcatttgcaaccttaaaatcctaggcaagtttctttaatgttaaattaacaagctaatttctaggaattcatatgcatatttcaaaagtcgaataattgtcaaggctatcctgtagaatggacagagaggattgaaatttctaaatatcaagacctgttataaagccatagaaataatgaaggtgttaatttggcacaaggatgaaaaaactggactagtggaacagcatacaggtttcaaaagtagacccacgtgtataccatcacctgagttttgagaaaggtgacattgaagtgtagtgggggaaagggtgttctttccagtaaatgtactttgccaataaaattttgtaatttgataaaaagttatttggaggtggattgcagatctgaata

SEQ ID NO: 647 - DNA, 528 bp, Homo sapiens
  SIMILAR (151)..(276): 1001254mologous to Homo sapiens high mobility group protein 14,accession number J02621,Smith-Waterman Score=204.
cgctgtgggtctcagcagctcgggcggcgggaggagtggcagcggcaaggcagcccggtttcgcgaaggctgtcggcgcgccgcggcccgcaggcacccggcacgcgccttccccgcaggcacccggcacgcgccttccccgccgccacgatgcccaagaggaaggtcagctccgccgaaggcgccgccaaggaagagcccaagaggagatcggcgcggttgtcagctaaacctcctgcaaaagtggaagcgaagccgaaaaaggcagcagcgaagtgtaggtagaagtttagcactgcagtcatcagaagaggcaagattaatttccttgacattgaggagttgttggataattactaaatttgtccttgttaaataaagaaagttctgtttttgtgatccttttaaaaataaagcttcacggaaggtatgagaatagtatttttcaactttaaatttctcattaccagaagaccatgtggtaattctctgtatacagttagaacagcacggaaacttgaaggccta

SEQ ID NO: 648 - DNA, 1341 bp, Homo sapiens
  SIMILAR (135)..(416): 461254mologous to Homo sapiens high mobility group protein 14,accession number J02621,Smith-Waterman Score=167.
gaattcgggtctcagcagctcgggcggcgggaggagtggcagcggcaaggcagcccagtttcgcgaaggctgtcggcgcgccgcggcccgcaggcacccggcacgcgccttccccgcaggcacccggcacgcgccttccccgccgccacgatgcccaagaggaaggtcagctccgccgaaggcgccgcctagctagagcccaatagtagatcggcgcggttgtcagctaaacctcctgcaaaaggggaagcgaagccgaaaaaggcagcagcgaaggataaatcttcagacaaaaaaagtgcaaacaaaagggaaaaggggagcaaaagggaagcagggccgaagtggctaaccaagaaactaaagaagacttacctgcggaaaacggggaaacgaagactgaggagagtccaagcctctgatgaagcaggagagaaagaagccaagtctgattaataaccatataccatgtcttatcagtggtccctgtctcccttcttgtacaatccagaggaaatatttttatcaactattttgtaaatgcaaggtttttagtagctctagaaacatttttaagaaggagggaatccccccctcatccccatttttttaaagtgtaaatgctttttttttaagaaggtgaaatcatttgcctggttgtttattttttggtacaaccagaaaaatagtgtggggatatttgaatttatggggaggctctgactgtctccgggtgtccagcttaaccattcccacagatgggggggttagttttttatatccctataaatccaaagcatatttaaatgggccactctggagtccagtccctgccatttaatgtccttgaaccattttaaattacttcctattacccatgttggttttttaggtaggaattggttcccctaaagggaaaccccactctttggatccatggcctctctcttgcccagcaattggtgtgcactccggtaacatcctttggttgtggtagatcctgttttcctaataacgtttgttacctgtgctgtgaaaggattacaggatttggaccatgtagtgtacgtgctatctgcagttgtgacttggtggggccgtaatgtaacagctgatcaacatgtgaagatactggtacttgatagcctcttaaggaaaaatttgcttcccaaattttaagctggaacgtcactggaataactttaaaaaagaattacaatacatggctttttagaatttcgctacgctcatgttaagatttgtgtacaaaattgaaaagtctctactgatcctcaacacaataaaatctcgagtttatgaaaatattttgcacgcacatgg

SEQ ID NO: 649 - DNA, 1601 bp, Homo sapiens
  SIMILAR (201)..(752): 481254mologous to Spalax ehrenbergi high mobility group protein,accession number AF078819,Smith-Waterman Score=341.
agcggagagagtgaggaggctgcgtctggctcccggtctcacaggcattgcagtacattgagctccatagagacagcgccggggcaacgtgagagccggacgggcacatgggcgactctgtgcctcgctgaggaaaaataactaaacatggggcaaaggagatcctaagaagccgagaggcaaaatgtcatcatatgcattttttgtgcaaacttgtcggggaggagcataagaagaagcacccagatgcttcagtcaacttctcaagagtttttctaagaagtgctcagagaggtggaagaccatgtctgcttaaagaggaaaggaaaatttgaagatatggcaaaagcgggacaaggcccgttattgaaagagaaatgaaaacctatatccctccccaaaggggaagacaaaaaagaaagttcaaggattcccaattgcacccaagagggcctccttcgggccttctttcctcttcttgctctgagtatcgcccaaaaatcaaaaggagaacatccttggcctgttccattggtgatgttgcgaagaaactggggagagatgtgggaattaacactgctgcagatggacaagcagccttatgaaaagaagggctgcgaagctgaaggaaaaatacgaaaaggatattgctgcatatcgagctaaaggaaagcctgatgcagcaaaaaaagggagttgtcaaggctgaaaaaagcaagaaaaagaaggaagaggaggaagatgaggaagaaggaagatgaagaggatgaggaggaggaggaagatgaagaagatgaagaagatgaagaagaagatgagagatgagataagagaagatgtatgatgataagttcgttctagcgcagttttttttttttcttgtctataaagcatttaaccccccctgtacacaaactcaactccttttaaagaaaaaaaattgaaatgtaaggctgtgtaagatttgtttttaaactgtacagtgtctttttttgtatagttaacacactaccgaattgtgtctttaggatagccctgtcctggtggtattttcaatagccactaacctttgcctggtacagtatgggggttgtaaattggcatggaaatttaaagcaggttcttgttggtgcccagcccaaattagttatatatggggatggtagtttttttcatcttcagttgtctctgatgcagcttatacgaaataattgttgttctgttaactgaataccactctgtaattgcaaaaaaaaaaaaaaaaaagaaaagaaaaagttgcagcgtgttttgttgacattctgaatgcttctaagtaaatacaattttttttattagtattgttgtccttttcataggtctgaaatttttcttcttgaggggaagctagttttttgttttggccctttttgattcacaggatttattacggggttttccttttcttatagtgggcaaaaaaaaagcttttgtttaccccccctgcttataatacggggggaaaggtaatttggaaaaagttttcttccatatgggaacatcaaaaatttgagtgagtaaaaaaatttcacttggcccctttacttttacaaactgaaaag

SEQ ID NO: 650 - DNA, 442 bp, Homo sapiens
  SIMILAR (37)..(210): 981254mologous to Homo sapiens fibrinogen gamma chain,accession number M10014,Smith-Waterman Score=305.
  misc_feature (1)...(442): n = a,t,c or g
ccgatacgtacatcccgggtcgacccacgcgtgcgtgttgctaccagagacaactgctgcatcttagatgaaagattcggtagttattgtccaactacctgtggcattgcagatttcctgtctacttatcaaaccaaagtagacaaggatctacagtctttggaagacatcttacatcaagttgaaaacaaaacatcagaagccaaacaggctggagacgtttaaaagaccgtttcaaaagagatttacttttttaaaggactttatctgaacagagagatataatatttttcctattggacaatggacttgcaaagcttcacttcattttaagagcaaaagaccccatgttgaaaactccataacagttttatgctgatgataatttatctacatgcatttcaataaaccttttgtttcctaagactnnnnnnnnnnnnnn

SEQ ID NO: 651 - DNA, 660 bp, Homo sapiens
  SIMILAR (26)..(397): 971254mologous to Homo sapiens gamma fibrinogen type B (AA at 202),accession number K02569,Smith-Waterman Score=689.
  misc_feature (1)...(660): n = a,t,c or g
tttgccgatgatctagtgacaagttttcacatccaataatggcatgcagttcagtactgggnacaatgacaatgataagtttgaaggcaactgtgctgaacaggatggatctggttggtggatgaacaagtgtcacgctggccatctcaatggagtttattaccaaggtggcacttactcaaaagcatctactcctaatggttatgataatggcattatttgggccacttggaaaacccggtggtattccatgaagaaaaccactatgaagataatcccattcaacagactcacaattggagaaggacagcaacaccacctggggggagccaaacaggtcagaccagagcaccctgcggaaacagaatatgactcactttaccctgaggatgatttgtagaaaattaactgctaacttctattgacccacaaagtttcagaaattctctgaaagtttcttccttttttatcttactatatttattgatttcaagtcttctattaaggacatttagccttcaatggaaattaaaactcatttaggactgtatttccaaattactgatatcagagttatttaaaaattgtttatttgaggagataacatttcaactttgttcctaaatatataataataaaatgattgactttatttgcaaa

SEQ ID NO: 652 - DNA, 548 bp, Homo sapiens
tttttttttgatgatgaaatattttaattaaggtttatttcaatagcaaaaatgacttcaagatttttcatgaattattttttaaacaaaactatatgaaaaatatgtacaaatcagtcatcaatgtcattgacatttttatgaacaagtttcaaatgaaaaatatcccatcataacaaagggtccttaaataaataaatgctgacaatactggccctaaagtctaacacaactgttagactaatcagggataccgctttctactacgtgagggagcacataatcaatgtttccagcaaaagggcaaggtactgggtttgtgtagggtttatttaggccagttgttgacagcccccattattttgaggtgttggctacttgtttctcttccatagtgtttgaaatggcacagtgcaaggcatttgggcacccagaagcatgagcataggcagagccatttccaccatgctgacggcaggcaagaagaagacaaaaatgaacccctttcatgcttgtttaaaaatgtgacggctaggcccattgctccc

SEQ ID NO: 653 - DNA, 1868 bp, Homo sapiens
  SIMILAR (270)..(1397): 461254mologous to Homo sapiens PRO2061,accession number AF118092,Smith-Waterman Score=621.
ttttttttttttttttgatgatgaaatattttaattaaggtttatttcaatagcaaaaatgacttcaagattttgcgtgaattattttttaaacaaaactatatgaaaaatatgtacaaatcagtcatcaatgtcattgacatttttatgaacaagtttcaaatgaaaaatatcccatcataacaaaggtacataaataaataaatgctgacactacaaggctcggagctccgggcactcagacatcatgagttggtccttgcacggcccggaatttaattctctacttctatgctcttttatttctctcttcaacatgtgtagcatatgttgctaccagagacaactgctgcgatcttatatgaacgattcggctgttattgtgccaactacctgtggcattgcagatttcctgtctacttatcaaaccagagtagactaggatctacagtctttgggaagacatcttacatcaagttgaaaacaaaacatcaggaagtcaaacagctgataaaagcaatccaacttcacttataatcctgatggaatcatcaaaaccaaatatgatagacgctgctactttgaagtccaggaaaatgttagaagaaattatgaaatatgaagcatccgattttaacacatgactcaagtattcgatatttgcaggaaattatataattccaaataatccaaaagattgttaacctggaaagagaagggtagcccagcttgaagcacagtgccaggaaccttgcaaagacacggtgcaaatccatgatatcactgggaaagattgtcaagacagttgccaataagggagctaaacagagcgggctttactttattaaacctctgaaagctaaccagcaattcttagtctacctgtgaaatcgatgggtctgggaaatggatggactgtgtttcagaagagacttgatggcagtgtagatttcaagaaaaaactggattccatataaagaaggatttggacatctgtctcctactggcacaacagaatttttggctggggaaatgaggaagattcattttgattaaggcacacagtcttgccatcccatatggcatttaaggagtgggaactgggaagacttgggaatgggccaggaaccagtactgcagatctatgccattgttcaaggttgtacatgaagttgacagagtaccgctttacatatgcatacttcgctggtggggatgctgaagatgcctttgatggctatgattttgggcgatgatcctagtgacaagttttttcacatcccaataatggcaatgcagttcacgtacctggggacaatggacaatgataaagtttgaaaggccaactgtgcctgaaacagggatgggatcctggttggtgggatggaaacaagtgtccacgctgggccattcttcaatgggagttttatttacccaaggttgggcactttacttccaaaaggcatcctacctccctaatgggttatggataatgggcattatttgggcccacttggaaaaacccggtgggtattccgatgaagaaaacccactatgaagataatccccattcaacagactcacaattggagaaggacagcaacacccaccttgggggaagccaaacagggttggagacgttttaaaagacccgtttcaaaagagatttactttttttaaaggactttatctgaacgagagagatataatatttttcctattggacaatggaacttgcaaagctttcacttcattttaagagcaaaagacccccatgttggaaaactccataacaagttttatgctgattgataatttatctacatgcatttcaataaaaccttttgtttcctaagactaaaaaaaaa

SEQ ID NO: 654 - DNA, 529 bp, Homo sapiens
  SIMILAR (47)..(247): 981254mologous to Homo sapiens b4 integrin interactor,accession number Y11435,Smith-Waterman Score=350.
gggtacagtcgccgcgtgcggagcttgttactggttacttggcctcatggcggtccgagcttcgttcgagaacaactgtgagatcggctgctttgccaagctcaccaacacctactgtctggtagcgatcggaggctcagagaacttctacagtgtgttcgagggcgagctctccgataccatccccgtggtgcacgcgtctatcgccggctgccgcatcatcgggcgcatgtgtgtgggagacagaagaaattctggcagatgtgctcaaggtggaagtcttcagacagacagtggccgaccaggtgctagtaggaagctactgtgtcttcagcaatcagggagggctggtgcatcccaagacttcaattgaagaccaggatgagctgtcctctcttcttcaagtcccccttgtggcggggactgtgaaccgaggcagtgaggtgattgctgctgggatggtggtgaatgactggtgtgccttctgtggcctggacacaaccagcacagagctgtcagtggtggaaaa

SEQ ID NO: 655 - DNA, 1209 bp, Homo sapiens
  SIMILAR (103)..(444): 581254mologous to Homo sapiens b4 integrin interactor,accession number Y11435,Smith-Waterman Score=254.
  misc_feature (1)...(1209): n = a,t,c or g
gacggaaacctttttagggagtccaaggtacagtcgccgcgtgcggagcttgttactggttactgggcctcatggcggtccgagcttcgttcgagaacaacatgtgagatcggctgctttgccaagctcaccaacacctactgtctggtagcgatcggaggctcagagaacttctacagtgtgttcgagggcgagctctccgataccatccccgtggtgcacgcgtctatcngccggctgccgcattcatcgggcgcatgtgtgtggggaacaaggcacggtctcctgggtacccaacaataccaccgaccagggagctggcaacacatttcggcaacaggcctcccaagacacagtggcagatttagggcgggttggaaggagcggtttttaagcctttggggaaattttttcaaccaccttgcaattgactacgtgggccttgggtccaaccaagactttggacaagggaagacaagaagaaatttctgggcagatgttgttcaaaggttgggaagttttcagacagacagtgggccgaccaggtggctagtagaaagcctactgtgtcttcagcaatccagggagggcctgggtgccatccccaagacctttccaatgaagacccaggaatgagctgtcctctatttctttcaaagtccccctttgtggcggggacttgttaaaccaaaggcagtgaggtgatttgcctgcttgggatgggtggtgaaatgaactggtgtgcccttctgtgggcctgggacaccaaacccagcacagagctgtcaagtggtggaagagtgtcttcaaagctgaaatgaagccccagccttagcaccaattgccaaccgagcatgcgggaattccctcaattgacagcctcacctgagtcaccttccaagttgttccatgggcttcctggctctggactgtggccaacctttctccacattccgcccaatctgtaccggatgctggcagggaggtggcagagagctcactggggacttgagggggttgggcacccaaccctttttccacctgtgctttattcgcctggggatcttattcatttacttgcaaaaacctggcttctgttgtggctggctgggcaggccctgtggctgctggctgggggttttggtgtcctgtcctgtgccaccccattaaagtgcgagttccctccgggcaaaaaaaaaaaaaaaaaaa

SEQ ID NO: 656 - DNA, 327 bp, Homo sapiens
  misc_feature (1)...(327): n = a,t,c or g
ggtcctttgatctgggaatggccagccagcccggagcccccccctttaccctggggaaaaccacgaatgcaggcggctaatacggttaaaccccttagatccccaaaatccggttcccaaaaaagcccttccctcctttcccccaagctttggaaccacaacaaaaaggccccaattgagcccacccctaggagcccaccccagcaaaaaaatattcgccccaacgggttcaaaaggttccaaaaannnnnnnnnnnnnnnnnnnnnnnnnnnnnnnnnnnggcagtttagggtatttatcacaccaaaaatggttcccctcgtgcc

SEQ ID NO: 657 - DNA, 1381 bp, Homo sapiens
  SIMILAR (1102)..(1320): 301254mologous to Homo sapiens aurora-related kinase 1,accession number AF008551,Smith-Waterman Score=74.
gtggaagagtgacaggaactgacattttttagccagttactatgagaggaaataaaactggacaggaaagaaagagaaaatacattaaaacaaggacaggttgttcgggcattcttcttcaggagatgactgtctggtacatccttttaccaccattatcctcaatcaccaatcactaagcattgccatgtaccaggcccaggggctgggactatgggagctagttcttatagtggctcatgatctacttgggaaggcaagacctaaagaaatgacaagtaagccacaatggcatatgctttgtcgaatgagagggtaccaatcagcgagtgtgccggggacttagaggaaggggtcacaatgccctgggatggctgaggtccccacggagatgttgggccttgagccagaacttgagtgctggataacacttgagtggaaaggaggggcacagagactgtccagattggaatggacaaggcatagcagaaagtacggtggtacactcaaggcactgtgaacagcagtttattattattttttccttcatgctgtcttttggggtccttaggaaatgactctgttgtccttcacaagcccagctaggccctggaacaaatggcctttagagagttcaacagtatgaaactcctactacgagtaaatcaatgttaggtgttggggggtatgtggaaaagtgaaaaaataatagtccctgccttaaaggacaagaaatgattttccctttatcaaatgtccagggaaggaaactgtgggatgacactgtggcagtgaagtctcacatctgataaaaggcagtgggctctgggcagcatggacaagtttaagaaacactggatttgccatctatcaagatgctccatttaggggtgggtccaaaaggtctttcagtaactcagcagttctcttctcagaattagttcccagtctgtgccttccaatcttcccagtatattcctttaccagcacaaaaactcatgtacagccaatgaccagttcagaatagatgccaaagtaatcagactataccagtagctcaccccatgtctggtcaccaagtaagccatcacagactctgcaaataatcctggaaaggaagaggtaccaggacaagaaggaaagaactaaaacaaggatgtgaataacttctaaactggtcagccttggacaaaaggaaatctggaaatctcgacttggcctgagagaaacctcatcctggcccttaaagtgccaattaaggctgagttgaaaaggagctgggcatcatcaaactgcaaacaaacttagcttaggcacccacagtgtgatgatgtgtttatttccatgaaggagcagtctatggagaagtgcaggaactttc

SEQ ID NO: 658 - DNA, 3363 bp, Homo sapiens
  SIMILAR (569)..(1411): 441254mologous to Homo sapiens glutamine synthetase, GS {EC 6.3.1.2},accession number S70290,Smith-Waterman Score=446.
cgctaccttgaaagaagaaaaggttcgtgttcagagcagggcatttagtcccaagccaggctagtcccacaagcaagagaccaaagccattctctctgattcccaacccctaccttctctcctaattcccacttttaatagaaaagttggttataactttttaagaaaagtttccaccacgagggaaagtcctaacctcgctctcgcggcctaccctttacccgcccgcctgctcggcgaccaagaacaccttccaccatgacccacctcagccaagtttcccacttaaaataagaggcatccaagcagggtgtacatgtccctgcctcaggggtgagaaagtccaggccatgtatatctggatcgatggtactggagaaggactgcgctgcaagacccggaccctggacagtgagcccaagtgtgtggaagagttgcctgagtggaatttcgatggctccagtactttacagtctgaagggttccaaacagtgaacatgtatctcgtgcctgctgccatgtttcgggaccccttccgtaagggaccctaacaagctggtgttatgtggaagttttcaggtacaattcgaaggcctggcagagaccaatttgaggcacacctgtaaacgggataatgggacatggtgagcaaccagcacccctggtttggcatggagcagggagtataccctcatggggacagatgggcacccctttggttggccttccaagggtcttcccagggccccaaggtcaatatttactgggtgtggggaggagacagaagccttggaagggacattcggggaggcccattaccgggcctgcttttatgtctgggacaagaattccgggaactaaagccggagtcagtcctctccaggtgggaatttcagattggaccttgtgaaggaatcaagcagggaggactatcttctgggtggcccgtttcatcttgcattcgtgtgtgtgaagacttggggagtgatagcaacctttgatccttagccccactcttggggaactggaatggtgccaggctgccataccaacttcagcaccaaggccatgcggaaggagaatggtcttaagtacatcgagaaggccatttagaaacttaccaaccggccacaagtcccacatccgtgcttatgatcccaagagaggcctggacaatgcccgacgtctaactggattccatgaaacctccaacatcaacgacttttctgttggtgtagccaatcgtagcgccagcatacgcattccccggactgttggccaggagaagaagggttactttgaagaatcgtcgcccctcttgccaactgcgaccccttttcggtgacagaagccctcatcccgcacgtgtcttctcaatgaaaccggcgatgagcccttccagtacaaaaattaagtggactagacctccagctgttgagcccctcctagttcttcatccctgactccaactcttccccctctcccaagttgtcccgattgtaactcaaagggtggaatatcaaggtccgtttttttcattccatgttgcccagttaatcttgctttcttttgtttggctgggatagaggggtcaagttattaatttcttcacacctaccctcctttttttccctatcactgaaagcttttttagtgccattagtggggaggagggttggggagaccataaccactgcttccatttaatggggtgcacctgtccaataaggggtactattccggacagagcacgttttcagaaaggggaatctttcttccaaggtagctgaaaggggaagacctgacgtactctggttaggttaggacttgccctcgaggtggaaacttttcttaaaaagttataaccaacttttctattaaaagtgggaattgggagagaaggtaggggttgggaatcatagataatggctttggactcatgcttgtggaactagcctggctagagactaaatgccctgctctgaacacgaagcttattataaactgatggatatccctaccttgaatgagtaaatggttccttactgcttggtccttgatttatcacacaaagcagaatagtatttttatatttaaatgtaaagacagaaaaactatatgtatggttttgtggattatgtgtgttttggctaaaggaaaaaaccatccaggtcacggggcaccaaatttgagacaaatagtcggattagaaataaagcatctcattttgagtagagagcaaggggaagttggtcctcagattgttaatctggaatcaggcccccaaggaccctttttgggttttctgccctgccccacccctcctggaagaagggtggggcactgggattagtttaacagaccaacaccgttacttacaagtcacttgatctcccgtggctttgggtttaaaagacacactttgtccacataggtttagagataagaatttggcggtcaaacttggagcatgttacttgacagagggggtattgggggttattttctgggtaggaatagcatggtcactaaaagcaggcccttttgatattaaattttttaaaaaagccaaattattggaaagtttagcattttaatcaaatttgatgggtttctaggtaattttttaccagaattgcttgtttgcttccaactgtctcctacctctgcctcttggaggaagatgggggacagaggctggaagtcaaaaacaccttgtaattttgtattcttgaatgttctttggttaagactgctgaagaattatttttttttcttttataataagggaataaacccccacctttattccttcattttattcacccttttttgggtttttgggttggctgtggcaggccagctgtggttttcttttgccatgacaacttctaattgccatgtacagtatgttcaaagtcaaataactcctcattgtaaacaaactgtgtaactgcccaaagcagcacttataaatcagcctaacataagatctctctgatgtgtttgtgattctttcaaatccctatgtgccattatatttctttatttcccaaaacaggcaaaataagctcaagtttatgttactctgaattttttaaaaacactggagtgatgttgctgaccagccgtttcctgtacctctctaagttgggtatttgggacttaagggattaagtttttcacctagacttagttacacacaatcttggcatttcctagcctagaggtttgtagcagggtacaagccccactcctcccccttcctttgctcccctgagtttggttttggcttaccataacattgttttgaccattcctagcctaatacaatagcctaacataatgtaagattaactggct

SEQ ID NO: 659 - DNA, 1474 bp, Homo sapiens
  SIMILAR (567)..(1178): 1001254mologous to Homo sapiens RBP-MS/type 2,accession number D84108,Smith-Waterman Score=1070.
atcccggacttcccagagcctgcctggagcgcgtactcagcggctctcgggtcccagcgtcccagccgcggcccgcgctcctccgccccgctcctcctcctcctcttcctcctcctcctcctctctaggcacccccgtcccctccttccagcggctgcagcccccagccccaactctccgcgcttactcctgggacgcgcgtcctcgccccatcctttgcttccttccttccttccttcttccttcctcccctggctcccgccctccctctccaggtcgccctcccggggcccgattgtctcggttccccgctgccggcccgcgccctgccccgtctctcccttgcacttcctgagtcgcccgccgccgccgtcgcagactcgccgcgggagccccagcccaacccgagcccgacagccactgccccggctccagctccagccccacagcccgcggcgcccgcccgagggagccccggcgcccggggaaggctccagtgggctagcgcgccctcgcccagccccgcgccccagccctgcccggcccggcgaggaaggaccgggaagatgaacaacggcggcaaagccgagaaggagaacaccccgagcgaggccaaccttcaggaggaggaggtccggaccctatttgtcagtggccttcctctggatatcaaacctcgggagctctatctgcttttcagaccatttaagggctatgagggttctcttataaagctcacatctaaacagcctgtaggttttgtcagttttgacagtcgctcagaagcagaggctgcaaagaatgctttgaatggcatccgcttcgatcctgaaattccgcaaacactacgactagagtttgctaaggcaaacacgaagatggccaagaacaaactcgtagggactccaaaccccagtactcctctgcccaacactgtacctcagttcattgccagagagccatatgagctcacagtgcctgcactttaccccagtagccctgaagtgtgggccccgtaccctctgtacccagcggagttagcgcctgctctacctcctcctgctttcacctatcccgcttcactgcatgcccagctctgtgaaggtcagactgtgaggagaagccaccccttgagcgctccgtctcctgatagtgccagcctggcctggtttcctgtttgatgcgctggctccctccctccgaggctacttctcagggctggaagtcccgtcagttctgctgaatactatgtcccaggtgtgtgatggcggctgcaatctgtcttgtgggtattaatgcaatcttcagtggtggctactgttctctagctgttctacaaaactggagcatgctggcttgaaaaacccttgcccagtttggatcccttcaagactttgtcacagcctctatcacacatctgtttttctcgaagaaaaaaatataattaataaaaatgttttactcttttacactg

SEQ ID NO: 660 - DNA, 634 bp, Homo sapiens
  SIMILAR (4)..(324): 981254mologous to Homo sapiens RBP-MS/type 3,accession number D84109,Smith-Waterman Score=553.
ttcggcacgaggagttttgacagtcgctcagaagcagaggctgcaaagaatgctttgaatggcatccgcttcgatcctgaaattccgcaaacactacgactagagtttgctaaggcaaacacgaagatggccaagaacaaactcgtagggactccaaaccccagtactcctctgcccaacactgtacctcagttcattgccagagagccatatgagctcacagtgcctgcactttaccccagtagccctgaagtgtgggccccgtaccctctgtacccagcggagttagcgcctgctctacctcctcctgctttcacctatccccgcttcactgcatgcccaggaaaccctgtagaaaaggagatacaagatagtgtctaagatggaattacaggtcaagtgtttctctcctgaggcaaagcccaacacacctgtcttttgtccacttttccagcaaattagatttgtctctgggaatgtgtttgtaacataccaacctactgcagaccagcagagggagctcccatgttgaatttgtttgttagctattttcccccctttcacaaaaactatttcttgacgacctttgagagatttcaataaaaattttaatcagagcaaaaataaaaaaaaa

SEQ ID NO: 661 - DNA, 1608 bp, Homo sapiens
  SIMILAR (567)..(1169): 751254mologous to Homo sapiens RBP-MS/type 2,accession number D84108,Smith-Waterman Score=706.
atcccggacttcccagagcctgcctggagcgcgtactcagcggctctcgggtcccagcgtcccagccgcggcccgcgctcctccgccccgctcctcctcctcctcttcctcctcctcctcctctctaggcacccccgtcccctccttccagcggctgcagcccccagccccaactctccgcgcttactcctgggacgcgcgtcctcgccccatcctttgcttccttccttccttccttcttccttcctcccctggctcccgccctccctctccaggtcgccctcccggggcccgattgtctcggttccccgctgccggcccgcgccctgccccgtctctcccttgcacttcctgagtcgcccgccgccgccgtcgcagactcgccgcgggagccccagcccaacccgagcccgacagccactgccccggctccagctccagccccacagcccgcggcgcccgcccgagggagccccggcgcccggggaaggctccagtgggctagcgcgccctcgcccagccccgcgccccagccctgcccggcccggcgaggaaggaccgggaagatgaacaacggcggcaaagccgagaaggagaacaccccgagcgaggccaaccttcaggaggaggaggtccggaccctatttgtcagtggccttcctctggatatcaaacctcgggagctctatctgcttttcagaccatttaagggctatgagggttctcttataaagctcacatctaaacagcctgtaggttttgtcagttttgacagtcgctcagaagcagaggctgcaaagaatgctttgaatggcatccgcttcgatcctgaaattccgcaaacactacgactagagtttgctaaggcaaacacgaagatggccaagaacaaactcgtagggactccaaaccccagtactcctctgcccaacactgtacctcagtttcattgccagagagccatatgagcttcacagtgcctgcactttaccccagtaggccctgaagtgtggggccccgtaccctctgttacccaggcgggagttaggcgcctgcttttaccttcctcctggcttttcacctatcccgcttcactggcatggcccagatgcgctggctccctccctccgaggctacttctcagggctggaagtcccgtcagttctgctgaatactatacccttcagcaatggctactagaaggacgaacaattgccctcctttggaagtacggctaatagaagccctagatccgaataagatccgaataagaatatgtaatggaccaggcgcagtgcctcacgcctgtcatcccagcactttgggaggctgaggcaggcggatcacttgatgacagaagtgtgagaccagcccagccaacatggtcccaggtgtgtgatggcggctgcaatctgtcttgtgggtattaatgcaatcttcagtggtggctactgttctctagctgttctacaaaactggagcatgctggcttgaaaaacccttgcccagtttggatcccttcaagactttgtcacagcctctatcacacatctgtttttctcgaagaaaaaaatataattaataaaaatgttttactcttttacactg

SEQ ID NO: 662 - DNA, 2302 bp, Homo sapiens
  SIMILAR (567)..(1121): 511254mologous to Homo sapiens RBP-MS/type 2,accession number D84108,Smith-Waterman Score=376.
atcccggacttcccagagcctgcctggagcgcgtactcagcggctctcgggtcccagcgtcccagccgcggcccgcgctcctccgccccgctcctcctcctcctcttcctcctcctcctcctctctaggcacccccgtcccctccttccagcggctgcagcccccagccccaactctccgcgcttactcctgggacgcgcgtcctcgccccatcctttgcttccttccttccttccttcttccttcctcccctggctcccgccctccctctccaggtcgccctcccggggcccgattgtctcggttccccgctgccggcccgcgccctgccccgtctctcccttgcacttcctgagtcgcccgccgccgccgtcgcagactcgccgcgggagccccagcccaacccgagcccgacagccactgccccggctccagctccagccccacagcccgcggcgcccgcccgagggagccccggcgcccggggaaggctccagtgggctagcgcgccctcgcccagccccgcgccccagccctgcccggcccggcgaggaaggaccgggaagatgaacaacggcggcaaagccgagaaggagaacaccccgagcgaggccaaccttcaggaggaggaggtccggaccctatttgtcagtggccttcctctggatatcaaacctcggggagctctatctgcttttcagaccatttaagggctatgagggttctctataaaagctcacatctaaacagctttaaggttttgtcagttttgacagtcgctcagaagcagaggctgcaaagaatgctttgaatggcatccgcttcgatcctgaaattccgcaaacactacgactagagtttgctaaggcaaacacgaagatggccaagaacaaactccgtagggactccaaacccccagtactcctctgcccaacactgtacctcagttcattgccagagagccatatgagctcacagtgcctgcactttaccccagtaagccctgaaagtgtgggccccgtaccctctgctacccagcggagttagggcctgcttctacctccctcctgctttcaccatatcccgcttcactgcgatgcccaggaaaccctgtagaaaaggagatacaagatagtgtctaagatggaattacaggtcaaggtagagatctctattctgaccagctttctttcttagttaaaaatagcctgatttttatgaaacaaacttcctgtttcttccgcaaagattacttgtctacatactaacacttcctctccccttggagaaaatatttttcttagcttcgcttttagtgcaagtggtagtaatcagtgtggagattcacctctggagatcaccactcattctttggcctgcaaagattgatgaccagtaacaaatagaaagtacgtacgtaggtttcatttgtctttctgcatgtgtaattcagcctttaaattttaaatttttaaaaattattaggctggacaggcagagatttcgtttgcctgttttgctcagtgtttgtttacaaggctgggtgaaataaacagcttcccagaaaacctccttctgacttaaaactcttttatgttgtacagaattccctgtcttgataaagaccacctagaagcagcccccagcgagggttcttgaaagtcatggggtcgagattgttgttggctgaacatcttttaattctgagttaccaacacgttgtgcgtgcattgatgacccggcttcctggcctgcccttggtgcctgagccccagtaatgattgccctctatgttgggagacgaagggagaaagtattacaagtagtgaagaaaaaaatgtaggtggtgttggtggttgagagtacatggcacagaaaataaaggagccaggattacctgtgcctttggcttctccttcccctgctgctttttcttcctttttccatgtcagtgcttgggaaccctcacaactggcaggtaacggggtcgggattaaaatgtaaacctgtgggtgtcttctgctgagtcattaggatctttgtagcaggctgcggataaatatgtggatgacatggggcaactaagagccccttttgcttgccacctcccacccctgctctggatggtgtctcctcttgctagactgccgggtacagatcacgtggcaattaaggcaaatgttaataaataccatgaaacagtggtttgcatagtcttctgaatagccatggctttggttagtcagcaacaaagcctttcacccttaccctggataatcaagagttgacaacagccagaaag

SEQ ID NO: 663 - DNA, 672 bp, Homo sapiens
atgcgttggttggtgtcaccgattgaggacacaggacacaaagcacttctgtttgcttgtcttgcattgcaccgggcctgcgtgagtggtcattgtctgagccctaagtgcgtgggcgttgacggtcggtcccacgaaatggttgcccctggactgtttctcgactggctacttgacgggacgggggtctgggacgggaccagcactaatgtggaaggggcccaggaacatgcagtactcatcctcctcatcatcacggacggggtcatcagtgacatggaggagaccggcatgccgtggtgcaggcttccaagctgcccatgtccatcatcatcggggcgtgggcaatgcggacttcgctgccatggagttcctggatggggacgccgcatgctgcgctcccacacgggggaggaggcagcccgcgatattgtcagttcgttccctttcgagagttccgcaacaatgtcagaggaggtttatgaccctcgatctctatatgaaaggctacaggaacaaaggacaggaagcagcaggactgcccgacaagaagctgtggtgggctccaaggtcacagtgagccaacctggacacagacaggagacgacagttttggaacatctagtccagtatgtgggattcagtatctgctgcaaggagcttatggtgtag

SEQ ID NO: 664 - DNA, 1956 bp, Homo sapiens
  SIMILAR (464)..(1009): 471254mologous to Homo sapiens CDA018,accession number AF271785,Smith-Waterman Score=300.
aagccctgaagggtcaaaagaaatacaaaagcaaaggctattttctttttttttttctttctttcattcattccttcctctgtttctttctttcttcctttcatttttttttcttttttaagagcgagcggctctgcggtggcggtttggggtgggcgccgcgacggtgaggtcgtctcgcctcccgcgcgccggtagattggttgtttcattatggatggaggggatgatggtaaccttattatcaaaaagaggtttgtgtctgaggcagaactatgatgttcggcgcaaaaaggaggcaagaagaatgggagaaagttcgaaaacctgaagatccagaagaatgtccagaggaggtttatgaccctcgatctctatatgaaaggctacaggaacagaaggacaggaagcagcaggagttacgaggaacagtttcaaattgcaaaaacatgggtaaggggctttagatgaagatgagaccactttccttgatgaggtttctcgacagcaggaactaatagaaaagcaaccgaagagaagaagaacttgaaagaacttgaaggaatacagaaataacctcaagaaggttggaattttctcaagagaacaagaaggaagtggaaaagaaactgacttgtgaagcctatagaaaccaagaaccaagttctcccaggcgaacgtgcttgggcaggagctgtgaagcatgaagagctcagagagtggccaccagtgtgaaaagacttgaaaccggacccctgagccagattgacaagaatcaagagccctcatcctggcaaagtctctcggaaacaaccttcccttgagtggccccttccatccacttgccccctctgctgcaagtatgtatcggcatcctcccaggcctgggtggcctactctgggagcagcgactccgagtccagcttcagacagcgaaggcaccattcaatgccaccggaaagattgttctcctccatgtttccgaaccaacaccttccttcgagggccccttagttttttccgttccctacacagggaggctcctccccaagggtagatcggaccgttcatgctgcctataggccattatgtctcctcaaaaaaaaaactcctttgcctgcatcctgtgtaccaaccatgacatttttaaccaatcccaatcttaaaaaatgtggccagaatccaacctgttggccgaatcgtgttgggttccctctttcttactccaactgcagatgaccaaacctgtccccgctgccactttcctcactgatattgggaaggagggcaaggcccagccggaagttcccactaaaaatgccccaggagaataggcaccggctggcttgccaaagggtttgggttttattgctttctgttttttcttttccccgacagcacaaagaagtaagggcagttaattggacacggtgttatttaacaccattttctattgtaaatgaatgtgttgtttggttctactgcattgtgggagcatgcgggggaagagaactgacccagggtaatgaaatgggagcccttcccctggaactaaccaggtccttgatgttgtgtgactaagtaaagatgataaaccccatctgctgggggtgtcacttcacactcgggcatgcattgtgaaagctttccatacccttggccgattccctctctcctctctctccaaccccatttatgcaggaagggactgctaacaagaacgcttccatctcaaaccttttctctgcctgggaaattattttatgtttgtttttgaaataaaggatttagtttaagattctaaattttagagaaacaaacgtaggccttgtttactaatagccagacatcagaactgcaggtagggtatgttaatgaggatgactttatttctgggcagctcctggaatcctaatattgtaaatgagtgggacacacttgcatattgtgaccatt

SEQ ID NO: 665 - DNA, 774 bp, Homo sapiens
  SIMILAR (123)..(569): 461254mologous to Homo sapiens gamma-G globin,accession number X55656,Smith-Waterman Score=243.
  misc_feature (1)...(774): n = a,t,c or g
gacactcgctttttggaacgtctgaggttatcaataagctcctacgtccagacgcccatgggtcatttcacagaggaggacaaggctactatcgacaagcctctggtgcaaggtgaatgtggaaagatgctggaggagaaaccctgggaaggctcctggttgtctacccatggacccagaggttctttgacagctttggcaacctgtcctctgcctctgccatccatgggcaacccccaaagtcaaggcacatggcaagaaggtgctgacttcctttgggagactgccataaaagcacctggaatgatctcaaggggcacctttgcccaagcctgaagtgaacctgcacctgtgacaaagctgcattgttggatcctgaggaactttcaagcttcctggggaaattttgctggtgacccgttttgggcaattccattttcgggcaaagaatttcacccctgaaggttgccaggctttcctggcaagaaagatgggtgacttggagttggccagtgccctgttcctcaagattaccactgaagctcaattgcccatgaatgcagagcttttcaaggataaggcttttattcttgcaagcaattacaaataataaatctatttctgctaagagatcaccaaannnnnatnntnnnnnnncccccggattttttatttagcgggccgcacctttttccccttttagggggggtaaatttatattgggccttgggccggggttttcaaaagcggggggannnnnnnnnnaaagagccc

SEQ ID NO: 666 - DNA, 497 bp, Homo sapiens
  SIMILAR (1)..(165): 1001254mologous to Homo sapiens similar to bovine ADP/ATP translocase T1 mRNA with GenBank Accession Number M24102.1,accession number AY007135,Smith-Waterman Score=301.
aaggagcagggcgtgctgtccttctggaggggcaaccttgccaacgtcattcgctacttccccactcaagccctcaacttcgccttcaaggataagtacaagcagatcttcctggggggcgtggacaagcacacgcagttctggaggtactttgcgggcaacctcctgcctgtagatggccggggaaggctctagaaaaggggcgcattgcgatccaaccatcggcagccgattccgtgtcttgatcacggggtgggagggaaccgtggcgtccctgcgtggggcccatgggtgagacactccagtactgagacctagagtccagatgcttgtaggagccaagtcgtgttctaagtatttatttaaaacaaaagaatcacgttttcccatttgtacttcagcgctagcccctgttttgcacagccgagtactggcgagtatgttctatgttgggcctcctgctgcaaaacaataaacagaggacgcagaggtcaaaa

SEQ ID NO: 667 - DNA, 1116 bp, Homo sapiens
  SIMILAR (171)..(1115): 581254mologous to Homo sapiens putative p150,accession number U93569,Smith-Waterman Score=962.
ctctaaatcaatggcaagaacaaactggcaatccagagaggacccacagaccctctgaaggaagtggattgcttctgcaggacccaggagacttctcaaatactttgagtgccccaactgcagaagtggaaaagggagatcctctcccaaagatacccccactggaggaactgaaggaaactcacctaacacataaggactcacataaacttaaaataaagggatggaaaaaggcatttcttgcaaatggacaccaaaagcaaacaggggaagctattcttataccagacaaaacaaaatttaaagcaacagcagttaaaagagacaaagaaggggattatataatggtaaaaggccttgtcccacaggaaaatatcacaatcctaaacacatacgcatctaacactgaagctcccaaatttataaaacaattactaatagacctaagaaatgagatagacagcaacatagtaatagtggggaacttcaatactccagtgacagcaatagacaggtcatcaaaaccaaaagtcaacaaagaaacaatggatttaaactataccctggaacaaatggacttaacggatatatacagaacatttcatccaacaactgcagaatacacattctattcaacagtgcatgaaactatctccaagatagaccatatgataggtcataaaatgagcatcaatacgtttaagaaaattgaaattatgtcaagcactctgacagaccacagtggaataaaactgaaaataaactccgaaaggaaccttcaaaaccatgcaaatacatggaaattaaataacctgctcctgaatgagcattgtgtcaaaaatgaaatcaagatggaaattatacaattatttgaactgaacaacaataatgacacaacttatcaaaacctctgggatacagcaaaggtggtgctaagaggaaagttcatagccctaaatgcctacatcaaaaagactgaaagagcaaaaaagacaatctacagtcacacctcagggatctagaaacaagaacaaaccaaacccaaacccagcagaagaaaggaaataatcaagatcagagcagaactaaatgaaattgaaacaaaaaaaaccatac

SEQ ID NO: 668 - DNA, 1966 bp, Homo sapiens
  SIMILAR (951)..(1091): 511254mologous to Homo sapiens adenine nucleotide translocator-2,accession number M57424,Smith-Waterman Score=77.
  misc_feature (1)...(1966): n = a,t,c or g
gagggtnnnagagactgaacctccgaanccaggagctgccgacgacgaccggccggaatcccgggcgacccacgcgtgcgggcggcgggagggctgagccagcgacgccttccattcactctccgcgcccggtctccggctgggctcccgttccgctgcccgccctgccaccatgacggaacaggccatctccttcgccaaagacttcttggccggaggcatcgccgccgccatctccaagacggccgtggctccgatcgagcgggtcaagctgctgctgcagggtccagcacgccagcaagcagatcgccgccgacaagcaagtacaagggcatcgtggactgcattgtccgcatccccaagggagcagggggcgtgctgtccttcttggaggggcaacctttgccaacggtcattcgctactttccccactcaagccttcaactttcggcctttcaaggataaagttacaagcagatttttcctgggggggcgtgggacaagcacacgcagtttctggaaggtaatttggcggggcaaactgggcttcgggggttgcggccggcgcggaccatccctcatgcttcgtgtacccgctggatttcgccagaaccggcctgggcaagggacggtggaaaagtcaggcacagagcgcaagtttccgaggcctggggagactgcctggtgaagattcaccaagtacagacggcatcccggggcctgtaccaggggcttccagtgtctccgttcacggccactatcatctatccggcagtcctacctacggcgtgtacgaatacggccaaagggcatgcttccccgaccccaagtaacacgctacatcctgttgagccggatgaatcgcgccagaaccgtgacggcccgtggggcggttgggtgtcctaaccctttgaaaacggtgcggcggccgcatgattgatgcaatccggggcgcaaaaggagctgacatcatgtacacggggccntggtcgactgttgaaggaaaaatctttcagaagatgagggggggcaaaggcctttcttcaaagggtgcgtggtccaaacgctcctgcggggccatggggggcgcccttcggtgctggtccctgtacgaacgagctcaagaagggtgatctaaagggccgcgggcctcctcccacacacacacacacacccagggggaaccaagagaaccacgttagaaatccttaaaccggtcggaccatcaaccttcgagaaattccagtttgtcttttttcccagcccgcatcctgcctgtagaatggccgggggaaaggctctagaaaaggggcgcattgcgatcccaaccatcggcagccgatttccgtgtcttgatcacgggttgggagggaacccgtggcgtccctgcgtggggcccatgggtgagacactccagtactgagacctagagtccagatgcttgtaggagccaagtcgtgttctaagtatttatttaaaacaaaagaatacacgtttttcccatttgtacttcaggcgctagcccctgttttgcacagccgagtactggcgagtatgttctatgttgggcctcctgctgcaaaacaataaacagaggacgcagaggtcctcctgcctggccacgcacctctcccacagggcggcctggggtctggagatgggcgctgggcccacgggacgcagatggggccacgctctgcccgtggctggcccacgttcctggtctgcagtgctgcctcctccccagcacccctggggcacagagggcagggtcacagctgggaagaggcggggggtagaaaccaaggctggcagaagtgtagccgggctccctgataaatgctggaggaccccagggcacctgcacttactgtaccctctctgagagcatttgtatgatctcatgtctcagctctggaggctggaggtcccagaaaaccaaggtatggtagattcaaaaaaaaaa

SEQ ID NO: 669 - DNA, 338 bp, Homo sapiens
  misc_feature (1)...(338): n = a,t,c or g
tgagtgcaatggaacgattttgggtccctgcaaaatcccccccccggggtttcgccctttttctggctcagccttccgaacaacttgggcttcaaggggnnnnnnnnnnggccgggtccttttttgaaattttagtaaaaaccggggttttccgcgttaacccggatggtttccctttcccggccccgtgattcggcccccctggcccccccaaaagctggggtttcccgccttaacccccgggcccgggcgccnnnnnnnnnnnnnnnngtcttttgttttcattttttcttgctttcaggagaaaaaaaatctttggcccataaaggtgggatttt

SEQ ID NO: 670 - DNA, 1731 bp, Homo sapiens
  SIMILAR (160)..(1383): 501254mologous to Homo sapiens gonadotropin inducible transcription repressor-4,accession number AB021644,Smith-Waterman Score=1078.
atggtgaccgtacagatggggtttggtggtggttgggcctttctcggcgctacgctatcccttttaacagtctcgagccctcaagcttgggctcgtgtcccctttctattgggacccataaagaccctgcatgctctggaactaaccaccacggacatccaatgtggtaaagcctttaattcttccagttccttccgatatcatgaaagaactcacactggagagaaaccttacgagtgtaagcaatgtgggaaagccttcagatctgcctcactccttcaaacacatggtaggactcacacgggagagaaaccctatgcatgtaaggaatgtggaaaaccatttagtaatttctctttctttcaaatacatgaaaggatgcacagagaagagaagccgtatgaatgtaagggttatgggaaaacattcagtttgcccagtttatttcatagacatgaaaggactcacactggaggaaaaacctatgaatgcaagcagtgtggcagatccttcaactgttcgagctcctttcgatatcatggaaggactcacactggagagaaaccctatgaatgcaagcaatgtggaaaagccttcagatctgcctcacagcttcaaattcatggaaggactcacactggagagaaaccttatgaatgtaagcagtgtgggaaagcctttggatctgcctcacaccttcaaatgcatggaaggactcacactggagagaaaccctatgaatgtaagcagtgtgggaagtcttttggatgtgcctcgcgacttcaaatgcatggaaggactcacactggagagaaaccgtataaatgtaagcaatgtgggaaagcttttggatgtccctcaaaccttcgaaggcatggaaggactcacactggagagaaaccctataaatgtaaccaatgtgggaaaaagtggaaagaccagaacattgaatatgagtaccaaaaccccaggagaaacttcaggagtctcatagaagggaatgtcaatgaaattaaagaagacagtcattgtggagaaacttttacccaggttccagatgacaggctgaacttccaggagaagaaagcttctcctgaagcaaaatcatgtgataactttgtatgtggagaagttggcataggtaactcatcttttaatatgaacatcagaggtgacattgggcacaaggcatacgagtatcaggactatgcaccaaagccatataagtgtcaacaacctaagaaagccttcagatatcacccctcctttagaacacaagaaaggaatcacaccggagagaaaccctatgcttgtaaagaatgtggaaaaacctttatttcccattcaggcattcgaagacgcatggtaatgcacagtggggatggaccttataaatcaagctttcttcgttcacatcctaaagtccctggtcacggccggcgctttgccatgaaccctactttactgaacaaggaggacgaacgcggtaacaagaatgtggtaaccagagagcacttggaccgtatgaagaatagctgcatcgtttgtaacatgggacattccaacacagagattgacgtgaatgtcgttatggggaactacgagagactggagcgggatgcccggatgacaattcgcaaaaaacggaagcgatattccgatatccgattccgaatcatggggcggtatacggttcgagtcgaggttctgacggcggtcaattccgagtag

SEQ ID NO: 671 - DNA, 5766 bp, Homo sapiens
  SIMILAR (5098)..(5382): 391254mologous to Homo sapiens ZNF91L,accession number AC003973,Smith-Waterman Score=158.
tcagggctggatgtctctacggcaggagccggaggagctcaggagcgcgcggggacagcagaactctgcccgcactcgggggagagttggagggtccacgtctgctccaacatcctggtctctcgactgttgcgttgggtaactcccatccatatcaccagtttcacaccaggttccagggacgaggatgtggacaccgttggggatcactattccttctgtgacacctaccctggtgatgagcagatgtaggacgtggggcagaaccgtggtgattgatgagcagatgtaggaggtggagcagaaccgtggtgattgataagcagatgtaggaggtggagcagaaccgtggtgatgagcagatgtagggggtggggcagaaccgtggtgatgagcagatgtaggaggtggagcagaatcgtggtgattgataagcagatgtaggaggtggagcagaaccgtggtgatgagcagatgtaggaggtggagcagaatcgtggtgattgataagcagatgtaggaggtggagcagaaccgtggtgatgagcagatgtaggaggtggagcagaaccgtggtgattgataagcagatgtaggaggtggagcagaaccgtggtgatgagcagatgtaggaggtggagcagaaccgtggtgattgatgagcagatgtaggaggtggagcagaaccgtggtgattgatgagcagatgtaggaggtggagcagaaccgtggtgattgatgagcagatgtaggaggtggggcagaaccgtggtgatgagcagatgtaggaggtggagcagaaccgtggtgattgatgagcagatgtaggaggtggagcagaaccgtggtgattgatgagcagatgtaggaggtggagcagaaccatggtgattgatgagcagatgtaggaggtggagcagaaccgtggtgatgagcagatgtaggaggtggagcagaaccgtggtgatgagcagatgtaggaggtggggcagaaccgtggtgatgagctgatgtaggatgtggagcagaaccgtggtgatgagcagatgtaggaggtggagcagaaccgtggtgattgatgagcagatgtaggaggtggagcagaaccgtggtgattgatgagcagatgtaggaggtggagcagaaccgtggtgattgataagcagatgtaggaggtggagcagaaccgtggtgatgagcagatgtagggggtggggcagaaccgtggtgatgagcagatgtaggacgtggagcagaatcgtggtgattgataagcagatgtaagaggtggagcagcagaaccgtggtgatgagcagatgtaggacgtggagcagaaccgtggtgatgagcagatgtaggaggtggagcagaatcgtggtgatgagcagatgtaggaggtggagcagaaccgtggtgattgatgagcagatgtaggaggtggagcagaaccgtggtgatgagcagatgtaggaggtggagcagaaccgtggtgatgagcagatgtaggaggtggggcagaaccgtggtgatgagctgatgtaggaggtggagcagaaccgtggtgattcataagcagatgtattaggtgttgctggtgctggggaggagctgtagagaggaccccggtacatctgaaagccgggaaatggtgcgtgtgctggccgggagtggtgcgatgggggaggggctgcctggaactggcgggacccgggcctccctgtgggcgactccggggtctgggaccgagtcctcctagagctgctcggccctcggtccccgcggccgctggatgtgggtgggccggcagccgggactccgggcgtcctgtcccgtccctgcccgtcgactgcggccttggccccgaagcccttttgtgcagctccgcgcccgcagcccgacgccccagcttgtgcgggggccacgggagggtcatgcgcggatttcgactcgggtgtggatttcgtccgtaggaggagcagcggtctgtggggcccacagcctccactttctcctgttaaaaattatactgagatgtttcaggacccagtggcttttaaggatgtggctgtgaacttcacccaggaggagtgggctttgctggatatttcccagaagaatctctacagggaagtgatgctggatactttctggaacctgacctctataggaaaaaagtggaaagaccagaacattgaatatgagtaccaaaaccccaggagaaacttcaggagtgtcacagaagagaaagtcaatgagattaaagaagacagtcattgtggagagacttttaccccagttccagatgacaggctgaacttccagaagaagaaagcttctcctgaagtaaaatcatgtgacagctttgtgtgtgcagaagttggcataggtaactcatcttttaatatgagcatcagaggtgacactggacacaaggcatatgagtatcaggaatatggaccaaagccatataagtgtcaacaacctaaaaataagaaagccttcaggtatcgcccatccattagaacacaagaaagggatcacactggagagaaaccctatgcttgtaaagtctgtggaaaaacctttattttccattcaagcattcgaagacacatggtaatgcacagtggggatggaacttataaatgtaaattttgtgggaaagccttccattctttcagtttatatcttatccatgaaagaactcacactggagagaaaccatatgaatgtaaacaatgtggtaaatcctttacttattctgctacccttcaaatacatgaaagaactcacactggggagaagccctatgaatgtagcaaatgtgataaagcatttcatagttctagttcctatcatagacatgaaagaagtcacatgggagagaagccttatcaatgcaaagaatgtggaaaagcatttgcatataccagttctcttcgtagacatgaaaggacccactctgggaaaaaaccgtatgaatgtaagcaatataggggaagggcatatcatatgctattaggtttgcaaccacacataaagaatgaactctggagaaagaccttataaatgtaagatatgtgggaaaggcttttattatgccaagtcatttcaaacacatgaaagaactctcactggagagagacgctataaatgcaagcaatgtggtaaagccttcaatctttccagttcctttcgatatcatgaaaggattcacgctggagagaaaccctatgagtgtaagcagtgtgggaaagccttcagatctgcctcacagcttcgagtgcacggtgggactcacactggagagaaaccctatgaatgtaaggaatgtgggaaagccttcagatctacctcacaccttcgagtgcatggtaggactcatactggagagaaaccctatgaatgtaagagaatgtgggaaagccttcagatatgtgaagccccttcaaattcatgaaaggacagaaaaacacataagaatgccctctggagaaagaccttataaatgtagtatatgtgagaaaggcttttattctgccaagtcatttcaaacacatgaaaaaaactcacactggagagaaaccctatgaatgcaaccaatgtggtaaagccttcagatgttgcaattcccttcgatatcatgaaaggactcacactggagagaaaccctatgagtgtaagcaatgtgggaaagccttcagatctgcctcacaccttcgaatgcatgaaaggactcacactggagagaaaccctatgagtgtaagcaatgtgggaaagccttcagttgtgcctcaaaccttcgaaagcatggtaggactcacactggagagaaaccctatgagtgtaagcaatgtgggaaagccttcagatctgcctcaaaccttcagatgcatgaaaggactcacactggagagaaaccctatgaatgtaaggaatgcgaaaaagcattctgtaaattctcttcttttcaaatacatgaaaggaagcacagaggagagaagccctatgaatgtaagcattgtgggaatggattcacatctgccaagattcttcaaatacatgcaagaacacacattggagagaaacactatgaatttcttttcgatatcatgaaaggactcacactggggagaaaccctatcaatatacatgaaagagctcacacgggggagaagccatatgaatgtagggagtgtggaaaagcattcaagtgtcccatttctgttcgcagacatgaaagaacccactctaggaaaaaaccctatgaatgtaaacatcgtgggaaagtattatcttatcttaccagctttcaaaaccacttgggaatgcacactggagagatatctcataaatgtaagatatgtgggaaaggcttttattctcccaggtcacttcaaagacatgaaaaaactcacactgcagagaaaccctatgaatgcaagcaatgtggtaaagccttcagtagttccagttccttttggtaccatgaaaggactcacactggagagaaaccctatgagtgtaagcaatgtgggaaagccttcagatctgcctcaatccttcaaatgcatgctgggactcaccctgaagagaagccctacgagtgtaagcaatgtgggaaagccttcagatctgccccacaccttcgaatccatggtagaactcacactggagagaaaccctatgagtgtaaggaatgtgggaaagccttcagatctgccaagaaccttcgaattcatgaaaggacacaaacacacgtaagaatgcactctgtagaaagaccttataaatgtaagatatgtgggaaaggcttttattctgccaagactcacactggagagaaaccctatgagtgtaagcaatgtggaaaaaccttcagatctacctcacaccttcgaaaacatggtaggactcacactggagagaagccctatgaatgtcaggaatgtgggaaagctttcagatctatgaagaaccttcaaagtcatgaaaggacacaaacacacgtaagaatacactctggagaaagaccttataaatgtaagctatgtgggaaaggcttttattgtcccaaatcattgcaaagacatgaaaaaactcacactggagagaaactctatgaatgcaagcaacgttcagtagttccttcagtagttccagttccttttgatatcatgaaaggactcacactggagagaagccctataaatgcgagcaatgtgggaaagccttcagagctgtgtcaatcctttgaatgcatggtaggactcaccctgaagagaaaccctatgagtctacaaggccaccagctatgcaaggccacaagttatgctatgctatagattacgtgacctatcactgtatgattacttttattttgcttctgtggcctccaattgctcagagcagctccagaaggagtgcggattccgagaagctgaagagccctggaaagcagaagacccacatgcacacacaggctcgaactatggcgcaagcctgtcccacttgtcagcatgtccctggtgttatacctgtggaaggatgcaatccacaaggcttggctccaaatgaaatttggcagatggatgttacacatatagcagcctttggatgcgaaaaagccatcgcaacttgcatgcctgcaggtctcttggagggtctaccccgccagttgatggactgcctcatccgccagctgatggcctgctggtgtgccagtgcctatcagtgtgctcttctgctggcgtgctcctcttga

SEQ ID NO: 672 - DNA, 656 bp, Homo sapiens
  SIMILAR (86)..(355): 501254mologous to Homo sapiens Human epidermal protein- 5,accession number AAY44988,Smith-Waterman Score=168.
cgcaccaacgccaacagggcagcgcgttgtgagagccacgcctgcgcaatcggctccagtgcgcctgcggaggcggtcctatgacgtgaataaccctataccttccaatttgaaatcagaagcaaaaaaggctgccaaaatattaagagaattcacaagaaataacttccagaaatggacctgataagatcaattcctggctcaacggtaattgcgaaggctaaaaggccttgcaaattcttgtctgttgaatcaaagcccggggtccctggtgaccttccagagggggggaccgggggttttagtggcgcgcctttccagatgggaaaatggtcttcacccttcagccattggggatagctggctttggttggaggatttgaaataggaatttgaggtattcagactttggtgataattcttgaatttatgacccgtgctgttaggaagcttttgcaaaaggcggaaatctgaccctcggagggaacttgactgtggcggttgggcccttgggaaggaacttggaaggaaacgtggccctgagaagctccgctgccgtcttcacgtactgcaagtcaaggggactctttgcaggcgtgtctttagaagggagctgtttgattgaaaggaaagaaactaatagaaaattttattgt

SEQ ID NO: 673 - DNA, 2011 bp, Homo sapiens
  SIMILAR (147)..(437): 981254mologous to Homo sapiens Human epidermal protein- 5,accession number AAY44988,Smith-Waterman Score=479.
  misc_feature (1)...(2011): n = a,t,c or g
gcggacgcgtgggctggaaacaacccaattgtctatcaacagtgactggaaggacaaattgtgctatgtccacacattagaataccagttggcagtcaaaaaggaagagctgatctgtgcagcaatttgagtctcagtaatttcatgtgaataaccctataccttccaatttgaaatcagaagcaaaaaaggctgccaaaatattaagagaattcacagaaataacttccagaaatggacctgataagatcattcctgctcacgtaattgcgaaggctaaaggccttgcaattctgtctgtgatcaaagccgggttcctggtgactgccagaggaggcagcgggattgtagtggcgcgccttccagatggaaaatggtctgcaccctcagccattgggatagctggccttggtggaggatttgaaataggaattgagacacatttacagctacatattccctctgagcattgccctggctgccttccataagtgtggagtgccactccagctttcttaggttgccatctgcatgacacatctttctccatccttttactgtcaatctaatggtatcagacttggtgataattctgaattatgaccgtgctgtagaagcttttgcaaaaggcggaaatctgaccctcggagggaacttgactgtggcggttgggcccttgggaaggaacttggaaggaaacgtggccctgagaagctccgctgccgtcttcacgtactgcaagtcaaggggactctttgcaggcgtgtctttagaagggagctgtttgattgaaaggaaagaaactaatagaaaattttattgtcaagatatccgagcttatgacattttatttggagatacaccgcggcctgctcaagccgaagatctttatgaaaatcttgattcctttactgaaaagtatgaaaatgaaggacaacgaatcaatgcaagaaaagcagcaagggagcagaggaagtcttctgctaaagaattacctccaaagccattgtcaagaccacagcagtcatctgcaccagtccagctgaactctggctctcaaagtaacagaaatgaatataagctctatcctggactttccagctatcatgagagagttggcaatttttatcaacccatagatttgacagcgctgtattcatttgaaggacagcagcctggggatttgaattttcaagctggagacagaatcacagttatatcaaaaacagattcacattttgattggtgggaaggaaaacttcgaggtcaaactggcatttttccagccaactacgtaaccatgaattaaagcgtatactattttcttctttgagaattacaaaaaaattatttctacactgacaggatttactagttaagcaatgtttaatataaattttaaaaaacttctgttctacaaaatttccattccgtatgtaaaagattttgtttttctatataaaaagagctgactgacatatctttaaatactttgtactaactttatccaccacttactgtgtcatagaatatcatacagtttatacgctccatagttctcttgtgaacacttcaaaccatcgctaagcatttggatctgggccatgtatatggtagctgtgttttaatttgagaatcttgagggtagagccacaaatttcaattcttaccatttcccatttngccaaagtggctagagaaaaaagaaatccagcttaaataaggtattaagtaaatgttaaagttcgtaggtatttaattagaatataaatccttagaaattgtctttataccttcaaaaattatactatgcatttatcatagaaatgtgattacaaagaagtctgactaccatgtctttaaacatatggcatctctcatctttccttcccttatgggggctacatttgttcatttccagcagtagcattaaacttacggtgacaatggtagacttgtctctaaataaaatttttaaatgtttactaaaaaaaaaaaaaaaaaagggggg

SEQ ID NO: 674 - DNA, 401 bp, Homo sapiens
  SIMILAR (1)..(192): 931254mologous to Homo sapiens activin type I receptor,accession number U14722,Smith-Waterman Score=309.
ctccaggatcttgtctacgatctctccacctcagggtctggctcagggttacccctctttgtccagcgcacagtggcccgaaccatcgttttacaagagattattggcaagggtcggtttggggaagtatggcggggccgctggaggggtggtgatgtggctgtgaaaatattctcttcccagagtcacaagtagcctctgggatctgccaacacacgtccactcccaagccactagcccactccccagttggcccttctgcccttaccccacacacagtccaactcttccacctctggggaagatggagcaggtctttgggaagctcccacacccacctctgccactcttaacactaagtgagagttggggagaaactgaagccgtgtttttggcccccc

SEQ ID NO: 675 - DNA, 459 bp, Homo sapiens
tggggggaccgtctttacccctgctgacctcccacctatccgccctgcagcagaaccttggcggtttataggtaatgatggagcaggtctttgggaagctcccacacccacctctgccactcttaacactaagtgagagttggggagaaactgaagccgtgtttttggccccccgaggctaaccctgatccatagtgctacctgcacctctggattctggattcacagaccaagtccaagcccgttcttacgtcgccataaaggcccccgaacggcattctcggtacttctgtttgtttttgtacattttattagaaaggactgtaaaatagccacttagacactttacctcttcagtatgcaaatgtaaataaattgtaatataggaaatcttttgttttaatataagaatgagcctgtccaatttctgctgtacattattaaaagttttattcacag

SEQ ID NO: 676 - DNA, 1995 bp, Homo sapiens
  misc_feature (1)...(1995): n = a,t,c or g
ttttttttttttttttttgtgaataaaaacttttaataatgtacagcagaaattggacaggctcattcttatattaaaacaaaagatttcctatattacaatttatttacatttgcatactgaagaggtaaagtgtctaagtggctattttacagtcctttctaataaaatcgtacaaaaacaaacagaagtaccgaggaatgccgttcgggggcctttatggcgtacgtaaggaacgggcttgggacttggtctgtgaatccagaatccagagggtgcaggtagcactatgggatcagggttagcctcggggggccaaaaacacgggctttcagtttcttcccaactttcacttaggtgttaaggagtgggcagagggtggggtgtggggagcttccccaaaggacctgctcccatcttcccccagagggtggaagagttggactgtgtgtgggggtaaggggcagaagggccaactgggggagtggggctagtgggcttggggagtggacgtgtgttggcagatcccagaggctacttgtgactctgggaagaggagtttaagttccatcattacctataaaccaccaaggttctgctggcagggcggataggtgggaggtcagcaggggtaaagacggtccccccaatgacacaatggtatttaaaccgaaatttagtggccattaaatttggccccaaaggttaggggaagatctcctttaatgcaaggaaagaagccaataatcagttcaaataaaatagaagggcccaggagcactggggagcctgagggcagggacagggctctccctcctccacaagctttggcagagaactgctgggttggaggcagagatgctctaaggctacatacacaatacaccctcccctggggacaggaagggggctcagaatgaatgcagtgatttgaggtcgtcgactggggttctaaaccccaggtctcatcacccgcccctggtctctttgtggagggggttgtgggggttcctctttcttcagtgatcttatataagaacaataattctaggctcaaaagggtcgtagaacccaattatgaaaccttctggtctcnaaaaacaggcatctacttactttgaatcagctctttttacagtgctcccaggagtaggacccaagcatgtccttgtccaccagatgtattcccagcaccctggcaccccagcaggcacttcaccccacatttgttgaataaatcccccggagagggtacaacccagctggacagtgccaagaaagggcccctagagcaaaaacccactcaaggaattgggggtggggacaaaatacggagagagactgaagcctcagggcaaagaggaactcctcactgcctgagtgggaacaggctcaggtgcaaggacaaacatttcccagtgtgattgagctatgtgcgttcaattggataatttttttttttagggatttctttaaaaacaaatagatttgagaggtaattcacagagatggttttccttttacaaaaacttaatatttaacaacattaaaaaaaagttaaaatccaaaccctcccaataaaattaaaaaaagaaatcaaaccactccagttaaaagttatggcttcaaagttattatatacctaagatatgctggccaaatcaccacccacagccgtgcttctaggcttcgttaaatactatactcaggttaaataacatgttcggctcaggctgttcccttcagtagggctcctgaagtggatgcaaacctctcaccttccctccaccctgatcagacagtccagtaaaagaagacccatgcagatgcctccctcccaccccagactccctccccactccttgcccgcccttcccttccccaccccaaacccaccaccaccaaaaatatacactgctgtttccaggatctgggagatgaaagacagatgtaacattccaatctgagtcccgagatctggcttcacattcctcg

SEQ ID NO: 677 - DNA, 2232 bp, Homo sapiens
  SIMILAR (188)..(1375): 531254mologous to Homo sapiens vacuolar proton- ATPase,accession number X69151,Smith-Waterman Score=798.
cccacgcgtccgggcttgggtaaaggaagccgttttgccggagccttaggtcgggaagggatggatcgctgagcccatagcgtccgctaggcttgtctgcctcggtacctgttactgctgctacttcctcgtttgacaccttcctggaatctctcttgatttttgaggaaataccctagtaacaaacatgactgagttctggcttatatctgctccctggggagaaaaccctgtcagcaaacatgggagaaattgcatgcggcaacttcaaagaacaataatcttgctgtcacttccaagttcaataattcctgactttaaaggttgggcacgttgggatgtcttggttgggcttgtcagatgaactgggctaaactgggatgcattttgtaggaagggagttggttaaaggaaagtaggctccaattacatgggcttgatgtattggaagatagcaaagacaaagttcaagagaatctgttggcttaatgggagtggacttgggttaccttatataaccaaggttcccagtggggacatggccaaatatccaatcaagcagtccctgaaaaatatttctgaaataattgccaagggagtaactcagattgataatgacctgaaatctcgagcatctgcatacaataacctgaaaggaaatcttcagaatttggaacgaaagaatgcaggaagtttgctaactagaagtctagcagaaattgtgaagaaggatgactttgttcttgattcagagtatctcgtcacattactggtagtagttcccaagttaaaccacaacgactggattaagcagtattgaaacactagccgaaatggtagttccaaggtctagcaatgttctttcagaggaccaagacagttacctgtgtaatgtcaccttgtttagggaagggcagttgatgactttcaggacacaaagccaggggaaaacaaatttcattgttcgtgacttccagtataatgaagaggaggatgaaagcagataagaaaagaaatggaccgggcttctaccggataagaaaaaacaatttggacccacttgtacggtgggctgaaagtgaattttagtgaagcatttattgcatggattcacgtgaaagcattacgggttttcgttgagtctgttttaaggtatggcttgccagtgaacttacacacacatgatatttcaccgcaataacaacccttttaagccactgagacaagtattacatgaatcgtatatacatttagacagcagtgcaagcagctattattgatgctcctatggatattccagggttaaaacctgagtcaacaagaatactacccttatgtgtactacaagattgattgcaacttgctgaaattcaagtgaaaatgggctcctcccccagacaatcctggtccttgtgtttgtgtgtgctaacagaaaataagttgcagtatgggtcgtaccttttaactccagtatccttggctggcttcttaccccccctttccctaggtgaattctcccacagtggtctgtatctcaacattttctttttaaaggaaaaaatatatatatatagtttccttttattggatccaggtctgtaaatgtgtacctaaaaaaatccagagtttatttaataaacagaataagtttatttaaaagagaaggtccccttcccttattgatatccatggtatgccattaattcccatttgttactattgtgcacaaaagccctgttcacaggggaatggtgtaaacatttatactgttttgttcactgtatttagtagacataactgttgaataggtagttgatccatgatgtaaagaatatgtgaccatcttcaggtatggggatttctgaacggtttcaaatttcaatcaatgaagcactgtcaaaacccacagggggagaataaaattacctgtgcaaaggtgtattgtggtgtgtgtaacttaagattacagttctgtttgagagttaaatgatgtcatagctcacttgctatgctgcttccaggattttgttatatgctgaggtgtaaccatttgtgttgtctgactttcgtatgatttaattgagccaaatttgggtcagaacacaaatttgaagatgacttttcagtatatgatgggtatttacatttgaacactagaattttaggtctctcaaataattaagaatagagccagttttgaataaagtctagcagaactatgaaaaaaaaaaa

SEQ ID NO: 678 - DNA, 1133 bp, Homo sapiens
  SIMILAR (939)..(1130): 631254mologous to Homo sapiens putative p150,accession number U93569,Smith-Waterman Score=198.
gggtcgacccacgcgtgcgacctcttcaaagaataaatagcacaggacctataaaacaaaaatacaccttaaaaagcaaaaacaaagtacgcaggcaacaaagagccggatgaatgcagtggtacctcacatatcaatactgacattgaatgtaaatggcctaaatgttccacttaaaagatacagagtggcataatggataagaatttaccaacaaactatctgctgccttcaggagactcacctaacacctaacacataaggactcacataaactgaaagtaaaggggtggaaaaaaggcatttcatgcaaatggacaccaaaagcaagcaggagtagctattcttacatcggacaaaacaaactttaaagcaacagcagttaaaaaagataaagagggacattatataatggtaaaaggccttgaccaacaggaaaatatcacaatcctaaacatatatgcacctaacactggagctcccaaatttatgaaacaattactaatagatgtaagaaatgagatagacagcaacacaataatagcaggggacttcaatactccactgacagcactagacaggtcatcaattcagaaagtcaacaaagaaacaatggatttaaactataccttggaacaaatggacttaaaggatatatacagaacactccatccaacaactgcagaatacacaatctattcaacagtgcatggaacattctccaagatagactatatgacaggtcacaaaacgagcctcaataaatttaagaaaagtgaaattatatcaagcagtctgtcagaccacagtggaataaaactggaaatcgactccaaaaggaaccatcaaaaccatgcaaatacatggaaattaaataacctgctcctgaatgagcactgggtcaaaaacaaaatcaagatggaaattaaaacattcttgaactgaatgacaataatggcacagcctatcaaaacctctgggatacagcaaaggcggtgctaagaggaaagttcacagccctaaacgcctacatcaaaaagtatgaaagagcacagacagacaatctaaggtcacacctcaaggaactagagaaacaacaaaccaaacccaaatccagcagaagaaaaaaaaaa

SEQ ID NO: 679 - DNA, 1050 bp, Homo sapiens
  SIMILAR (537)..(4): 1001254mologous to Homo sapiens hexokinase IR,accession number AF016365,Smith-Waterman Score=887.
ttagctgcttgcctctgtgcgtaaccgcacgcccacggccgtgatgagggcggcccccttgccgctgccatcctcagacaggaggaaggacacgttacattttggtgacagttccttcaccgtctggtgcatgattctggagaagtgtggatgaagcttgtagagtgtcccgtccactcccacagtcacattcagacggtccagtcctctgttctcgcggatcttatccacaaccgcagccatgcctgcgccacacagctgtgcggccctcctggacaccaccccgcacactgtcttgacgaggatactgtcatcgcaggtgctattcagacctagctgctggaggatagcccggacctggagcagtgctaatcggtcactctcgatctgagagagaaacttggtctcaaagatgccccgggtcttcagcgtctcagagatctgccctcggaagaggaatcccttcttggtgaagtcgattaagatgttgcggacgatttcacccaggtacataccactgatcatcttctcatacctgggctccagccaggaaagcactaacccgtagcccctggaaagccgcaggctggccaggagctctggtggctgggctggaatcacaggcactcccatgaacattttcacagggccagatcctgggccatctgagaggtctgcacaacccagggtgtgggacagcacctgctgccttaagagcaactgctggttccggaaggtcaaggccaccacgccaccaatgagctccatgatgaggcagatcccaaggatgtacatgaatgcttggagaaggtacaggttgtcacggagggacgccagcacaccaatgaaggagaccatgaacatgacgacgcccaggaggatgaggatgatggctggagccaggaaggcactttcaagggttttatatttctgccgctcaacctctgcatagatgcccacagacaggaccagggccccaatcagacctgtaatcccagcactttgggaggccgaggcgggcagatcacgaggccaggagatcgagaccat

SEQ ID NO: 680 - DNA, 595 bp, Homo sapiens
  SIMILAR (1)..(594): 1001254mologous to Homo sapiens dJ837O21.11 (gamma- glutamylcysteine synthethase light subunit),accession number AL117351,Smith-Waterman Score=1037.
atgggcaccgacagccgcgcggccaaggcgctcctggcgcgggcccgcaccctgcacctgcagacggggaacctgctgaactggggccgcctgcggaagaagtgcccgtccacgcacagcgaggagcttcatgattgtatccaaaaaaccttgaatgaatggagttcccaaatcaacccagatttggtcagggagtttccagatgtcttggaatgcactgtatctcatgcagtagaaaagataaatcctgatgaaagagaagaaatgaaagtttctgcctgttcagtccttggagttgcacagctggattctgtgatcattgcttcacctcctattgaagatggagttaatctttccttggagcatttacagccttactgggaggaattagaaaacttagttcagagcaaaaagattgttgccataggtacctctgatctagacaaaacacagttggaacagctgtatcagtgggcacaggtaaaaccaaatagtaaccaagttaatcttgcctcctgctgtgtgatgccaccagatttgactgcatttgctaaacaatttgacatacagctgttgactcacaatgatccaaaag

SEQ ID NO: 681 - DNA, 2808 bp, Homo sapiens
  SIMILAR (465)..(554): 801254mologous to Homo sapiens dJ837O21.11 (gamma- glutamylcysteine synthethase light subunit),accession number AL117351,Smith-Waterman Score=119.
ggcacgaggctgcggccgcagtagccggagccggagccgcagccaccggtgccttcctttcccgccgccgcccagccgccgtccggcctccctcgggcccgagcgcagaccaggctccagccgcgcggcgccggcagcctcgcgctccctctcgggtctctctcgggcctcgggcaccgcgtcctgtgggcggccgcctgcctgcccgcccgcccgcagccccttgcctgccggcccctgggcggcccgtgccatgggcaccgacagccgcgcggccaaggcgctcctggcgcgggcccgcaccctgcacctgcagacggggaacctgctgaactggggccgcctgcggaagaagtgcccgtccacgcacagcgaggagcttcatgattgtatccaaaaaaccttgaatgaatggagttcccaaatcaacccagatttggtcagggagtttccagatgacctccgaatgcactgtatctcatgcagtagaaaagataaatcctgatgaaagagaagaaatgaaagtttctgcaaaactgttcattgtaggaatcaaactctttcatcatcaactaggaaggtgcagttgacatgggcctgttcagtccttgggagtttgcacagctgggattcttgtggatccattggctttcacctcctatttgaaaggatgggggtttaatctttccttgggagcatttacagccttactgggagggaatttagaaaaacttagttcagaggcaaaaaggattgttgccatagggtacctctgatctagacaaaacacagttggaacagctgtatcagtgggcacaggtaaaaccaaatagtaaccaagttaatcttgcctcctgctgtgtgatgccaccagatttgactgcatttgctaaacaatttgacatacagctgttgacttcacaatgatccaaaagaactggctttctggaaggcaagtttccaaggaaggctctttcagggaaaggcatttcctggacatttcaagcggcacggagtggggtgccgctgtgggcttactgcggtattcggtcattgtgaaaagtagaggaattatcaaatcaaaaggctacattttacaagctaaaagaaggggttcttaactgacttaggagcataacttacctgtaatttccttcaatatgagagaaaattgagatgtgtaaaaatctagttactgccctgtaaatggtgtccattgagggccagatatttctttcgtccatatttgacagtaatgttgtctgtccaagttttaaatacttatctttgcctccataatcaatcccattctccatgaacctctgtattgcctttcccttaaactaattggttttcctaattggaaattggccccataagggaaaatccctggcaatatattttcccccttatttttatggccctaatataaatccaagaaaattggtggttagatatattttggcctaggtatccagggtaatgtatatacatattttttatttccaaaaaaaaattcattaattgcttcttaactcttattataaccaagcaatttaattacaattgttaaaactgaaatactggaagaagatatttttcctgtcattgatgagatatatcagagtaactggagtagctgggatttactagtagtgtaaataaaattcactcttcaatacatgaatggaaacttaaatttttttttatgtgtccttgcttatagtttagctgtaataatttaaccttgtattcttgcgccatattctgtctttttattacttataaagacaaaccaaagtaaatctggaaaggagactagaagctttgaaattattgtttggggggttttataaaagcaactactgtcacctccctcccgattctttttaaattatttgatccctccctagtatatattgctactcattcaagaatcctcaataagtattgagtatttaccatatgttgggatactgtgggctctggagagaggagggggcaatagagctaggaattaagaatcagttgagtaaaatgtgtaatatttattccccattaataactgactaggaaggactaaaagccagaaaggggatgaaaaaaaaatcctttaattcagggccgacattatctacttaaacaacttttgagatatggtcttaattattttcaaagcagaataatataattgacagtttatagctaaaagagactatataggtcatttagtataattctttcattagtttaaggaaccacaaaattcgcaaataaataagctatgaactttgatgtacactataaatctccttaattctataaatttgtgtctgtaaccctgaaatagtttgaaaacttctttaaaaatctcttgtatttcatccgggcgcagtggctcacacctgtaatccccagcactttgggaggccgaggtgggcagatcacgaggtcaggagtttgagaccagcctgaccaacatggtaaaaccccatctctactaaaatacaaaaattggctgggcgtggtggcactcgcctgtaatctcagctacttgggaggctgaggcaggagaatcgcttgaacccgggaggcggaggttacagtgagccgagatcacatcactgcactccagcctgggcgacagagcgagactccatctcaaaaaaaaaaaaaaactcttgtatctcaatatttttaaaccacaggcctaaataaaactaattttgctcaagttttctcaacctagggaaaaagaactatggttccatattcaaaataaatattatagacccttttcctaagaaa

SEQ ID NO: 682 - DNA, 552 bp, Homo sapiens
  SIMILAR (3)..(515): 921254mologous to Homo sapiens antigen NY-CO-33,accession number AF039698,Smith-Waterman Score=821.
ggaaatttgagcccagcaccctgtacccgtacctgcgtgaggaggacctggacattctcaagtccctggagaataccgtctccacggccattagcaaagctcagaatggtgcgccctcatggggtggctaccccagcatccatgcagcctaccagctcccgggcaccgtgaagccactgccggcggccgtgcagagcgtgcaggtgcagccgtcctatgctggcggcgtgaagtcgctgtcttccgccgagcacaacgccctcctgcactccccagggagcctcacgcccccaccgcacaagagcaacgtgtctgccatggaggagctggtggagaaggtcacgggcaaggtcaacatcaagaaggaggagagaccccctgagaaggagaagagctccctggccaaggctgcgtcccccatagcaaaagagaataaagatttcccgaaaacggaggaagtcagcggcaaaccacagaagaagggccctgaggcgagacttggaaggccaaaaaggagggaccgctggacgttcaaacccaaattgcacagag

SEQ ID NO: 683 - DNA, 3725 bp, Homo sapiens
  SIMILAR (1474)..(2280): 661254mologous to Mus musculus zinc finger protein,accession number AF191309,Smith-Waterman Score=830.
  misc_feature (1)...(3725): n = a,t,c or g
tggagatggaggggaaggaggatgcccagaaggtgctgaagtgcatgtactgtggacactcctttgagtccttgcaggacctcagcgttcacatgatcaaaaccaagcattaccagaaagtgcctctgaaggagccagtgccagccatcaccaaactggtcccctccaccaaaaagcgggcgcttcaggacctggcgcccccctgctcccctgagccagcaggaatggccgcagaggtggccctgagtgagtcagccaaggatcagaaagcagcgaacccgtacgtcacgcccaataaccgctatggctaccagaatggcgccagctacacctggcagtttgaggcccgcaaggcgcaaatactcaagtgcatggagtgtggcagctcccacgacacgctgcaggagctcaccgcccacatgatggtcaccgggcacttcctgaaagtgaccacctcggcttctaagaagggcaagcagttggtgctggaccctgtggtggaagagaagatccagtccatcccactaccgcccaccacccacacgcggctgccggcctccagcatcaaaaagcagcccgactctcccgcggggtccacgacttctgaagaaaagaaagagccagagaaggagaagccgcctgtggctggcgacgcggagaagatcaaggaggacagtgaggacagcttggagaaatttgagcccagcaccctgtacccgtacctgcgtgaggaggacctggacgacagccccaagggagggctggacattctcaagtccctggagaataccgtctccacggtcattaacaaagctcagaatggtgcgccctcatggggtggataccccagcatccatgcagcctaccagctcccgggcaccgtgaagccactgccggcggccgtgcagagcgtgcaggtgcagacgtcctatgctggcggcgtgaagtcgctgtcttccgccgagcacaacgccctcctgcactccccagggagcctcacgcccccaccgcacaagagcaacgtgtctgccatggaggagctggtggagaaggtcacgggcaaggtcaacatcaagaaggaggagagaccccctgagaaggagaagagctccctggccaaggctgcgtcccccatagcaaaagagaataaagatttcccgaaaacggaggaagtcagcggcaaaccacagaagaagggccctgaggccgagacttgggaagccaaaaaggagggaccgctggacgttcacaccccaaatggcacagagcctctcaaagcaaaggtcaccaacggctgtaacaacctggggatcatcatggaccactcaccggagccttccttcatcaacccgctgagcgctttgcagtccatcatgaacacccacctgggcaaggtgtccaagcccgtgagtccctcgctggacccgctggcgatgctgtacaagatcagcaacagcatgctggacaagcacagtgtaccccgccacccctgtgaagcaggccgatgccatcgaccgctactattatgaaaacagcgaccagcccattgacttaaccaagtccaagaacaagccgctggtgtccagcgtggctgattcggtggcatcacctctgcgggagagcgcactcatggacatctccgacatggtgaaaaacctcacaggccgcctgacgcccaagtcctccacgccctccacagtttcagagaagtccgatgctgatggcagcagctttgaggaggcgttggacgagctgtcaccggtccacaagaggaagggccggcagtccaactggaacccgcagcaccttctcatcctgcaggcccagttcgcctcgagcttgcgnggagaccacagaaggcaagtacatcatgttcggacttgggcccacaggagagggtgcacatcttcgaagtttactgggctctccatgaccaccatcagccactggctggccaatgttgaagttaccagtttgaggaggacaggggggaacgaaattcctaaaagaacctgggacacaggggcatcctgttttctttttgcaacgattgtgcctctcagttcagaactgcttctacatacataagtcattttggagacacacttggggcttcagcctgaaggatctctccaagctgccactcaatcagattcaaagacagcaggaatgtttgaaaagtcctcaccaacaaaactctggggcccactgggggccaccgaggaagacttgggctccacattccaatgtaagctctgcaaccggacttttgcgaagcaagcacgcagtcaaactgcaccttagtaagacccacggcaagtctcccgaggaccacctgatctatgtgactgagttggagaaacagtagcgtccagggtatgcaagagaccgcgggaacaattgccacttaaacgtcgtcgagctgcactagggcctggcctgagcctctgaaaatcagtctttcctttgttgctgggccngcctctctggaccttggttttcttaccccatattttgtatatttatatgcctcctctgtcccgatcctgtgcatgttatttttcctttttcccgtgagtcaaagtctgacctttattttcaacatctgttcttggtgttaagctatcttttgtaggaaatagtggggcacactactcagagacattatttagcagtaaagaaagacacaaataacaatgataaaaagacatcctaaaatgggtgaagttgccatgacaataaaggtcataggaacctgggtaggtgtcaaatttaaccctttgagggactgttaattgccatttctgtgcctttcacttgaaaaaaaaaaaagaagaaaaaaaggcttaaaggcatttcattcagatcaaaagctgtgtcagacacaaaacttatttaataattaaaaaatgagcttttatatgcagaactggtttgtgaggaaacatgcatgcagctgttgggaagatagaaagcctgcctaggactcacggggttcggaagccacacctctacatgtctaaaacaaaaaacaacaacaacagatacccccactcgccactatgcccaaacccctctggatgctgaaaaatgccactttcggcaaaaaaaaaaatgtatgcaagctattatttaaaaatgtgtaaaaatgctatttcttttttcctgtaaaatattgcagtttatagttatttacaaatgtaagctttggtacaagctgacctttctatagcgtgctgcattggtaaatgaaaaaaaatggggcaaaccgttggagtcctttccttggaaattgcccagcatcagcttaaaaaactccctggtatggttaccatatcggtacccatttttaatctcttccaactttctttgtaccttctgggctgtatgctttctcttttaactttttatagtggtcattttatattaaatttctgtgtatataatgtaaaaccacaattttttgaataaaatttagttcctgcagcttgatttaaatagaggacttttactggcacctgcatctctccagatgcatgtactcagagggactgtcagacaaaaataaatacataaaaacaacgcaagcaatgcactattaattatacattttgatgttctatcattaatattgtacagtacattttggttcacacaattaaatccactgttttctcagatgtaaaataaacccacatgcagttcttgatttacacggaaaaaaa

SEQ ID NO: 684 - DNA, 1116 bp, Homo sapiens
  SIMILAR (513)..(262): 521254mologous to Homo sapiens Human secreted protein, SEQ ID NO: 7888,accession number AAG03807,Smith-Waterman Score=195.
cccccatttaaaggggcgacatttacactcacctttaaaatgggaaagtctatatatgcgctacttgggcccactaatatccctgtgaaatatctacccttaaaaatgtgggagaatccttagaactcttaatataataccgtgaattataaatcccaccctgaaggccagagcatgtgttggtcaatgcctgtaatcacagcaacctttgggaacccgaggcgggttgatcaacccctgaggtcaggagttcaagacccagcctggccaacatggcaaaattccatctctactaaaaatacaaaaattagctgggcatgggtggtgcatgcctgtaatcccagctacttgggaggctgaggaaggagaattgcttgaacccccaggaggcggaggttgcagtgagccgagttcgcgccactgcactcccagcctgggcgatagcgtgagacaccatctaaaaaataaaaaaataaaaaccccccaaaatgagaaattaaatatttaaacatattcaattacaatttttactagacaaatcttataatccacatgccttctctgaggttttcatctgtttgttttttttaaaaataattatagcaaatgctttagtacaaagacttagtccaagactattattgttttccaatttaagggtgaagcattctattaataaaactcactgtaaaaacatttacaattcagtgtaaaattactacttactaacaatgcatataattcacctcctcctactgtctacaaaaaaggaaatttccactttttatgttttaaaattgattcaaacacttgtatagaggatttattaaacctgctcataaccacttcatagaaagtgtcagcaccatctcatactggtgcatcacggtaaaagaaaacattttagaaacaaaaccactaaaaccaacagtttaaatgactatttacagagcattaggtctccaagttaatatctccccactagagttttacaggcttcctcatatttctgaggcttaacaaaaataattttatagctgccactttgttccaaagacaaatttcctaataaaataaatttctatagaactggttcagtaaaataaaatctctccc

SEQ ID NO: 685 - DNA, 5373 bp, Homo sapiens
  SIMILAR (1198)..(1148): 1001254mologous to Homo sapiens rapa-1,accession number AJ277275,Smith-Waterman Score=81.
atctgaagccatttttgttggccttcaatgctatttgtcttgtatttgctatcgtatgtgttagaaaactatttcttatagctaacatcaaggtaaacttcagtccagcggatgtgaattacagcaaaatcccagtgaatgcggtttcacagtacttccaagtggcacaaagtaatttcagaactccactaatcattaacagcgttgcaaaaaagaataggcttttctgatttgttttttgggcaatagaacactttctggcattctaggtacttcaatatgtgtccttcaatcaccctgaagtgaaagcagtcctggcaacttaatatttgcctccagatgggtctctagtcagttcatgctgaaacacagctctgccacccacaacttggagctgaccagcccccagggaacatggaagaggacaggacacacctgttctagaaaaccaggtcctcagtaaacactgctgggaatgaaagcctaaaattatacagtactccattcctgtgaacgggccaaaggatgacgggcaacacaggggaaacctgttttcacatttggtcatctcctcacatgtcgtgtgagctggaggagagccgtgtaaacacgagggccttgctttgccccctggaaagctgccccctagcatagtatctcccaggcaaagatgccatgctcactgcaaactatggaatgaggtcagaacagaatcaaagtaacgcttgatgggaaaagttggccccaagaccccagtactaagagggtcgcctgcgtctcacacacacacactcacagcaagctttgggataaaaggcaaccgggatggttgacatctgaatgcaatggaacatgaaggtcagcttcagtccctactgggaatgatttcatgagaaggtagcccagatgaaacacctcttaaagatagttgtgccaattatttattcccccaaccccccacaaaaacaaatttttttaaataaaaggaaaagaaataggatttttttttctaaacctgaataaaatgaccacttttaaaacaggtagtttaaaagggttacaaaacaagcaggcagtccaggtttcctgattaatgaagatggaggccgtgggttttcactgtctctaagtgacacacagggctttatagttctgcgtcaccctgaagcaagactgaatcttgatcatccaagagaagaatcggtgtccacaacttcagcctcttccatgacacctcccaactgctggacgacgtcgtcgtcgagggatgtccacatccttgatgggttttttgatcagactcagctggtccaggggacagcagccccggcgcccccacgggctcccgtagtcctctcaatcgtggctgccatctcagctgcaaaagccgccttctgagccttttgcctctgttgttcctcctgctgcctgtgagttttcatgtgtgcatttcggcttttgatcttgaagaagactctagccttgctgatgtaactagggatgttttcgtggtagagtttcagaaaccacttgggcagcatctctcccaggtaatactccttttcatgctcgaggcacgaacagtacccactctgggtgcccaccaggcttctgcttcccagaggggatggcacctcgggccttggtcacctggttggtgcccccgtggatgcgggcatggccattcagtgcctgtcgggagctgaacacagccccacagttgggcatttcacagatgaaggagcctgagggctggcccagggcctgcaggggcggcccctccgtgggagccaggacggggacgggtggtggctccggggacttcggcacctcactctcttcttcttttgtggatttcctatcttcttccgggtcctcctcctcctcctcctctaactcttcttcttcttcacttgtcacacaatcgtcgatgatttctgccaggcgtgtccggtgtttccgccccagccgcatgatctttttccacgtgtagtagtactccacgcactgagccaccgtcttggacttcaccatcttctgtacaaaaataaagtctttgctgtaagtggctagtgctttgttaaacagttttctttctagggaggtccacttgtccgaacctgatttctggccccaaaagcagtgttcagttcccaggcctgtcgatttctgagaagcatgtcccttcatgtttccaaattgcttgccagatgcaactccactggtgatgtaacttcctggcccatcggcatagtggtaatttgctaaaggatgacattttaacctgacaggcttccgcagtagcagcatttccagagcaaccagtgtggccttgtgtgtgtcctgggccagggcagagatatcttggagttcagggatttctgcttggaatctcaagccaatgttgatgcgtggttcaacatctacagtctgctctccaggccctggggtgaccgtcacgttgctgccatcgatgctgttggagcgacacagcagcacccgtggtgtgggcgtcaggggcgtcaggggcagctgcgggtgggcgccagggccgtggccggagatgaggacattgctgaagagccccgagccctggcgcaccgggctcagcatgggtgggggcgtgtaagggggcagctcgtgggtggggtccaggagcaggtggtccccgaggacgcgcggggagcgcagctggctctggtacagggtggcgcccgagtaggaggcagcggggttcgggttgtaggagggcggcggcgggatgaagagaggttccggccggtgccggaactttttcttctcctgcacggtcttgaggggctcctcggctttgggcacactcggctgatgcttcctggggatttcctgccccatgggctcctctgctctgggctcctctccctccagagcttcaggctctgcccccttctgtttctccctcagcttctctgccttccatggtgccatcctggcctctaggagaggagtgagcacaggcatctcgtcgtccgacatcgagctggctggcttgtctctggcggagggggcggcaacggtgctgttggtgaacccctgagagctgggcttgggcgggagaagcttgacagggacagacacgggcatgaccataggcgtgaggctttctgcctcgggagggagctgtttgaggttgggggaggccctcattcccccgtgggaccgcatgtggccattcagggcaggcaggttcttgaactccttcaggcagatggagcatgtcagcttgttcttggcatcaaactgctccccaaacgctcctttgggttggccaccttccagggtcagcctgagcccagctcctccaaaagcctccccacttagagacatttgtgcaagttcctggggcagccgccgtactgcacgcttcagcagtttatcaggtttggctaaatctttattgaccatgcccatgggatgaggaagcaagtctgtactgttcactgctgcattctcaaaacctagctctatgcttggcacacagtaggcactcaataaatactggggccacatggcactgggagacagctgctgatgctgaggccccatgttgttgaggtggatcccactgggggataggagggggcgatgggggagggtgctgctgacccgggtcagatctgagctcgctgggtctcccattcctgtgtcaggaggccccaggtccccatgggagctcagcatggcctgggcctgtctgtcactagagtaggtcttcagctgactgtcctcacgctgctggtgctgggacaggtggctctgctggtagagggggtggctgtagggctgctggggctcctggtagtagtactgggacatggagcccaggggaatcagctggacagtgtgtgcctgctctggggtatactggtgagggtccctgtgataagaaggaggctgcaggtgcatctgttgctgctgctgctcttgcaagtgctgcatcatgggttggggctgataatactgaggtatctgcattgaaccctgccgctgctgcagctgtagctgctgcggctgctgctgctgtggcggcggctgtggctgtgatgggcgaatttgttgcggctgcgtctgtatttcttgcatggagatacgctgttgcccggcttgctgctgttgctgcggtgggtaatactggtgctgctgcatctgttgcatgtgctgtgacagcatctgtggggcctgcagtggctgtcctccctgcactggcacctgagccagaggctgctggtagtcataatacaggtgcccttgggtagggtgctgcccgacctgaagagctggtttggacagcccaccagtgaaaccagggtgaggctgctggggcacctgctggtagcgggaagggatagccggtgctgggggctccatgggcttctgagacagcagctggcggagagcactgtcaggggctccatccatcactgctgactgagtgtgcagcacctgggccatattgttgacctgaattcgcaggttttggttggcaaacacctgggtgaaagagtccagcttgtgtaagacaccgctggtaagcttctgggtccggatctcgctggcctgggagtaggtgtattggtagccatcagtgggctcagcctgggctggtgccccccacatcatgtttgagttggccaggtttccacgtagctggacatggtttccaggccctgcatgacttccccaccctccctgcctcgaggtatccatttggccaaggtttttggagccaacaggcaagcccagaccatcccgtgtatcttgagggaagtggggggagattggcgaggcctgaggggcatccattccgccccctgtaactgcattcccatagttgtggttcagcccgctgtggacgccaagtggtggctgttggtagaaaaggttctcactaccatgggccacatggttggtcttgtacagttgctggtcacccatgctgtctgccttggttgtgaacgtccagccacaaaaccataaaaaaggtaaataaaacaaacccaaaaggactgaaaccctgagaagctgagagaaaagtgtcagcactactccacggctgacatgtctgtgaacgtggctggagccaggtgttcctgttggcctgtaccactcatgtgcagggcggggggtttcacatcctctccctggctgaggtatagaccacacagcactgtggtgaggagacgtcgctcacaccttgacctccgcagatggctgagttgggggcctggttctgggggcttctcctgcggtcggccaatcatgctgctttcatgctgctggacaggtgggaagaggaggcctggtcctgtggggaaaagaaaaaggaaaggtcat

SEQ ID NO: 686 - DNA, 412 bp, Homo sapiens
ttttttttttttttttttgataaataaaaccaaacgtttatttacaccaaagaattccaacactggatctttcacatatgaaggacaaagtattatatatatacacacagcaaggggtggcggggctgtaacaagagagtttatagttttcccacaattacaggtctaccatttcagcttcaatggagatagtggctctgctcctacctctcaagatacatttacaagactgagacacacttccacaagagccactaggataaccccactgaagcgcttatggagtaaagtgatgtaagcgaccagcaagcagtccactggatggcatgtgagggaaggggacggtcggaggaaaagaaggtagaaagcttaaaatggaagtcagtgtggccacatctcccattagctctag

SEQ ID NO: 687 - DNA, 530 bp, Homo sapiens
  SIMILAR (113)..(529): 961254mologous to Mus musculus putative,accession number AK011501,Smith-Waterman Score=731.
ccgcttccaccacagtttgaagaaaacaggtctgaaacaaggtcttacccccagctgcttctgaacacagtgactgccagatctccaaacatcaagtccagctttgtccgccaacatcatcacactggcagacattgtaaaagaccctgtgtcacgaacccccgccttggtttttgaacacgtaaacaacacagacttcaagcaattgtaccagacgttaacagactatgatattcgattttacatgtatgagattctgaaggccctggattattgtcacagcatgggaattatgcacagagatgtcaagccccataatgtcatgattgatcatgagcacagaaagctacgactaatagactggggtttggctgagttttatcatcctggccaagaatataatgtccgagttgcttcccgatacttcaaaggtcctgagctacttgtagactatcagatgtacgattatagtttggatacgtggaggatgggttgtatgctggcaagtatgatcattcagaaggagccat

SEQ ID NO: 688 - DNA, 1836 bp, Homo sapiens
  SIMILAR (580)..(1275): 1001254mologous to Bos taurus casein kinase II alpha subunit,accession number M93665,Smith-Waterman Score=1257.
atgagaaggactcagcctgccgttactggaggggaccagattgaaagtgtgagacggggaatgcaggcagcctctagtaggaaaggccagtcccagctgacaaccagcaaggaagtgggaactcagtcctacagctgcaaggaactaaattcagccaatagcttgaatgaatgtggaagcaaattttccccagagtttccagcagggaacccacccactggataccctcatttagcccttagggtaatagccagtggagtaaagtttcacattgtgactttattttgcttatatggcgtggtaaaaaggtgtatagatgatgactatattgtaagagacagtactggaattccgatttctcttagaaatcaagatgactaccagctggttcgaaaattaggccgaggtaaatacagtgaagtatttgaagccatcaacatcacaaataatgaaaaagttgttgttaaaattctcaagccagtaaaaaagaagaaaattaagcgtgaaataaagattttggagaatttgagaggaggtcccaacatcatcacactggcagacattgtaaaagaccctgtgcaattgtaccagacgttaacagactatgatattcgattttacatgtatgagattctgaaggccctggattattgtcacagcatgggaattatgcacagagatgtcaagccccataatgtcatgattgatcatgagcacagaaagctacgactaatagactggggtttggctgagttttatcatcctggccaagaatataatgtccgagttgcttcccgatacttcaaaggtcctgagctacttgtagactatcagatgtacgattatagtttggatatgtggagtttgggttgtatgctggcaagtatgatctttcggaaggagccatttttccatggacatgacaattatgatcagttggtgaggatagccaaggttctggggacagaagatttatatgactatattgacaaatacaacattgaattagatccacgtttcaatgatatcttgggcagacactctcgaaagcgatgggaacgctttgtccacagtgaaaatcagcaccttgtcagccctgaggccttggatttcctggacaaactgctgcgatatgaccaccagtcacggcttactgcaagagaggcaatggagcacccctatttctacactgttgtgaaggaccaggctcgaatgggttcatctagcatgccagggggcagtacgcccgtcagcagcgccaatatgatgtcagggggttggtatctcgtgctcttctccagagattacaaaaatgtagcttctcaggggaggcaggaagaaaggaaggaaggaaagaaggaagggaggacccaatctataggagcagtggactgcttgctggtcgcttacatcactttactccataagcgcttcagtggggttatcctagtggctcttgtggaagtgtgtcttagttacatcaagatgttgaaaatctacccaaaatgcagacagatactaaaaacttctgttcattgtgactggtttagaagtggatacacagggagaggtcttctggaaaaggtcttctggagagctgagatcagaagacaatcaactggcttcaaatctaaggagagacaggcacaaaatggaagagatgacatgggcactggttacctggtaaacacaagtggacactggacccaacctggtaccagaaatgaaggaaatgtccctgcaggacccacagccctggatgatgcagcttcctcagacgacacaagccccagacattacctgggggatgctgaagaagacaactcaggaggctga

SEQ ID NO: 689 - DNA, 455 bp, Homo sapiens
  SIMILAR (120)..(143): 871254mologous to Mus musculus E6-AP ubiquitin protein ligase,accession number U96636,Smith-Waterman Score=37.
agaagtttggcgaaatatgagttattaagcctacgctcagatcaaggtagcagctagactggtgtgacaacctgtttttaatcagtgactcaaagctgtgatcaccctgatgtcaccgaatggccacagcttgtaaaagtgccagcaggtttattttttgttttgcaagccagctctgcctccttacagtatgacatctgatgctggagggtcgcactttcacaaatgagtcagctggtacatggggttatcatcaatttttagctcttctgtctgggagatacaagtttggaagcaatcttggggtacttacccacaaggctggtggagaccagatcaggagaacctcagtctgacgacattgaagctagccgaatgaagcgagcagctgcaaagcatctaatagaacgctactaccaccagttaactgaggggctgtggaaatgaagcctgca

SEQ ID NO: 690 - DNA, 430 bp, Homo sapiens
ggggttggtatctcgtgctcttctccagagattacaaaaatgtagcttctcaggggaggcaggaagaaaggaaggaaggaaagaaggaagggaggacccaatctataggagcagtggactgcttgctggtcgcttacatcactttactccataagcgcttcagtggggttatcctagtggctcttgtggaagtgtgtcttagttacatcaagatgttgaaaatctacccaaaatgcagacagatactaaaaacttctgttcattgtgactggtttagaagtggatacacagggagaggtcttctggaaaaggtcttctggagagctgagatcagaagacaatcaactggcttcaaatctaaggagagacaggcacaaaatggaagagatgacatgggcactggttacctggtaaacacaagtggacactg

SEQ ID NO: 691 - DNA, 2806 bp, Homo sapiens
  SIMILAR (407)..(739): 571254mologous to Arabidopsis thaliana putative casein kinase II catalytic (alpha) subunit,accession number AC004401,Smith- Waterman Score=306.
gcggccgccgccgctgccgcttccaccacagctctatcaaggcttgtcaagcagtgtgctcatcacatggtaaatcatagacagcgtggaacctcataaaatctgccaagaaacatcattcacccatactgactagtttcacatctctttgtttgaagaaaacagggtcctgaaacaagggtccttaccccccccagctgccttcctgaacacagtgactgcccagatctcccaaacatcaaagtcccaagctttgtcccgccaaccctgttctgaccatgtcggggaccccgtgcccaaagcagggcacagagtttaacacagatgttaatacacacagacctcgagaatactgggaatacgaagtcacatgtggtggaatggggaaatcaagatgactaccaacttggttcgaaaattaggccgaggtaaatacagtgaagtatttgaagccatcaacatcacaaataatgaaaaagttgttgttaaaattctcaagccagtaaaaaagaagaaaattaagcgtgaaaataaagattttgggaggaatttggagaggaggtcccaacatcatcacactggcagacatttgtaaaagaccctgtgtcacgaacccccgccctgggtttttgaacacgtaaacaacacagacttcaagcaattgtaccagacgttaacagactatgatattcgattttacatgtatgagattctgaaggccctggattattgtcacagcatgaggaattatgcacagagatgtcaagccccataatgtcatgattgatcatgagcacagaaagctatgactaatagactggggtttggctgagttttatcatcctggccaagaatataatgtccgagttgcttcccgatacttcaaaggtcctgagctacttgtagactatcagatgtacgattatagtttggatatgtggagtttgggttgtatgctggcaagtatgatctttcggaaggagccatttttccatggacatgacaattatgatcagttcggtgcagaatggccaaggttctggggacagaagatttatatgactatattgacaaatacaacattgaattagatccacgtttcaatggatatcttggcaagacactctcggaagccgatgggaaccgctttgtcaaacagtgaaaatcagcacccttgtcaagccctgaggccttggatttcctggacaaactgctgcgattatgacccaccaagtcacggcttacttgcaagagaggcaatggagcacccctatttcctacactgttgtgaaggaccaaggcctcgaaatgggtttcatctagcaatgccagggtgcagtacgcccgttcagcagcgcccaatatgatgtcagggatttcttcagtgccaacccccttttacccctggacctttggcaggctcaccagtgattgctgctgccaacccaccttgggatgctctgatatccagctgccgctggcgctcagcagtgaacggccctatctgtctcctgatgcctgagcagaggtgggggagtccaccctctccttgatgcagcttgcgcctggcggggaggggtgaaacacttcagaagcaccgtgtctgaaccgttgcttgtggatttatagtagttcagtcataaaaaaaaaaattataataggctgattttcttttttcatattttttgtaactcgaacttttcataactcaggggattccctgaaaaattacctgcaggtggaatatttcatggacaaattttttttttctcccctcccaaatttagttcctcatcacaaaagaacaaagataaaccagcctcaatccccggctgctgcatttaggtggagacttcttcccattcccaccattgttcctccaccgtcccacactttagggggttggtatctcgtgctcttctccagagattacaaaaatgtagcttctcaagggaagccaggattgaaagggaagaaggaaagaaggaagggaggacccaatctataggagcagtggactgctttgctggtcgcttacatcactttactccataaagcgcttcagtgggggttatcctagtgggctcttgtggaaagtgtgtcttagttacatcaagatgttgaaaatctacccaaaatgcagacagatactaaaaacttctgttcagtaagaatcatgtcttactgaatctaaccctaaatccaactcatttaatactttaatttttagttcagtttaaaatgttgataccttccctcccaggactccttaccttggcctttccctggtccatctcccgaacatgctgtgctccatagctggttagggagaggggagggccaaaatctttccttaggttttcctttggtcctggcccatttgggaattcatttaagttactgggccataccttactgctttttacaaaaggaaacaaaacattgtctgtacaggtttccatgctagagcttaatgggagatgtggccacactgacttcccattttaagcttttctaccttcttttcctccgaccggtcccctttccctcacatgccatccagtgagaagacctgctcctcaaccttgtaaatgtatcttgagaggtaggagcagagccactatctccgattgaagctgaaatggtagacctgtaattgtgggaaaactataaactctcttgttacagccccgccaccccttgctgtgtgtatatatataatactttgtccttcatatgtgaaagatccagtgttggaattctttggtgtaaataaacgtttggttttatttatcaaaaaaaaaaa

SEQ ID NO: 692 - DNA, 1568 bp, Homo sapiens
  SIMILAR (1256)..(993): 651254mologous to Homo sapiens PRO2550,accession number AF130089,Smith-Waterman Score=274.
  misc_feature (1)...(1568): n = a,t,c or g
aaaatcaaagcacagttgtccattaacacttataagttaattatgggtttatgagtctgtaatgttatatgctgcaaacatttactatgtaaacgtgaagtagccaataatatctcaatagtagtaacagtgatctttagcgacctttggaatagttaagcacaggtcattgtggaccatgaattcaggcctctgtactaaaatctatttcagggaatgttctgtctagtgatttgctcaccatttgatatataatgaattataggacaagtataagctgatctgctatagctgtccatcagagagaatacacgtggctataacatctataacaaaacgacgattcctctacaagaggctgtttctcactgctaacgttggtgtttctggcgtgggaagaaatgcacgaggcgtgcatggcgatgcacgttcagacagctgcattgtaagagttcctgtcatgcagtctgaaaagggaagaaacaggatggctttctgtagccacacctgtgaggcgtgatgaatgttgtaatattagattactgatttttctttttttgaaatacatttgaggtttaatcacatcctgtggaaagctgtaacttttaaggtagtccaatttccatgtccttgttccaaccgatggtaagccagaaactggaattgccctaatttttgccaacttggccattattggggattaatggtttaaatttttgggtaaaggaagtaatctcctttcattcattgtgacttttgttcttagggaagcagagaagactccccaagttcttataacctcattgtgcttccctaatttaaagccatgttgaggggctccattcccaattcctgggttcaaaggtgaattaaacccctatgttggagcaacttggaaaccgttatttgcaaaacattgcttgttacccatttagaaatatgtgcacttatcagcttgggtgcagtggctcacgtctgtaatcccagcacttttgggaggccgaggcaggtggatcacctgaggtcaggagttcgagaccagcctggccaacagggtgaaaccccgtctctactaaaagtacaaaaatttagctgggcgtggtggcggacgcctgtaatctcaggctacttgggaggctgaagcaggagaggtgctggaacctgggaggcggaggttgaagtgagccgagattgcgctattgcactccagctcgggcgacaactgcaagactccatctcaaaaaaataaaaataaaagaaaagaaagaaatatgtgcactacctaagttttgtctttagaaaaactatccacctataaaaaattaccttgacaaaaatagttccggtttgactaatcattttgtttctttaagtggtaagtgtatgcaaggtggatccttgatgagccaacattgcactgtggatacatatctatgtttacgcgctattagaacagaaggcgctgtatatagaaatgttgcttttngaagcaatatttgcaaaacacgcagacttctgtatctgtatttggaaaaaataaaacaggttcttgttgctatgtttcagtt

SEQ ID NO: 693 - DNA, 569 bp, Homo sapiens
  SIMILAR (5)..(460): 941254mologous to Homo sapiens gamma-globin,accession number M15386,Smith-Waterman Score=750.
agctcctagtccagacgccatgggtcatttcacagaggaggacaaggctactatcacaagcctgtggggcaaggtgaatgtggaagatgctggaggagaaaccctgggaaggctcctggttgtctacccatggacccagaggttctttgacagctttggcaacctgtcctctgcctctgccatcatgggcaaccccaaagtcaaggcacatggcaagaaggtgctgacttccttgggagatgccataaagcacctggatgatctcaagggcacctttgcccagctgagtgaactgcactgtgacaagctgcatgtggatcctgagaacttcaagctcctgggaaatgtgctggtgaccgttttggcaatccatttcggcaaagaattcacccctgaggtgcaagcttcctggcagacgatagtgactggactgggcaatgccctgtgcttcacaaaacacttggacttcatgtgcatgatgcaaagcttcaaggaatagcttattctgcagcactcaaatatacatctatctgctagagatcacgtgaactgcaagaaaaacgcctttt

SEQ ID NO: 694 - DNA, 746 bp, Homo sapiens
  SIMILAR (281)..(484): 501254mologous to Homo sapiens A-gamma globin,accession number J00176,Smith-Waterman Score=96.
  misc_feature (1)...(746): n = a,t,c or g
aattttgccctcgaggccaagaattcggcgagggcaataagctcctagtcccagacgcccatgggtcatttcacagaggaggaccaaggcttactatcaaaaagcctgtggggcaaaggttaaatgtggaaaaaatgctgggaaggaaaaaaacccccntgggaaaaggctcccccctggttgtccctaccccaatgggaccccaagaggttcctttgaacaagctttgggaaaaccttgtcccntcctgccctcctgccccatcaatgggcaaacccccccaaaagtcaaagggcaccatggcaaagaagggtgcctgaccttcccttgggaagatgcccataaagcccccctggatgatcctcaaagggcaccctttgccccagcctgaagtgaactgcactgtgacaagctgcatgtggatccttgagaacttcaagctccttgggaaatgtgctggtgaccgtttttggcaatccatttccggcaaagaattcacccctggaggttgcagggcttcctgggcagaagatgggtgactgcaagtggccagtgccctgttcctccaggataccactgagctcactggcccatgattgcagagcttttcaaggataaggcttttattcttgcaagcaattacaaataataaatctatttctgctaagagatcacacatgattttcttcagctcttttttttacatctttttaaatatatgagccacaaagggtttatattgagaa

SEQ ID NO: 695 - DNA, 393 bp, Homo sapiens
  SIMILAR (131)..(391): 901254mologous to Mus musculus J kappa RS-binding protein,accession number X17459,Smith-Waterman Score=409.
tttcgtgttgtgtctgagccgagtagtggaaggcggttggaaggaggtgtagcgtgagactggactgcccgcattgggtacatgcgcagtgccgctcgcgcgggccgcgccaatcctgcagcgccttcaacagtctccacgtacgtccctcaaagcgcgtcctaaaacccggataaccggagcgctccccatggaccacacggagggctcgcccgcggaggagccgcctgcgcatgctccatcgcctgggaaatttggtgagcggcctccacctaaacgacttactagggaagctatgcgaaattatttaaaagagcgaggggatcaaacagtacttattcttcatgcaaaagttgcacagaagtcatatggaaatgaaaaaaggtttttttg

SEQ ID NO: 696 - DNA, 381 bp, Homo sapiens
  SIMILAR (2)..(157): 1001254mologous to Mus musculus J kappa RS-binding protein,accession number X17459,Smith-Waterman Score=266.
  misc_feature (1)...(381): n = a,t,c or g
ggcactcccaagattgataattaggaaagttgataagcagaccgcattattggatgcagatgatcctgtgtcacaactccataaatgtgcattttaccttaaggatacagaaagaatgtatttgtgcctttctcaagaaagaataattcaatttcagttgaatgggcggtggggacgtaggcaatgcttgaacttacagggacagaatttcacttccaaatttacggagtgtgggtttgggggatgtaggaaggctggaaactatgttacaggtgtgggaggaggagtatggctcttgtgttcgtccccagacatttctggcatttccgaggaaggttgggagatggggtcccggncaaccagttccggggttcccgttaa

SEQ ID NO: 697 - DNA, 200 bp, Homo sapiens
  SIMILAR (87)..(200): 921254mologous to Halocynthia roretzi RBP-Jkappa protein,accession number AB003695,Smith-Waterman Score=187.
tatgcattgcctcaggaacaaaggtggctctgtttaatcgactacgatcccagacagttagtaccagatacttgcatgtagaaggagtggatgatgatgaatcagaaggagaagaattcacagtccgagatggctacatccattatggacaaacagtcaaacttgtgtgctcagttactggcatggcactcccaagattg

SEQ ID NO: 698 - DNA, 637 bp, Homo sapiens
  SIMILAR (166)..(576): 921254mologous to Mus musculus J kappa RS-binding protein,accession number X17459,Smith-Waterman Score=673.
atgcgcagtgccgctcgcgggccgcgccaatcctgcagcgccttcaacaggtttcgggcggcgaattccagttctccgggttttggggctccctgcgggaggcagtgctggatctgggaatctctaggaaaggaaagagcaaaggaggggaaagatggggggctgcagtctccacgtacgtccctcaaagagcgtcctaaaacccggataaccggagcgctccccatggaccacacggagggcttgcccgcggaggagccgcctgcgcatgctccatcgcctgggaaatttggtgagcggcctccacctaaacgacttactagggaagctatgcgaaattatttaaaagagcgaggggatcaaacagtacttattcttcatgcaaaagttgcacagaagtcatatggaaatgaaaaaaggtttttttgcccacctccttgtgtatatcttatgggcagcggatggaagaaaaaaaaagaacaaatggaacgcgatggttgttctgaacaagagtctcaaccgggtgcatttattgggataggaaatagtgaccaagaaatgcagcagcttaaactttggaaggaaagaactattgcacagccaaaacattgtatatatctgactcagacaagcgaaa

SEQ ID NO: 699 - DNA, 748 bp, Homo sapiens
  SIMILAR (198)..(746): 681254mologous to Xenopus laevis suppressor of hairless protein 1,accession number U60093,Smith-Waterman Score=589.
gaaggcagcgagcaggatcccctactctgcgggcggcgcgaggcgtctggctcttcgcggcggcggcgaggggaaagggagcgcgggggctgggtggaatcgaggagtgaggaaaaagggaaggggcgggggagagggaccagggaaggcgtcggggggaatctcgcgagggttggagttttggcgagagtttgtggaagatggcgcctgttgtgacagggaaatttggtgagcggcctccacctaaacgacttactagggaagctatgcgaaattatttaaaagagcgaggggatcaaacagtacttattcttcatgcaaaagttgcacagaagtcatatggaaatgaaaaaaggtttttttgcccacctccttgtgtatatcttatgggcagcggatggaagaaaaaaaaaagaacaaatggaacgcgatggttgttctgaacaagagtctcaaccagtgtgcatttattgggataggaaatagtgaccaagaaatgcagcagctaaacttggaaaggaaagaactattgcacagccaaaacattgtatatatctgactcagacaagccgaaagcacttcatgttgtctgtaaagatgttctatgggccaaccagttgatgacattggtgtgttcctccagcaagcggataaaagtcatctccaaaccttccaaaaagaagcagtcattgaaaaatgctgacttatgcattgcctcaggaacaaaggtggctctgtttaatcgact

SEQ ID NO: 700 - DNA, 440 bp, Homo sapiens
  misc_feature (1)...(440): n = a,t,c or g
tggacgcgtgggtggaaaagaacaagtaggtttacattactgatttccagaagtaagtagtttcccctttcctagtcttctgtgtatgtgatgttgttaatttcttttattgcattataaaataaaaggattatgtatttttaactaaggtgagacattgatatatccttttgctacaagctatagctaatgtgctgagcttgtgccttgggnnnnnnnnnnnnnnnnnnnnnnnnnttttaactgattactgtaaatcaacctgatgatttgtttgtttgaaattggcaggaaaaatgcacctttcaaatcattggggggagaaaaaggatgtctttcaggattattttaattaatttttttcataattgagacagaactgtttgttatgtaccataatgctaaataaaactggggcactttttaccataaattaattn

SEQ ID NO: 701 - DNA, 716 bp, Homo sapiens
  SIMILAR (32)..(517): 731254mologous to Homo sapiens recombination signal binding protein,accession number L07872,Smith-Waterman Score=569.
  misc_feature (1)...(716): n = a,t,c or g
atcattagcacagataggcagagtatacatttatgagggaatgggccctgtctttgcnccagtcactcctgtgcctgtggtagagagccttcagttgaatgncggtggggacgtagcaatgcttgaacttacaggacagaatttcactccaaaatttacgagtgtgtttggcgatgtagaagctgaaactatgtacaggtgtgaacaaagtatgctctgtgtcgtcccagacatttctggattccggagaaggttggagatgggtccggcaaccagtccaggttccagtaactttgggtccgaaaatgatggaatcactttattccaccagcctttacctttacctacacaccagaacccagggccgcggccacattgcagtgcagcaggagcaatccttcgagccaattcaagccaggtgccccctaacgaatcaaacacaaacagcgagggaagttacacaaacgccagcacaaattcaaccagtgtcacatcatctacagccacagtggtatcctaactaccgtctttttgctaggacttaaactgacttgagtgtggcaaaaagttaccaaaaaaggagaaaaaatgaccaatcgtttgtggtttcttgggaaaacttttcataccaggtgatactattcaaaaaccccgttgtctccctgcaagtgctgatttgaaatgcagaagccccagtaaaaaaaaaaaaaaaaaaa

SEQ ID NO: 702 - DNA, 5721 bp, Homo sapiens
  SIMILAR (262)..(1713): 711254mologous to Mus musculus J kappa RS-binding protein,accession number X17459,Smith-Waterman Score=1641.
aaggcgtcggggggaatctcgcgagggttggagttttggcgagagtttgtggaagatggcgcctgttgtgacaggtcattgaaattatgagactatcattcaaatggaagcattatagttcttcggaaccattatgatctcaaaacgaaaggagaatgatacagatacactggctgaggtgttttgaggtgcatcgaaagtgttccaagctgtgacttacccttaacatgttcttgaagtaccatggcgtggattaaaaggaaatttggtgagcggcctccacctaaacgacttactagggaagctatgcgaaattatttaaaagagcgaggggatcaaacagtacttattcttcatgcaaaagttgcacagaagtcatatggaaatgaaaaaaggtttttttgccctcccccttgtgtatatcttatgggcagtggatggaagaaaataaaattacaaatgaaatgcgatggttgttctgaacaagggtctcaaccatgtgcatttattggcataggaaatagtgaccaagaaatgcagcagctaaacttggaaggaaagaactattgcacagccaaaacattgtacatatctgatttagacaagcaaaagcacttcatgttgtctgtaaaggtgttctatggcaacagtgatgacattggtgtgttcctcagcaagtcgtccaaaccttccaaaaagaagcagtcattgaaaaatgctgacttatgcattgcctcagggaaggaaaggtgggctctgtttaatcgactactatcccagacagttaggtaccagatacttgcacgtaggaaagagggtaattttcatgccagttcacagcagtggggagccttttttattcatctcttggatgatgatggatcagaaggagaagaattcacagtctgagatggctacattcattatggacaaacagtcaaacttgtgtgctcagttactggcatggcactcccaagattgataattaggaaagttgataagcagaccacattattggatgcagatgatcctgtgtcacaactccataaatgtgcatttgaccttgaggatacagaaagaaagtacttatgcctttctcaagaaagaataattcaatttcaggccactccatgcccaaaagaaccaaataaagagaagataaatgatggtgcttcctgggcaatcattagcacacataaggcgaagcatacattttaccgagagagtgggcccctgtcccttgcccctggtcatgccctcccgccctgtccgtagagagccttaagttgaatggcggtggggacgaaccaagcttgaaacttaacaggacagaatttcaactcccaaaattttacaaagtgtggtttggggatgtagaaagctgaagctatgtacaggtgtggaagaaagtatgctccgtgttgtcccagacgtttctgcattctgagaaggttggagatagttcccagcaaccaatacaggtttcagtaactttggtccgaaatgatggaatcatatattccaccagccttacctttacctacacaccagaagcagggccgcggccacattgtcagtgtagcaggcgcaatccttaaggccagttcaagccacgtgccccctaatgaattaaacacaaacagcgatggaagttacacaaatgccagcacaaattcaaccagtgtcacatcatctacaccaacagtggtatcctgaactaccgtctttttgctaagactcaaacggcttgagtgcagcaaaaagttgacaaaaaaggaaaaaaaaatgaacagtcttttgtggtttattgggaaacttttcataccaggtgatactattctaaaaccccgttgtctccctgcaagtgctgatttgaaatgcagaagccacagtaaaaaaaaaaaaaaaaaaaaaaaaaaaagaaaaaaaaatcaaaatgtataaatattggaaatcaagtttttcagctgttttgttggttggttggttggtttttgtttggttttgtttaaagggacaagaagtaaataatgtggctggaatacaagttgaacaaactagaagacacaaatctaacatagtttttatggaccaaggaacttgtatattgtataagctttagtaaaaggtacattttcaccatacctttttttatatcacggtattatagtacaccttgttaccaataggttgttctcttccccaccctcctttgagctttgctctaaaatacattctggttccaagcctgaccatccttgtttaatctatcatactcttccaggtttttttttttggtctaaggctggaacttttttctttttttttcagctgaagtcttatgactttttcatgagtcaaaattgtttggatttcacgaagtcaaatcttgcaaaggcctgcatattttttttaagattatatgaagtctgtgcaaaaagctttaaaaaattgcctctgccttgcctgcatacatgcaatgtatgtaacttagtctctcttctcagacactgttgggtagttatttctgtgttttctttttttaaaaaaaaatatggacttattgtggtttatctgagaggttctaacattcacatgcaatttggtgtggcatttagctattatgagttattggcgcgaacttgtttgatatttgaagtgtctctccccttttcccatgacgtaatacataggtgtgttccaggatttgttcaggtttttccccccctcctaatcttgtacataacttgtattttgtgtaagttaaacattttatttgaacttggaatgttcccagtgatttcattcagcagggtattttctgccttgttggcaagtagcaaaaaatatgggaagtatttgctaccagttgttagatggtgccccttattggtagaatcaggaaaatgtccgcaaaagcatgttttattatctttacttttttggggggttggagggggtagcctagccagacatcatgtaatcttaaaacataagatgcttttattagatgatcaactaaaaatagctggaagacagtactttagaaacaaaatagttagtaagatatataatgcaaatgtaacttatgttttcatttttttctctgccttttttttttgttttttttctttttttccagtactgagcatctccacaaatgtctcctactcagaaaatgtttcttttctttcagttgagatttggtgcattcagggttgtaggttggccttgcttgctaacccgccggttttaccgtgctttattcctgaactttgtttatgcctttgtttggttcttctgaaattgcagcagactcattgggctacatttagtacaggaaccacgtgtgtaatgttatacaacacagtcagtaatacaatcatccctcttagagtaaaaactacctctagattgtgtaagctttttactgtccataaaacaggagccacagtaccttatgaatgcaaaactgtaacttcctacagtgtttccccacagaacattgtctttctggtgtctgggctgtttttgaaaaagtttccattaatagactttttagaaattattattagtagcattttttttccagctttgcgtcttcatcactcactcaagtgtcagactatgcactgtaaatatcttcctaacatctttaaatcgccttttcctcagttttcaaggggaaggtcatttgtaaagcacgttaggtggttaaatcagttattgcggttttctcttacagcaagcctttttaatcacccccaggctgcattttattctatatcgccttttttcttcaaatctgctccaatcatccacttctctcttataagctattcctgcctcacacctaaatctgtttcagtgatcaagggcagaactcattgtggccttatctttctttgttgtaattgttcactgtctctttcttacagaccacttattctgagtagtagttattcctccctatggagtcatggcaggaatcattacacagtgcttttgttcagagcatggacatgttccaggtgctgctttgctttaacggccacaagtttcctccacttctcaggtttggtatttagtaaggaatcaattaaattaaccaataacaaaagagatacttttgaagaacaaactattctttacccattttgtagctcaaaaataatttttcaagttcatgaccttattaaaatgaacttgtgtttttttaacaaacgtctattttattttgatagtttctttccgaagataattgaaatattatactgtaacccttttcttttcttttttgaaaagtccaagaatgtacttatacaggatttttccccacctatttttggccattctcataccacagacaaaagagtgaatgattgtcattgtagcttattgtttatcagtagttcttttgtagctgcttacattttttctttcatggtttgtgaatcatttcagtatgtaatttataggaaccttgtcctctggtatagtagactgtgtgccctcctccaggatggcattattagacatgctggtcatttaccctcagaaagactctcttatagaatggtgagtgcttcagttatagtatgtttgaattttaaaaaattcctgtttagaatgtatctatgctctcatgactatgcagtttctaacatacacatagaagctgagtctctgatccaatatgtttttatttgttccattaatttatcacatagattgggaaggcaagctaaaagccttaaaaatgccctttatattttgagtgatttcagcgttgaacacagtatactatctaaatttgctgctcactttcttaaactgttgcaattaaaggcatgtttatacatgactaatcgtgaaatgtttgtcactcttactgcacagacttatctgcaatcaaactggttagtttttttgttttgttttgttttattgtttttaatgaatctggtaccatctgtgctttcacaaaaaacttccaatgccatttttgagaactaacctaactagtcactccctccagaaaatccactggggaggaggttccttttgaaacaaaatgctgttcagttagtaaccaagttactttgattgcaaaagcagctgtgtttctgataagtactgaacaaatgtgtgtaattttctgtgccagacttatgactttgttttcaagccactgtaaatgtgggatggatggttagaaaccaataatatattgggggtttctgtttaacccttatcagggactgaactggtatctccttttgttaattttccccctgtgttggtgataaaatgttttgcccagcattccaggtacctgtggtggggcccccagaggtagggtttatatggccccatttttagccttatttccttgtacccttgccagccatgctccacgcattcagtccctaagggggtttattttacaaactgtgcgccctgtaaggtttattagcaataagatagaaaattgagcaagtttatacccataattttgttgttggtagaaaaaaagaatctgctcagttccgatatttcatccgtgaaaaacttgcaacaccagcagttccaaggaatcactacaacaggacatgtaaaccattgtaaaagtcttctgtcgaatgtgcctgatgcaatgtattatcgtcttttatttcagaatacttcataaagataaaattaaattctaaaaaaaaaaaa

SEQ ID NO: 703 - DNA, 567 bp, Homo sapiens
  SIMILAR (555)..(487): 521254mologous to Homo sapiens Human secreted protein, SEQ ID NO: 7871,accession number AAG03790,Smith-Waterman Score=52.
ttttttcctttccaagatgcaagtcggaagcccctgacttggtggggattcagggaagtgtgtgttagttggtcaatcttgtcagtcatggtgacaaaagtggctgtggtggggctactggaaaaccgggcaatgggggccatcctgaaaaaaacaccactttgcaagtgaatgcaaaactgctccccttaacttgcctgtgtcccctatcaggcaaagttaactttgccctctcctgaagccctcagtttcctttattcattaaaattcaaatatgaaccccaggtatggtggccccacgccctgtaatcccaccccttttggaagggtgaaggcagtaggatcgcttgagcttgggagtttgagaccagcaacataggaagaccccatctctacgaaaaataaaaaaaattagctgggcatggtggtgcatgcctgtggtccccaggtaactcaggaggcccgaggtgggagaatttgcttgaacccagaaaggttgagactacggtgtgctgtgatcgtgcactccatcctgggggacagaagtcaggccctgtctcagaaaaa

SEQ ID NO: 704 - DNA, 2328 bp, Homo sapiens
  SIMILAR (1)..(1335): 861254mologous to Homo sapiens human ubiquitin processing protease, EC 3.1.2.15,accession number AL163249,Smith-Waterman Score=2034.
atgggaaagaaacggacaaagggaaaaactgttccaatcgatgattcctctgaaactttagaacctgtgtgcagacacattagaaaaggattggaacaaggtaatttgaaaaaggctttagtgaatgtggaatggaatatctgccaagactgtaagactgacaataaagtgaaagataaagctgaagaagaaacagaagaaaagccttcagtttggctgtgtcttaaatgtggccatcagggctgtggcagaaattctcaggagcagcatgccttgaagcactatctgacgccaagatctgaacctcactgtctggttcttagtttggacaactggagtgtatggtgttacgtatgtgataatgaggtccagtattgtagttcaaaccagttgggtcaagtggttgattatgtcagaaaacaagccagcattacaactccaaagccagcagagaaagataatggaaatattgaacttgaaaataaaaaattagaaaaagagagtaagaatgaacaagagagagaaaagaaggaaaacatggctaaagagaatcctcccatgaattctccttgccaaataaccgtgaaaggactcagtaatttgggaaacacatgtttcttcaatgcagttatgcagaacttgtcacaaacaccagtgcttagagaactactaaaagaagtgaaaatgtctggaacaattgtaaaaattgaaccacctgatttggcattaacagaaccattagaaataaaccttgagcctccaggccctcttactttagccatgagccagtttcttaatgagatgcaagagaccaaaaagggggttgtgacaccgaaagaactcttttctcaggtctgtaaaaaagcagtgcggtttaaaggctatcagcagcaagacagccaggagctgcttcgctacttattggatgggatgagagcagaagaacaccaaagagtgagtaaaggaatacttaaagcatttggtaattctactgaaaagttggatgaagaactaaaaaataaagttaaagattatgagaagaaaaaatcaatgccaagttttgttgaccgcatctttggtggtgaactaactagtatgatcatgtgtgatcaatgcagaactagtggtaagaaaagtgtaaatgataaaaatctgaaaaagacagtggaggatgaagatcaagatagtgaggaagaaaaagataacgacagttacataaaagagagaagtgatattccttctggaacaagtaagcacttacagaaaaaagcaaagaaacaagccaaaaagcaagccaagaaccaacgaagacaacaaaaaattcaaggaaaagttcttcatttaaatgatatttgtactattgaccatcctgaagacagtgaatatgaagctgaaatgtcacttcaaggagaagtaaatattaaatccaaccatatttcacaagagggtgttatgcataaagaatattgtgtcaaccagaaagatttgaatggccaagcaaaaatgatcgaaagtgtaactgacaatcaaaaatccacagaggaagtagatatgaaaaatatcaacatggataatgatctggaggttttaacatcttctcccactaggaatttaaatggtgcctacctaacggaagggagcaatggagaagtggacatttccaatggtttcaaaaacctaaatttgaatgctgctcttcatcctgatgaaataaatatagagattctgaatgatagtcatactcctggaacaaaggtgtatgaggttgtaaatgaagatccagaaactgctttctgtactcttgcaaacagggaagttttcaatactgatgagtgttcaatccaacattgtttatatcagttcacccgtaatgagaaacttcgagatgcgaataaactgctttgtgaagtatgcacacggagacagtgtaatggaccaaaggcaaatataaaaggtgaaaggaagcatgtttacaccaatgccaaaaagcagatgctaatttctcttgctcctcctgttcttactcttcatttaaagagatttcagcagaatgttgcagaagaaaatacaagggtactctattccttatatggagttgttgaacacagtggtactatgaggtcggggcattacactgcctatgccaaggcaagaaccgcaaatagtcatctctctaatcttgttcttcacggtgatattccacaagattttgaaatggaatcaaaagggcagtggtttcacatcagcgacacacatgtgcaagctgtgcctacaactaaagtactaaactcacaagcgtacctcctattttatgagagaatactgtaa

SEQ ID NO: 705 - DNA, 522 bp, Homo sapiens
tagccacttcccataatgccgcgttccggaagttattgctttccaggggtcactctggcgttatccgtcgctctcaattcgtcaccaggaggaagacggagctggctgcccagcccaaaggcccatgaggggatgcagttatgggctctgtcgccgtgggtgagttctggtcccgactgcctggcagtcgtcgctcgcctggcgtttctgcgctgggagagctcctgttttccgccccaacttcgttctcttcttgaaggccgctctccttaagcacgtaacccggctactttccggtactgcgatctcattggctgcatgttctgtcagttccagaagctggccaatgagatgccgctgctggcggccttctcgaccccgtggacccagaggttcccccgtgggatcggagcagttagaaggggaggagagggaaggtgtggcaggcgccgagcaaatgggtgggtggcgcgtggcagggacttccctatgggttggagctggatttgcagccgcgttcat

SEQ ID NO: 706 - DNA, 3181 bp, Homo sapiens
  SIMILAR (2231)..(2599): 741254mologous to Homo sapiens human ubiquitin processing protease, EC 3.1.2.15,accession number AL163249,Smith-Waterman Score=452.
  misc_feature (1)...(3181): n = a,t,c or g
ctggcttcgactccgtcgctctcaattcgtcaccaggaggaagacggagctggctgcccagcccaaaggcccatgaggggatgcagttatgggctctgtcgccgtggaacttgtttgcttcattcttatgtacctacctttgcaccttgtaatcatcctttatgcctcagattgttattttgtgtcagtaagtaatccataaagtgccaacatgggaaagaaacggacaaagggaaaaactgttccaatcgatgattcctctgaaactttagaacctgtgtgcagacacattagaaaaggattggaacaaggttaatttgaaaaaaggctttagtgaatgtggaatggaatatctgccaagactgtaagactgaccaataaagtgaaagataaagctgaagaagaaacagaaaataagccttccagtttggctgtgtctttaaatgttggccctcagggttttggcagaaatttttcaaggggcagcatgccttgaagcactatctgacgccaagatctgaacctcactgtctggttcttagtttggacaactggagtgtatggtgttacgtatgtgataatgaggtccagtattgtagttcaaaccagttgggtcaagtggttgattatgtcagaaaacaagccagcattacaactccaaagccagcagagaaagataatggaaatattgaacttgaaaataaaaaattagaaaaagagagtaagaatgaacaagagagagaaaagaaggaaaacatggctaaagagaatcctcccatgaattctccttgccaaataaccgtgaaaggactcagtaatttgggaaacacatgtttcttcaatgcagttatgcagaacttgtcacaaacaccagtgcttagagaactactaaaagaagtgaaaatgtctggaacaattgtaaaaattgaaccacctgatttggcattaacagaaccattagaaataaaccttgagcctccaggccctcttactttagccatgagccagtttcttaatgagatgcaagagaccaaaaagggggttgtgacaccgaaagaactcttttctcaggtctgtaaaaaagcagtgcggtttaaaggctatcagcagcaagacagccaggagctgcttcgctacttattggatgggatgagagcagaagaacaccaaagagtgagtaaaggaatacttaaagcatttggtaattctactgaaaagttggatgaagaactaaaaaataaagttaaagattatgagaagaaaaaatcaatgccaagttttgttgaccgcatctttggtggtgaactaactagtatgatcatgtgtgatcaatgcagaactgtctccttggttcatgaatctttccttgatttgtccctcccagttttagatgatcagagtggtaagaaaagtgccaatgataccccctctgacaaagacagttacttacgctgaatgttatagtgaggaaaaataccataccgactgctgcatatactagagaagcgatatttcttctggaacacgtaagcacttacagaaaaaagcaacgaaacaagccaaaaagcaagccaagaaccaacgaagacaacaaaaaatatccggaccagctcttcatttaaatgatattcgtactattgaccatcctgaagacagtgaatatgaagctgaaatgtcacttcaaggagaagtaaatattacatccaaccatatttcacaagagggtgttatgcataaaggaatattgtgtcaaccagaaagatttgaatggccaagcaaaaatgatcgaaagtgtaactgacaatcaaaaatccacagaggaagtagatatgaaaaatatcaacatggataatgatctggaggttttaacatcttctcccactaggaatttaaatggtgcctacctaacggaagggagcaatggagaagtggacatttccaatggtttcaaaaacctaaatttgaatgctgctcttcatcctgatgaaataaatatagagattctgaatgatagtcatactcctggaacaaaggtgtatgaggttgtaaatgaagatccagaaactgctttctgtactcttgcaaacagggaagttttcaatactggtgagtggtcaaatccaacattgtttatatcagttcacccgtaatgagaaacttcgagatgcgaataaactgctttgtgaagtatgcacacggagacagtgtaatggaccaaaggcaaatataaaaggtgaaaaggaagcatgtttacaccaatgccaaaaagcagatgctaatttctcttgctcctcctgttcttactcttcatttaaagagatttcagcaggctggttttaacctacgcaaagttaacaaacacataaagtttccggaaatcttagatttggctcctttttgcacccttaaatgtaagaatgttgcagaagaaaatacaagggtactctattccttatatggagtttgttgaacacagtggtactatgaggtcggggcattacactgcctatgccaaggcaagaacccgcaaatagtcatctctctaatcttgttctttcacggtgatattccacaagattttgaaatggaatcaaaagggccagtggtttcacatcagcgacacacatgtgcaagctgtgcctacaactaaagtactaaactcaccaagcgtacctcctattttatgagagaatactgtaataatatcaaaagccactttttctggaaacacatttatggcttttataatggctgaaataacgaataaaaaaagcctaattaaaatcatgttcacttaacattaaatacatgccagaagaaatcatgtttatttaaatattgaagggaaaaatccctaaaaatgtccaaaggttttatattgtcatatgtggtttttattcctgctttgtttctggaaaggaaatcctgaattacttaagtactttgtgtttaatatatctgggtgatggatcacaacacatcaataaactgacttaccctaccaaaaaaagaacaaaaaatatatattttcntggggggggccctttttaaaaattcccttgggggggccaaacttaaccgggtaaggaaaannnnnnnnnnnnnccttaagggggggctatataaacaccctttgggattctttgggaaaaacccttttttttgggggggaaaaattaag

SEQ ID NO: 707 - DNA, 2611 bp, Homo sapiens
  SIMILAR (1567)..(1785): 821254mologous to Homo sapiens Secreted protein encoded by gene 94 clone HPMBQ32,accession number AAW88627,Smith-Waterman Score=318.
  misc_feature (1)...(2611): n = a,t,c or g
tttttttttttttttttttcattttgcacctttggcttttacactttaaaacatttattttgcttcacatatagaaccaggaaagaaatcacctccccaagtcggacagggcttagacagactggatgaagcgccccaattttgccacattgtctccaggctggtctctccagccacacatttaagccagccaagatggccccttttagtcacattcatctccaacattagcagggagcaagacaaggaagtgaaaagggaactgccctatgaagccccaggatcttgccctccaggatggggacggaaactggggttggtgaaggagcccaaccccacctgtctccaagcctcaggctaggaaacagcacttggctgcaggcccaggaccaagagcccggaataggtgcctgctggggcttgagaacccaagaaaaccagttcccctctttttggaactcgggaaggggtggaacaaccccagaccccattcccttcctcagatcacactctatcccagactgctgtacagtgcgggcccaaagctggaattctcagaacacccccatttttggccatgagcagatctggattctagttcgttttgacctttgagaaaagtcaaattgtgttgatcttttttaaaaacaaaggggcggttttcagaaatctataagcttccttctggctgtaagaacttagcactctgggctccctgcttcctttaaaactccactgggagatctgggaaagggaggctgagacctctctcctaagggctgattttaccttcctgtccctcatgaaagaacgggctggaggacaggaataggacctgggccagccactctccaaggacacaagctggatccagacaggaagcagcgggcaagtagattgctttctccccagataggtttgtttccacaatatatttaaatacaaaatggcagcagcccactgtgccagttataacaaaattagcccatagggtatctggagaaatgtacacaggcagcctcagctggagtcatgcgagccaactccggcctgctcgggtagggcctgtgcctgctgcccagtcagctgtgggtggtcacacggccaggactggatggtgcccgtggcagggcggtgcacaagggctcagaggtgctgtacaggaggagccagtcttccaacagtacacaaaagcacgctgtcctcttgctctgccccccctgcggactcagcagcatgtgtgttcatttattttattattattttttgaagacagagtctcaactctgttgcccaaggctggagtgcaatggcgcgaatctcaagctcctgcaacctctgcctcctgcgttcaaagcgattctcctgcctcagtcttctgtgtaactgggattacaggcgcgtgccaccaggcctggctaatttttgtatttttagtagagacggaggtttcaccatgttggtcgtcaggctggtctcgaactcctgaccttgtgatctgcccgcctcggcctcccaaagtgctgggattacagaccttgagccaccatgcctggcctattattttttgagacagagtctcgctctgtcgtccaagctggagtgcagtggtgtgatcttggctcactgcaagctccgcctcctgggttcacgccattctcctgcctcagtcttcagagtagctgggactacaggcgcccgccaccacgcccggctaattttttgtatttttagtggagacagggtttcactgttagccaggatggtcgcgatctcctgacctcatgatcccgcccggcctcagtctcccaaagtgctgggattgcaggcgtgacaccaagcacccagcctccaaattttaaatgagccccttgtgagaaggaaaagaatctgctgtccacagaagccaggcgtgggagctacttcaaccagaaacttgtcacccatgacactctgtgtgggttcagtcacacagaccaacgattccattatggaagggagggaagaaaggatcacatcaaatctactatatgcctcataggcccaccctttatttcaaaaatagatattcgctatttaaatgccgccccgtgttgcgacaggcctgatatttgcttctgcatgtggcagatctgttattgcttacactgtggcctcctggcctgtgctgctcagctggccctgttagagaacatgggaaccacatcaaaatcctaagtcacaaaacaagggctctgtccccagcctgggcccaggggcccacatgcccacctccacagcccagtcaagtgtggggataaggcactcctctgtgctatgagataaaatatgaatagagtcccttatgaattatgagttgcaaagaatgattttgtgctaataaattcccagtgcatccaaaatgtacaaaaaccctagaatttccagtttttagattgnnnnnnnnnnnttttttctgtagatccagaagaaactttcattgaaactttaaagacctcacctcgcacctgctctagtaatgcactagttactaatatacaaacgtaaatctttgatgagtatggtcgggaaaaaactgtctgtccttgtgatcagaattccaccgcactgg

SEQ ID NO: 708 - DNA, 1824 bp, Homo sapiens
  SIMILAR (327)..(1118): 491254mologous to Homo sapiens Similar to serine (or cysteine) proteinase inhibitor, clade F (alpha-2 antiplasmin, pigment epithelium derived factor). member 1,accession number BC000522,Smith-Waterman Score=428.
  misc_feature (1)...(1824): n = a,t,c or g
gtcgaggtcctaggctgggtgtggagctgcagcgtatccacaggtaaagcagctccctggctgctctgatgccagggacggcgggagaggctcccctgggctggggggacaggggagaggcaggggcactccagggagcagaaaagaggggtgcaagggagaggaaatgcggagacagcagcccctgcaatttgggcaaaagggtgagtggatgagagagggcagagggagctggggggacaaggccgaaggccaggacccagtgatccccaaatcccactgcaccgacggaagaggctggaaaggcttttgaatgaagccccaggatgcatgccctggtgctactcctctgcattggagccctcctcgggcacagcagctgccagaaccctgccagccccccggaggagggctccccagaccccgacagcacaggggcgctggtggaggaggaggatcctttcttcaaagtccccgtgaacaagctggcagcggctgtctcccaaacttcggcctatgacctgtaccgggtgcggatccaagcatgagccccacgaccaaacgtgctccctgtctccctcctnaagtgtggcccaacggccctctcggcccctctcgctggggaagcggagcaagcgaaacaagaatcccatcattcaccggggctctctactatgacttgatcaagcaagccccagacattccatgggtaccttataaggaagctcccttgacacggtcacttccccccccagaagaacctcaagagtgcctcccggaatcgtctttgagaagaagctgcgcataaaatccagctttgtggcaccttctggaaaagtcatatgggaccaggcccagaagtcctgacgggcaacccttcgcttggaccttgcaagagatcaacaactcgggtgcaggccccagattgaaagggaagctcgccaggtccacaaaggaaattcccgatgagatcagcattgtccttctcgagtgtgagcgcacttcaaggggcagttgggaaacaaagtttgactccagaaagacttcccctcgagggatttctacttgggatgaaggagaggacccgtgagggtccaccatgattgtcggaccctaagggctgtttttacgctatgggcttgggtttcagattctcagcttgcaagatttgcccagcctgccctttgaccggaaggcatgagtatcatcttcttcctgccccctgaaagtgacccagaaatttgaccttgataggaggagagcctcaccctccgaagttaattcatgaccatagacccgagaacttgaaagaccgttgcaggcggtccctcactgtcccccaagctgaagctgaagttacgaaggcgaagagcacccaaagttccttgcagggagatgaagcttgcaatcccttgtttgattccacccagactttagcaagatccacaggcaaaacccatcaagcttgacttcagggtggaacaccngcgcctggcttttgagtggaacgagggatggggcgggaaaccacccgcccagccccaggggcttgcagcctgcccaccttcaccttcccgctggactatcaccttaaccagcctttcatcttcctactgagggacacagacacacggggcccttctcttcattggcaagatttctggaccccaggggcccctaatattcccagtttnattatttccattaccttaggaggaaaacccgagggacagcagatttccacaggacacgaaggcttgcccctgtaaaggttttcaatggcattacaataaaagagctttatccctaaaaaaaaaaaaaaaa

SEQ ID NO: 709 - DNA, 415 bp, Homo sapiens
  misc_feature (1)...(415): n = a,t,c or g
cggacgcgtgggtggaaaagtacaagtaggtttacattactgatttccagaagtaagtagtttcccctttcctagtcttctgtgtatgtgatgttgttaatttcttttattgcattataaaataaaaggattatgtatttttaactaaggggagacattgatatatccttttgctacaagctatagctaatgtgctgagcttgtgcnnnnnnnnnnnnnnnnnnnnnnnnnnnnnnnttttaactgattactgtagatcaacctgatgatttgtttgtttgaaattggcaggaaaaatgcagctttcaaatcattggggggagaaaaaggatgtctttcaggattattttaattaatttttttcataattgagacagaactgtttgttatgtaccataatgctaaataaaactgt

SEQ ID NO: 710 - DNA, 395 bp, Homo sapiens
  SIMILAR (3)..(320): 1001254mologous to Homo sapiens Amino acid sequence of protein PRO234,accession number AAY13367,Smith-Waterman Score=569.
cggatttggacctcagaggagggcagccagtctgccggggagggacacagaggccttgttataaagtcatttacttccatgatacttctcgaagactgaactttgaggaagccaaagaagcctgcaggagggatggaggccagctagtcagcatcgagtctgaagatgaacagaaactgatagaaaagttcattgaaaacctcttgccatctgatggtgacttctggattgggctcaggaggcgtgaggagaaacaaagcaatagcacagcctgccaggacctttatgcttggactgatggcagcatatcacaatttagagaaaccagcagttccttctagagaagctgaaggtgaggaaacagagctgacaacacctgtacttccagaagaaac

SEQ ID NO: 711 - DNA, 500 bp, Homo sapiens
  SIMILAR (5)..(277): 871254mologous to Homo sapiens Amino acid sequence of protein PRO234,accession number AAY13367,Smith-Waterman Score=441.
cgggaagccagaccctagcacaaagaagcaacacaccatctggccctctcctcaccagggaaacagcccggacctagaggtctacaatgtcataagaaaacaaagcgacgtgagcttagctgagacccggccagacctgaagaatatttcattccgagtgtgttcgggagaagccactcccgatgacatgtcttgtgactatgacaacatggctgtgaacccatcagaaagtgggtttgtgactctggtgagcgtggaaaatgaaatatatggttattaggacatataaaaaactgaaactgacaacaatggaaaagaaatgataagcaaaatcctcttattttctataaggaaaatacacagaaggtctatgaacaagcttagatcaggtcctgtggatgagcatgtggtccccacgacctcctgttggacccccacgttttggctgtatcctttatcccagccagtcatccagctcgaccttatgagaaggtaccttg

SEQ ID NO: 712 - DNA, 443 bp, Homo sapiens
tggggaggagtaaggagtctggatgggtggaaaatgaaatatatggttattaggacatataaaaaactgaaactgccaacaatggaaaagaaatgataagcaaaatcctcttattttctataaggaaaatacacagaaggtctatgaacaagcttagatcaggtcctgtggatgagcatgtggtccccacgacctcctgttggacccccacgttttggctgtatcctttatcccagccagtcacctggcagtgataaagatgggctgtggagcttggaaaaccacctctgttttccttgctctatacagcagcacatattatcatacagacagaaaatccagaatcttttcaaagcccacatatggtagcacaggctggcctgtgcatcggcaattctcatatctgtttttttcaaagaataaaatcaaataaagagcaaaaa

SEQ ID NO: 713 - DNA, 422 bp, Homo sapiens; identical to SEQ ID NO: 632
  misc_feature (1)...(422): n = a,t,c or g

SEQ ID NO: 714 - DNA, 492 bp, Homo sapiens
  misc_feature (1)...(492): n = a,t,c or g
ccgggggaaaaaatttcaaaaaatcaacccagtaaagcaaaacttccaaccagcaagctaatccagttaggtttccccctttnnnnnnnnnnnnnnnnnnnnnnnnnnnnnnnnnnnnnnnnnnnnnnnnnnnnnnnnnnnnnnnnnnnnnnnnnnnnnnnnnnnnnnnnnnnnnnnnnattcccaagtaggttttaaatcggccccctataaggaaaaaactattaccttgccagcccgcgtaaactttggcccccccaaggattctttaaaacggcccccccnnnnnnnnnnnnnnnnnngcaaacatctttattaatctcatataaaaataaggtccatggacggtcctcggggctggggcttgcgggggcgaggtgcactttataagttacaggccaggctcctgctgaggctaagtatggctatttggagggggccggacgcgtgggtcgtcccganggttatcaatcggtnccgcaggcgatcaat

SEQ ID NO: 715 - DNA, 400 bp, Homo sapiens
  misc_feature (1)...(400): n = a,t,c or g
catactgcaacagaccgaaggcggaagcagctatgaggatgcagcagccttctgttaagccaggctttaaggatctgcaaaaatgtaaaacgatgccactcctactgatgaaatatattgttttggaaaatataggtttaaaaatttttttaaggtaacatgtaatggatgtatagtcttcaaatggatgaataaatgtttttcagagttnnnnnnnnnnnnnnnnnnnnnggggggggccgttttaaagaatccttgggggggcccaagtttacccgggcttgcaaggtaatagttttttccttataggggggcgtattaaaacctacctgggaatttttggaaagaacccttatttttggggggggacatattgggccaacctcccttcggaaattta

SEQ ID NO: 716 - DNA, 383 bp, Homo sapiens
  SIMILAR (14)..(127): 1001254mologous to Mus musculus putative,accession number AK012479,Smith-Waterman Score=192.
  misc_feature (1)...(383): n = a,t,c or g
cccacgcgtccgccgtctgattctaatagagagccggattcaccgtttggctcgatattataagaccaagcgagtcctccctcccaattggaaatatgaatcatctacagcctctgccctggtcgcataaatttgtctgtgtactcaagcaataaaatgattgtttaactnnnnnnnnnnnnnnnnnnnnnnggggggggccgttttaaaggacccttgggggggccaaagtttaccggggctggcaaggaaatagttttttccttatggggggccgaattaaaacctacctgggaatttttggaaaggacccttactttgggggggggacatattgggccaacctccctacagaaattaaaggctttagggaaaatataaan

SEQ ID NO: 717 - DNA, 391 bp, Homo sapiens
  SIMILAR (1)..(174): 961254mologous to Homo sapiens ribosomal protein L7,accession number L16558,Smith-Waterman Score=295.
  misc_feature (1)...(391): n = a,t,c or g
attcatgagatctatactgttggaaaacgcttcattgaggcaaataacttcctgtggcccttcaaattgtcttctccacgaggtggaatgaagaaaaagaccacccattttgtataaggtggagatgctggcaacagggaggaccagatcaacaggcttattagaagaatgaactaaggtgtctaccatgattatttttctaagctggttggttaataaacagtacctgctctcaaattgnnnnnnnnnnnnnnnggggcggccgttttaaagatcccttgggggggccaaagtttacccgggcttgcagaggaatagttttttccttatggggagccgtattataaccaacctggggatttttgggaaggaactttatttttggggggga

SEQ ID NO: 718 - DNA, 561 bp, Homo sapiens
  misc_feature (1)...(561): n = a,t,c or g
cattaacaaaactttccaacaaccagcatatgcaggttgttttaccccctttaccctttaaaattttttattttccctaaaaccttaaatttctgtagggaggttggcccaataagtccccccccaaaaataaaggtcctttcccaaaaattcccaggtaggttataatatggccccctataaggaaaaaactattaccttgcaagcccgcgtaaactttggcccccccaaggattctttaaaacggccgccccnnnnnnnnnnnnnngccacagccagaaaaatttattttaaaatagaaacatacattaagctttaaaacaaccaactctcaaacaaaagaggaaagagcctttgatcccagagtccatgcggaatgaattccatacgtgtttgaaattcacataaggagcacttagaaaaccacctgaaatggaaatccaacagcccccttgcctgtgagggctcccacccctgcccgcgtgaggacatggccgaaccccggacactcgtgtgccgggagccaccacagctcaaggtgaccggcagcacccagctctg

SEQ ID NO: 719 - DNA, 1959 bp, Homo sapiens
  SIMILAR (751)..(1023): 691254mologous to Homo sapiens Amino acid sequence of protein PRO234,accession number AAY13367,Smith-Waterman Score=267.
  misc_feature (1)...(1959): n = a,t,c or g
agtgtctgttagcgtggatcctccagagcggccgcagagacagcggggtagggatgctggatcccttttgctgtgggaaccctgcctgttactcctcgtctcttctgcggggttggatggctgggtcgagcgcccggtatgagagcgcttagagatcgggaaagaactccagttagtgtgggacgagccccacctgactccggggaatgactctctgcttccttcctcctgttgtgtcactgcagcctcggatttggacctcagaggagggcagccagtctgccggggagggacacagaggccttgttataaagtcatttacttccatgatacttctcgaagactgaactttgaggaagttataattttcctgcaggagggatggaggccagctaggcagcatcgagtctgaagatgaacagaaactgatagaaaagttcattgaaaacctcttgccatctgatggtgacttctggattgggctcaggaggcgtgaggagaaacaaagcaatagcacagcctgccaggacctttatgcttggactgatggcagcatatcacaatttaggaactggtatgtggatgagccgtcctgcggcagcgaggtctgcgtggtcatgtaccatcagccatcggcacccgctggcatcggaggcccctacatgttccagtggaatgatgaccggtgcaacatgaagaacaatttcatttgcaaatattctgatgagaaaccagcagttccttctagaagaagctgaaggtgaggaaacagagctgacaacacctgtacttccagaagaaacacaggaagaagatgccaaaaaaacatttaaagaaagtagagaagctgccttgaatctggcctacatcctaatccccagcattccccttctcctcctccttgtggtcaccacaagttgtatgttgggtttggatctgtagaaaaagaaaacgggagcagccagaccctagcacaaagaagcaacacaccatctggccctctcctcaccagggaaacagcccggacctagaggtctacaatgtcagtaagaaaacaaacgcgaagtctttcttatctgagacccggccagacctgaggaatatttcattccgagtgtgttcggaagaaagccactcccgatgacatgtcttgtgactatgacaacatggctgtgaacccatcagaaagtgggtttgtgactctggtgagcgtggagagtggatttgtgaccaatgacatttatgagttctccccagaccaaatggggaggagtaaggagtctggatgggtggaaaatgaaatatatggttattaggacatataaaaaactgaaactgacaacaatggaaaagaaatgataagcaaaatcctcttattttctataaggaaaatacacagaaggtctatgaacaagcttagatcaggtcctgtggatgagcatgtggtccccacgacctcctgttggacccccacgttttggctgtatcctttatcccagccagtcatccagctcgaccttatgagaaggtaccttgcccaggtctggcacatagtagagtctcaataaatgtcacttgggttggttgtatctaacttttaagggacagagcttttacctgggcagtggttaaagatgggctgtggagcttggaaaaccacctctgttttccttgctctatacagcagcacatattatcatacagacagaaaatccagaatctttttttagcccacctattggaacacagggtgggctgtgcctcggcaaatttcatatatggtttttttcaaagaataaaatcaaataaagagcagnnnnnnnnnnnnnnccgggggccgttttaaaggatccttgggggggccaaagtttacgcgggctggcaaggtaatagttttttccttatagggaggcgtattataacctacctggggatttttgagaaggacctttatttttg

SEQ ID NO: 720 - DNA, 1369 bp, Homo sapiens
  SIMILAR (2)..(670): 911254mologous to Homo sapiens E6-associated protein E6- AP/ubiquitin-protein ligase,accession number U84404,Smith-Waterman Score=1045.
tgctgaggcattggtagagagcttctggaaagctaaacaacacaccaaggaagaactgaagtctcttcaagcaaaggatgaagagaagaatgaaaatgaaaaggcaaaagctgcatgttctgctgctgctatggaagaagactcagaagcatcttcctcaagcacaggtgatagctcacagggagacaacaatttgcaaaaattaggccctgatgatgtgtctgtggatactgattccattagaagggtctacaccagattgctctctaatgaaaaaattgaaattgcctttctcaatgcacttgtatatttgtcacctaacgtggaatgtgacttgatgtatcacaaggtatactctcaagatcctaattatctgaatttgttcattatagtaatggagaacagaaatctccacagtcctgaatatctggaaatggctttgccattattttgcaaagcaatgagcaagctaccccttgcagcccaaggaaagctgatcagactgtggtctaaatacaatgcagaccagattcggagaatgatggagacagttcagcaacttattacttacaaagtcataagcaacgaatttaacagtcaaaatctggtgaatgatgatgatgccattgttgctgcttcgaagtgcttgaaaatgatttactatgcaaatgcgtatgctgtcacaaagaatttgggattatattatgacaatagaattcgcatgtacagtgaacgaagaatcactgttctctacagcttagttcaaggacagcagttgaatccatatttgagactcattgttagatgtgaccatatcatagatgatgcacttgtccggctagagatgatcactatggaaaatcctgcagacttgaagcagttctatgtggaatttgaaggagaacaaggtgggttgcagcattctgggacagagctagtgaacctaaggcaaactcgattgggtttggaggaagtcagttgtggatgccaactccagttgcctcttacacctgatgccaggacagtgctgcaaacccacccaccagtaaaaaccattcccagggagaaaggagctgaggaacagaggcttgaatcgactgagtttaatactgagtcgctacattttaaaatggtagcaattgagtttaacttgaatgacaagtgctcaaagagcagatgctacattcatataaaatccaggtcccagggcacattatcacagtctctgcagaagaagccaggccaagccctggctgtgaatccattgggatcaccagtgccagaggagaaggtcacctgcatttgtttttctgatgtgatggaggttctgtttgctgtggcagtaggagaggtgtttggattcccttga

SEQ ID NO: 721 - DNA, 686 bp, Homo sapiens
  SIMILAR (93)..(686): 811254mologous to Homo sapiens F-box protein Fbx11,accession number AF174599,Smith-Waterman Score=860.
atccttaattaaattaatctccccccccccccccccccgcccgggagatgaactttgtccgagccgccaaccggagacccaggcgagtgtcgcggccgcgcccggtgcagcaacagcagcagcagcccccgcagcagccgccgccgcagccgccccagcagcagccgccccatcagcagccttcgtcgccgccgcagtagcagcagcagcagcatcctccggcgtcgtcaccgccgcctccgccgctgcctcaggagcggaacaacgtcggcgagcgggatgatgatgtgcctgcagatatggttgcagaagaatcaggtcctggtgcacaaaatagtccataccaacttcgtagaaaaactcttttgccgaaaagaacagcgtgtcccacaaagaacagtttggagggcgcctcaacttcaactacagaaaactttcggtcatcgtgcaaaacgtgcaagagtgtctggaaaatcacaagatctatcagcagcacctgctgaaacagtatcttcaggagaaactggccagatgaagtggttctaaaaatcttctcttacttgctggaacaggatctttgtagagcagcttgtgtatgtaaacgcttcagtgaacttgctaatgatcccaatttgtggaaacgattatatatggaagtatttgaatatactcgccctatgatgcat

SEQ ID NO: 722 - DNA, 771 bp, Homo sapiens
  SIMILAR (343)..(606): 591254mologous to Chimeric - Homo sapiens Green fluorescent protein-RhoA fusion product,accession number AAW85035,Smith- Waterman Score=223.
ggcgcgctaccctcccgccgcccgcggtcctccgtcggttctctcgttagtccacggtctggtcttcagctacccgccttcgtctccgagtttgcgactcgcggaccggcgtccccggcgcgaagaggctggactcggattcgttgcctgagcaatggctgccatccggaagaaactggtgattgttggtgatggagcctgtggaaagacatgcttgctcatagtcttcagcaaggaccagttcccagaggtgtatgtgcccacagtgtttgagaactatgtggcagatatcgaggtggatggaaagcaggtagagttggctttgtgggacacagctgggcagaagattatgatcggctgagggccctcttcttacccagataccgcgaggtttacctgggggggttttccatcgacagccctgatagtttagaaaacattccaaataaggggaccccagaagtcaggcatttttgcccaacgtgcccatcatcctgggtgggaatagaggatcttcggaatgatgagcaacaaggcgggagctacccaagatgagcaggacccgtgaaacctgaagagggcagaattgcaaacagattggcgttttggacatgagtgtcacaaagaccaaagtggggaagagtttgaaagctacaagctgttgagctgagtggagaaaactgtgctgttggaactgcgacccaccttgggatatgagggtattactagtgtacgcttctttctttactaatcaccagcttgtccttaaag

SEQ ID NO: 723 - DNA, 1966 bp, Homo sapiens
  SIMILAR (165)..(494): 721254mologous to Mus musculus p21RhoC,accession number X80638,Smith-Waterman Score=351.
cctcgctctctcgcgctaccctcccgccgcccgtggtcctccgtcggttctctcgttagtccacgggctggtcttcagctacccgccttcgtctccgagtttgcgactcgcgggaccggcgtccccggcgcgaagaggctggactcggattcgttgcctgagcaatggctgccatccggaagaaactggtgattgttggtgatggagcctgtggaaagacatgcttgctcatagtcttcagcaaggaccagttcccagaggtgtatgtgcccacagtgtttgagaactatgtggcagatatcgaggtggatggaaaagcaggtagaagtttggcttgtggggacacagctgggcaggaagattatgatccgcctgaggcccctctcctaaccagataccgaatgttatacttgatgtgtttttccatcgacagcccctgatagtttagaaaaacatccccagaaaaagttggaccccagaagtcaaagcatttcctgtcccaacggtggcccatcaatcctggttggggaattaagaagggttctttcgggaattgatggagccacacaagggcggggacttaggccaagattgaaggcagggagcccggttgaaacctgaaggaagggcagagatatgggcaaacagggattggcgctttttgggtacattggaagttgttccagccaaagaccaaaagattgggaagttgaagaagaggttttttgaaaatgggctaccgagagcttgctctggcaagcttagacgttggggaagaaaaaatctggggtgcctttgtccttggtgaaacccttgctgcaagcacagccccttatgcggttaatttttgaagtgctgtttattaatcttagtgtatgattactggcctttttccatttatctataattaccctaaggattaccaaatcagaaagtcatctttgctaccagtatttaggaagccaactatggttatttaacggtgttccacaccgtttgggccccccggggtcccttttgaaaactgggcctaaaaggcctcctcttggaattcccacctgacacatccaggcgcctaattccaaggaatttccttaaccttcttgcttctttcctagaaagagaaacagttggtaacttttgtgaattacggctgtaactactttataactaacatgtcctgcctattatctgtcagctgcaaggtactctgggtgagtcaccactttcagggctttactccgtaacagattttgttgggcatagcttctggggggtggggcagttttttttgaaaatggggctccaaccagaaaaagccccaagtttcatggcagctgttgggcagagttacaggtctgggggttccatgttagttaccttatagttactgtgtaattagcgccacttagtgtatgttacccaaaaataaatatatctacccccagactagatgtagtatttttggtataatgggatttcctaatacctgtcatccctcaaaggaaagtgtattgggttttttaaaaaagaaagtgtatttggaaattaaaagtccaggatggaaaaattccatttttttaaaattccccgtttttgtcacctttttcctgaataaaagatggcccatattacccctttttcggccccccatgtatcctcagtacccccatggagctgggcctaagtaaataggaatttggtttcaacgcctgaggcaattagacacttgggaaaatggccatcccctgtctcaccctggacttaagcgtctggctctaattcacgagtgctcttttctcctcgactgtataccaggttccctcccagaggagccaccagttctcatgggtggcactcagtctctcttctctccagctgactaaactttttttctgtaccgagttaattttttccaactactaatagaataaaggcgagttttctaaaaaaaaaaaaaaaaaaa

SEQ ID NO: 724 - DNA, 714 bp, Homo sapiens
  SIMILAR (487)..(708): 1001254mologous to Homo sapiens Human DNA-topoisomerase-I alpha protein,accession number AAR88405,Smith-Waterman Score=364.
atgagggaagaagccagaagtcgggagctgtgggctggggcttcccgccatgtcccggtgcctgtgtacaagaacttacagctctttatggagaacaaggacccccgggacgacctcttcgacaggctgaccacgaccagcctgaacaagcacctccaggagctgatggacgggctgacggccaaggtgttccggacctacaacgcctccatcactctgcaggagcagctgcgggccctgacgcgcgggcttcctggaggaggcgccgaggctgggtgctcaggggcgctgacgctcggcatgtgtttcgcgtgcacccgtgggcctcagaggccggtgctgtgctgccctggggacaaccttggagctggggcagcactggggctgtgggatgcggaggagctagctggcatccaggtgagagccccaggagaggagacgccccctccactgagggaggcagaagattctggcccgtgcctctcagccgaggacagcatagcagctaagatcttatcctacaaccgagccaaccgagtcgtggccattctctgcaaccatcagcgagcaacccccagtacgttcgagaagtcgatgcagaatctccagacgaagatccaggcaaagaaggagcaggtggctgaggccagggcagagctgaggagggcgagggctgagcacaaagcccaaggggatggcaagtccaggaggtga

SEQ ID NO: 725 - DNA, 2816 bp, Homo sapiens
  SIMILAR (1640)..(1966): 991254mologous to Homo sapiens Human DNA-topoisomerase-I alpha protein,accession number AAR88405,Smith-Waterman Score=583.
atgggggtgacctcggctgccagtgggcttgtgggctctgcccctcagtgcgtggctctgcccagtgaggggtggacgctggcagtatggcctgttgcggcctgcacctgctccggagttgggagcagccccaagctgacccctggctcctttgttcattgcccttggtttctgctcctgacagaggccacaagggctgagatcaagaggccattttccaaagctgagttaaaagcatctgttaggcccatggagggcagccattgctggggtggggaagcacggaggacgagccagggccacactgagcagaaaggagagttacgggccaggagacaagcacagaacgaggacgaggatgtaaaagaagtgtgggtgggaaaaaccaagaaagaagaaagtgacaaattaggttgccagggagcctgggtgccccccagagtgccctcttggatcggcaggtttgagctgtgggttgtagggtactgggagcagccagcagtaagctggcagatgcgcgtggtgcggctgctgcggctccgggcggctctgacgctgctcggggaggtcccccgccgcccggcctcccggggtgtcccgggctcgcgcaggacgcagaagggcagtggagccaggaccgattctgcatggcggcgggcgctcactgtcatatctacatcaccaggcacaagccgcatggatccagtggccctggtggccgttggtggtcccaggcgctttcctggaggacatacccttcagagacttcctgttgctctgaggacactcatcccagccgaccaggcccaccaggcccccaacagcactacctggctggggtcacgtgcaggtctcctggctctggcagctgggcttggtgggatccgtgactcagcagcacacgggcctctgcaggtggggggcatgggcgggtacacgggcatggggtctgaggtcaggtgggagaaggagaagcacgaagacggggtgaagtggagacagctggagcacaagggcccgtacttcgcacccccatacgagccccttcccgacggagtgcgtttcttctatgaaggaaggcctgtgagattgagcgtggcagcggaggaggtcgccactttttatgggaggatgttagatcatgaatacacaacaaaggaggttttccggaagaacttcttcaatgactggcgaaaggaaatggcggtggaagagagggaagtcatcaagagcctggacaagtgtgacttcacggagatccacagatactttgtggacaaggccgcagcccggaaagtcctgagcagggaggagaagcagaagctaaaagaagaggcagaaaaacttcagcaagagttcggctactgtattttagatggtcaccaagaaaaaataggcaacttcaagattgagccgcctggcttgttccgtggccgtggcgaccatcccaagatggggatgctgaagagaaggatcacgccagaggatgtggttatcaactgcagcagggactcgaagatccccgagccgccggcggggcaccagtggaaggaggtgcgctccgataacaccgtcacgtggctggcagcttggaccgagagcgttcagaactccatcaagtacatcatgctgaaccctttgctcgaagctgaagggggagacagcttggcagaagtttgaaacagctcgacgcctgcggggatttgtggacgagatccgctcccagtaccgggctgactggaagtctcgggaaatgaagacgagacagcgggcggtggccctgtatttcatcgataagctggcactgagagcaggaaatgagaaggaggacggtgaggcggccgacaccgtgggctgctgttccctccgcgtggagcacgtccagctgcacccggaggccgatggctgccaacacgtggtggaatttgacttcctggggaaggactgcatccgctactacaacaagagtgccgggggagaagccggtgtactagaacttacagctctttatggagaacaaggacccccgggacgacctcttcgacaggctgaccacgaccagcctgaacaagcacctccaggagctgatggacgggctgacggccaaggtgttccggacctacaacgcctccatcactctgcaggagcagctgcgggccctgacgcgcgccgaggacagcatagcagctaagatcttatcctacaaccgagccaaccgagtcgtggccattctctgcaaccatcagcgagcaacccccagtacgttcgagaagtcgatgcagaatctccagacgaagatccaggcaaagaaggagcaggtggctgaggccagggcagagctgaggagggcgagggctgagcacaaagcccaaggggatggcaagtccaggagtgtcctggagaagaagaggcggctcctgtaaaaactccaagaagcacctggcccatctgagtgtgcaggccacggaccaaggaggagaacaaggcaggtggccctgggcacgtcccagctcaactacctggaccccaggatcagcattgcctggtgcaagcggttcagggtgccagtggagaagatctacagcaaaacacagcgggagaggttcgcctgggctctcgccatggcaggagaagactttgaattctaacgacgagccgtgttgaaacttcttttgtatgtgtgtgtgtttttttcactattaaagcagtactggggaattttgtacaaaaaaaaaaaaaaaaaaaaaaaaaaaaaagggcggccgctctagagtatccctcgaggggcccaagcttacgcgtacccagctttcttg

SEQ ID NO: 726 - DNA, 2390 bp, Homo sapiens
  misc_feature (1)...(2390): n = a,t,c or g
cccattctgccatacccattgcccagattgtgtgatttcatgtccaatgcttatccccatgagactcaggttataggcagtgaggaattgttcttcctggaaatgtcctccagcaacttcagaggaatgggaaagtgttaatcttacgtgaagcaaaggagcctgtactaggggcagagagaaagaagcagcagcccaccttctttgtgtatgcacatgtgcctatgtcgtgtacattggtacctgactgtggctcagatctgcgtcgcagcagcgagagaagaaatcactccatatccgatgagaggaagggtggcacagagatggtgtctacaattagagacatttctgactccaccttagcataagcaaactttatatactgagtaacatttgaaggttgtcttttaatggtggggggtgttttttcctttttaaactacagtgcttgcacaagagagggagggactcagaaaaggttagggcaggtgagggagacagtagatggcctgggatgacttgagtccatcatactattgcttggcaggtgtcctcccccatgtttgattcaaattccatgagtgacctacctttccccaggaatgggactgagagggtagtctccagcaactcagtctgcacagggctccccgttcaggctgcctttggtggttgtgcttttgtaagtttctttctctgcacttcgacttacctctgaatcagaaagcaagcccagcaggtgaatgagggatgtctgcttggcattgcccaatctaaccagggaggctggctggccacccactgtccgctagaggggagagctagcaggtgttggtatgaactcaggaatagaaacacggaggccttttttaaatacggagggagaagaatccatgatgcatacctgtaaccccctagaacccaagtgccagaattcctagatgctgcttctgtttgaacaaaatgtcactgcttttacacttgaaaaaaacacactcgaaaaatgttcaactccatgaaaaatattttttggctttaagaaattgtttggtgtttaactgtttcctttgattgccattccaccagtaaattgttggttgatttgcactgccctctggggttggggttgggaggggagggtccttatacagagccgaacctggggttgctcaggaagtgggccagggaatgtggaagtcgttgacattgcctgggccaaaagagtgggagatagtttttctcccctcagcccactcctggtagcacctgtcgccagcctggtacaaagccaggcctttttcttctgtgagcatctcatcactgtccagcagcaggtggaaaaagggggacaacaaccagacctattttttctcccccattttttccaaattttgctgtgccaaatgtttaaaattttataaatatgaatctattgaaatttccttaatcaagagcttcttcgtgtaaagtttgcttttttagctatagaaaaagaaaacagtaaatatctcttaatggcatccagccttgctgagctcaccttttttcctgaaggaatgggtaggagtgaaatatttaatgtaaacatttcaccaagtccctttaccctaattttgaagctgcattaaacccaactcactaacacagggaatgattgcaccctagtcctctgtgggccaagaaactttcagaagcattaaaaaaatagttgaagtatatcacttctcaccaagtgggtagagtcagttggctgtttgtcccttgttttttatttattccataattatgtttgtgctttttgttttgtaaacagtaatggaacgtacatttttattttgtttagaagacaactttgattcaatctttcaagaactgttccattcttggtttcttcttagggggataaaaagttaccagttaatttgttttgagatatttaagcattctttgagttatagaattgtgatgcagggatttgtgaatgagacatttcacatgtgaaaaggtgacttcactaagttaccctgcttgagcagaggtaaaagtgtggtatagtgtacactaaagatgtaaggtaatgcttaacctccagttgtggcaggtgcctctttagagtgttcccgctttctattaaaggtctctcaaaatttgttgcagtatatatttagtatagtatatgagtgtaagtgttatagaaagtatatgttataaatatacagtattttgttccagggggtgatcttgaataggtcctggtatttgtgtatatggagagtgtgaaaggaaagaaaggtactttctccctctagaaaatataaatcacccaaaagtcctgtttaaggtaagaaaaagtattgaaacgaaaaaaataaaaaanaaaaagccattgc

SEQ ID NO: 727 - DNA, 428 bp, Homo sapiens
  SIMILAR (18)..(428): 991254mologous to Homo sapiens oxidation protection protein,accession number AF309387,Smith-Waterman Score=708.
ggagtgcggcggaagtcaatattcaacaagtgtcacaaaaagaagctaagcataaaattacatctgctgatggacacatagaaagttctgcacttttaaaagaaaagcaaaggcatcgattacataagttcttgtgtctcacagttggaaaaccaatgaggaaaacgtttgtatctcaagcaagtgctacaatgcaacagtatgcacagagagataagaaacatgaatattggtttgctgtgccacaagaaaggacagatcacttgtatgccttcttcattcagtggagtccagaaatatatgcagaagatactggcgaatataccagagaacctggatttatagtagtaaaaaagattgaggagtctgaaacaattgaggattctagtaatcaagcagcagccagagaatgggaggtagtgtcagtg

SEQ ID NO: 728 - DNA, 1574 bp, Homo sapiens
  SIMILAR (256)..(1023): 541254mologous to Mus musculus nucleolar protein C7B,accession number AF333985,Smith-Waterman Score=635.
  misc_feature (1)...(1574): n = a,t,c or g
cactgaaagcatcggaaccgccccggaatcccggtcgacccacgcgtccgcggacgcgtggggaattacttggtctataaggttaattttttggtcatattgaataaggcacattttttatatgctttggagatacgtgctacatccttttgttaaaaagtctttttagtgatactaattctgcgttcagcgcgtgaaaagtaaaataccacaattttaaaagtctaattatttttaattttgtttaatgacagagatatagatcagctatcaggaagggacttctgccattcaaagaaaatgacaggaagtaacactgaggaaatagactcaagaatccgagatgcaggtaatgatagtgccagcactgctcctaggagcactgaggagtctctttctgaagatgtgttcacagaatcagaactttcccctatacgagaggagcttgtatcttcagatgaactgcgacaagataaatcttctggtgcgtcatcagaatctgtgcaaactgtcaatcaggctgaagtagaaagtctgacagtcaaatcagaatctactggtactcctggtcacttaagatctgatactgaacattctacaaatgaagttgggactttatgtcataaaactgatttaaataatcttgaaatggccattaaggaagatcagattgcagataactttcaaggaatatcaggtcctaaagaagacagcacaagtataaaaggtaattcagaccaggattcttttcttcatgagaattcgttacaccaagaagagagtcaaaaagaaaatatgccttgtggggaaacagcagaatttaaacaaaagcaaagtgttaacaaaggaaaacaaggaaaggagcaaaatcaggacttcacaggacagagggcagganggagctacgcaaactttgggaaaacccatactatgcaacaaactaaacagcaaagggaaaatattcaacaagtgtcacaaaaagaagctaagcataaaattacatctgctgatggacacatagaaagtaagtgttatagagtaaatgaagttagttcatccaattgtatggtgtctccgtctttcctcactgactcaaaagccgctgtaccttagggcaacctgaaggataagtgagtgacccttgaccggtgattctctggggacaagtatatacagtctccagtgtctactgtcttttcttatcccacaggtggattgtacacataatgagcatcattgctacccaccatgtttaaacattcttggctcactacatcgtatcattaaacaatttatttcttgagaaatttgcacaaaagctgtataatacctttgatcactccatttttcttcttaaaaaggtttttggtgtgttaccattaaaaatgtcttttttcatatataacattttaattgccaaagttgtaatcccatcttttataaaatgtacagttaaacctaaaagtgtacttacagaattcttccacgtatcgagaagtttcatcatcatcatctaattattttcttttaaaaacctgccctcaggacaaataaaaacactattttatctgtca

SEQ ID NO: 729 - DNA, 2424 bp, Homo sapiens
  SIMILAR (1250)..(1456): 681254mologous to Homo sapiens transformation-related protein,accession number L24521,Smith-Waterman Score=236.
atggaccacatgtgggcctggaaacaaggggtttatgtccctaatatccttatccagttccaaaaatggaaaactccccaaaatcccctacaaacacaaatgtgtttaaaggataataatcccagttccttcagttcctccttgggactctcccctgcagttatgtctctgaaaaaggaattttacaagagaataaacaaaccactacaccatatcaaaacgaaatataaagtttcttcccaccagcctgatttagcatactcagagttaagaactggggacgaaatatttggctttaagaaataagaaatggcctaaatggatattttggaaaaagttagctattgaagtgttatttaaggtaagggggaaaaaaggacaaactcatgctttttgcaatatccatcctagtggacactgaatagggctattgctttctttccaatactctgggcccacatttcatcatactaaaaagacataattagttttcttacccatgtcaatggatattagatataacacaaggaaaatgaaatttgcttctagactcaaaatctgttgacacttaaagtataattatacttttttattaaactgttagaatcatctatggagaaaaatgagttttagcttccaataaagctctgctcttattagaaatcatattgagcagtgaaactaccaatatggcagttgctattctattgttttaacatgactctacctatcccaattggaatgtctaattcaagagacatgagttagattttcaaattaaatgattgtgaatagaggtgattacactgatggcatattccctatttctttaggaaatataaaatacattcataaaggccttacttggatcaggggtacagatatcaattgggaatctctaaggtaataagttttcttgatgcgattttattattttttcattttccaaatctaattttcagtactgataattggacaattttcaagtaagagtctgttaaatccgtcagtaataaaactgagttttaagactgagggctgggaaaggagactttaaatagcaaagtcagacatatcaaaagaaatcattattcaagagtccagctatctgctgaaacttctggggggctaatacttgaaaattaaggactttgttttttctaagttaaaaatgggggaaatgaagttataatctgccatttccaccttacatttggaatttatttattattttttgagacggagttttgctcttgtcgccccaggctggagtgcaaatggcgccatcttggctcactgcaacctccgcctccctgggttcaagcgattctcctgcttcagcctcccatgttgctaggattacaggcacctgccaccacgcccagttaaattttttgtagttttggtagagacggggttccactatcttggccaggctggtctcaaactcctgaccccaggtgatctgcacccccgcttggcctcccaaagtgtgtgagccactgtgcccagcccagagtttctaccttttgatggtaccttttgaaggagcagctggagagggcaggatcaaaattaaatcacatgaaagtgtactccccctccgcctgctccttaataaggaacccccttatgactagaacccaagacccagtaccccacagccctgaaaagggaatttccagacaacccctaccataggaagtagtgaagaaaccttaatttcctaatctccctagtggaataccagtgaaggaattcccatttgtggggcaatggggggatgctgggggagttccctcccctcacagactagagacggcacctaagattctgtaactctgggaagggtaccagccttatagaaattccagtaggtcaactgcctcttgaagcatgcttaaagtctcttaacaggtttataaatgccaatttctggttggtattatatccacagcatagcactgtctactgcatcaggagggctatggagacttaatatactagacatgcgattaaaaaaactgaaagaaaagggaaaggccaacagagtaagggggccaaagaaatggtgatgcagtcttctaatagatgtgaatggggaaggaagaaaagagaagtttagatccaaaatgaacaaagaagtcaagcattaaattccaaatgaacaggtatacagaaatgaaaagttaatgaaatcattgtattatcacaatccaagagctcaagatggaatttaagctttttctccttcactagcttcatcctttggcagccagtctaagaatctctgaaattcaggtttttcaggagattatctctatcctgaatacctgaagacctaatctaaactgttatttctttctgtgaatttcaaagtcatagcattttgtcttaactggccttgaattttctttttttctg

SEQ ID NO: 730 - DNA, 973 bp, Homo sapiens
  SIMILAR (209)..(811): 441254mologous to Mus musculus putative,accession number AK012331,Smith-Waterman Score=214.
cagacgttctttctttgctgcgtctactgcgaggctgggacacactggggcccgctgtcggtctcccgtcctccgacatcttgtctggaacttccgcctggcagtctccagtaggagtggagctctgtgcggcgtagtttggtggaaaaacgggccttgcgtcggcctcacccccagtgtttgtgtttcagaatgaagactattctcaagcaatcagactgtcgaccattcccagaaaaatgtcgacattactctgaaggggacgccccagtaatcgtgtaagggccccagaggaacctctgcggaagggacttcaatccacatcaaatgtggaacctcagcccttcttgggaaagagaaaaaaagaggcttccgggttgaccaaatggtgggggtaccagaagggaactgggctacccgttcgggactatttggtagtcatgtacaggaccatgatccaaggggtgttaccactggggcttcccgttaccaagatgagggtcctgtgtatgcctcaccttccccccatccaaccgttggtttatcccaggagaatgggtcctccttgttgaaatcccgaaatttctttggggtgaaaaaatatatcccgcagggtttccggatgagaccaggttgtttgcttgtttcagtatctcaaggccccagaaaagagtgaattaatcccttgaaaggaaatgacatttgagctttgttgcaaattccagcggctttggattccagcaagccccaccaggttaaaaacaaagggtatcaggaaattttttggatgggtatcaatgtctctggaaaaaggaactgttcaaccaggcttgattgaataagatctaagaagttacctggctacagaaaaaaagatgccacgatgacacttaagacctacttgtgatatattaaaagatgcaaaaaaaaacacatattagatttggaaaaaaaaaaaaaaaaaaagtcgagc

SEQ ID NO: 731 - DNA, 3173 bp, Homo sapiens
  SIMILAR (548)..(985): 1001254mologous to Homo sapiens oncogenic protein-associated protein,accession number L07557,Smith-Waterman Score=769.
cgactacgaccagtgaggcggccgccgcagcccaggcgcgggggcgacgacaggttaaaaatctgtaagagcctgattttagaattcaccagctcctcagaagtttggcgaaatatgagttattaagcctacgctcagatcaaggtagcagctagactggtgtgacaacctgtttttaatcagtgactcaaagctgtgatcaccctgatgtcaccgaatggccacagcttgtaaaagagagttacagtggaggtaaaaggagtggcttgcaggatggagaagctgcaccagtgttattggaagtgagccaccatttgaatttgctagctcatgctgcagtattcagattatgccagcaggtttattttttgttttgcaagccagctctgcctccttacagtatgacatctgatgctggagggtcgcactttcaaaaatgagtcagctggtacatggggttatcatcaatttttagctcttctgtctgggagatacaagtttggaagcaatcttggggtacttacccacaaggctggtggagaccagatcaggagaacctcagtctgacgacattgaagctagccgaatgaagcgagcagctgcaaagcatctaatagaacgctactaccaccagttaactgagggctgtggaaatgaagcctgcacgaatgagttttgtgcttcctgtccaacttttcttcgtatggataataatgcagcagctattaaagccctcgagctttataagattaatgcaaaactctgtgatcctcatccctccaagaaaggagcaagctcagcttaccttgagaactcgaaaggtgcccccaacaactcctgctctgagataaaaatgaacaagaaaggcgctagaattgattttaaagatgtgacttacttaacagaagagaaggtatatgaaattcttgaattatgtagagaaagagaggattattcccctttaatccgtgttattggaagagtttctttctagtgctgaggcattggtacagagcttccggaaagttaagcaacacaccaaggaagaactgaaatctcttcaagcaaaagatgaagacaaagatgaagatgaaaaggaaaaagctgcatgttctgctgctgctatggaagaagactcagaagcatcttcctcaaggataggtgatagctcacagggagacaacaatttgcaaaaattaggccctgatgatgtgtctgtggatattgatgccattagaagggtctacaccagattgctctctaatgaaaaaattgaaactgcctttctcaatgcacttgtatatttgtcacctaacgtggaatgtgacttgacgtatcacaatgtatactctcgagatcctaattatctgaatttgttcattatcggaatggagaatagaaatctccacagtcctgaatatctggaaatggctttgccattattttgcaaagcgatgagcaagctaccccttgcagcccaaggaaaactgatcagactgtggtctaaatacaatgcagaccagattcggagaatgatggagacatttcagcaacttattacttataaagtcataagcaatgaatttaacagtcgaaatctagtgaatgaatttaacagtcgaaatctagtgaatgatgatgatgccattgttgctgcttcgaagtgcttgaaaatggtttactatgcaaatgtagtgggaggggaagtggacacaaatcacaatgaagaagatgatgaagagcccatccctgagtccagcgagctgacacttcaggaacttttgggagaagaaagaagaaacaagaaaggtcttcgagtggaccccctggaaactgaacttggtgttaaaaccctggattgtcgaaaaccacttatcccttttgaagagtttattaatgaaccactgaatgaggttctagaaatggataaagattatacttttttcaaagtagaaacagagaacaaattctcttttatgacatgtccctttatattgaatgctgtcacaaagaatttgggattatattatgacaatagaattcgcatgtacagtgaacgaagaatcactgttctctacagcttagttcaaggacagcagttgaatccatatttgagactcaaagttagacgtgaccatatcatagatgatgcacttgtccggctagagatgatcgctatggaaaatcctgcagacttgaagaagcagttgtatgtggaatttgaaggagaacaaggagttgatgagggaggtgtttccaaagaattttttcagctggttgtggaggaaatcttcaatccagatattggtatgttcacatacgatgaatctacaaaattgttttggtttaatccatcttcttttgaaacagagggtcagtttactctgattggcatagtactgggtctggctatttacaataactgtatactggatgtacattttcccatggttgtctacaggaagctaatggggaaaaaaggacttttcgtcgacttgggagactctcacccagttctatatcagagtttaaaagatttattggagtatgttgggaatgtggaagatgacatgatgatcactttccagatatcacagacaaatctttttggtaacccaatgatgtatgatctaaaggaaaatggtgataaaattccaattacaaatgaaaacaggaaggaatttgtcaatctttattctgactacattctcaataaatcagtagaaaaacagttcaaggcttttcggagaggttttcatatggtgaccaatgaatctcccttaaagtacttattcagaccagaagaaattgaattgcttatatgtggaagccgcaatctagatttccaagcactagaagaaactacagaatatgacggtggctataccagggactctgttctgattagggagttctgggaaatcgttcattcatttacagatgaacagaaaagactcttcttgcagtttacaacgggcacagacagagcacctgtgggaggactaggaaaattaaagatgattatagccaaaaatggcccagacacagaaaggttacctacatctcatacttgctttaatgtgcttttacttccggaatactcaagcaaagaaaaacttaaagagagattgttgaaggccatcacgtatgccaaaggatttggcatgctgtaa

SEQ ID NO: 732 - DNA, 363 bp, Homo sapiens
  SIMILAR (176)..(78): 931254mologous to Homo sapiens similar to mismatch repair proteins; similar to PID:g1304125,accession number AC006014,Smith- Waterman Score=161.
  misc_feature (1)...(363): n = a,t,c or g
ggattttcagcaggaactttattccaatgctaatggcagacatcaggaaggaggagaggaaccatttgtgcagatcatctagaagaacctggaccattcttgacagagctgaatacagtgatcacgttgtcctccaaggagcaggggtggggtggggtacttctangagtccttttttatattcctttgaaattccttatggcgcacaggtagcgtagaaaataactgcttcacgctgactgtggtccctctggggtgggggtagggggttttntnnatnatttttnnatntttatcaaaaacctatcnaatccaaatcttctccnatactttacatgtagaaattgtgacatcattaaagct

SEQ ID NO: 733 - DNA, 3039 bp, Homo sapiens
  SIMILAR (1577)..(1437): 331254mologous to Homo sapiens PMS2L13,accession number AB017004,Smith-Waterman Score=55.
ctagatgatctgcacaaatggctcctctcctccttcctgatgtctgccattagcactggaataaagttcctgctgaaaatccacatctcccctgggtccggtgttctcctccaactcctccggggaaacccaagccctgcagcgcatggaacagaagaactggaaccgacgcttctggaacaaggctatctgagagcagttcttcctggccctcgggttcatgggacggcataactggaaccaatgcttagggcgcaagggtatgtgagagtgggtcttcccgtacaggaagtagaagatcttttgtttgggggcctcgtcgtcctcctccatgtcattggccagatagctcagcattggggtgactgtgctcatgtggaaattgcggggtggaggggtattcgaaggtcggatgcaaatccgagaagccggaggaagggttttaggtgatgctcccaggatggtgggctccgatgggatcttgtctgacaccctcagatctttgtcccaggccaggaatcttttaatgacaggatcctcaagcagcctgttgaaggcctcgtagtactcagggagcacgagcgacactcgccgtcgcttcgccttcatcttgaggccacacagcgtctccgccacccaggtctcctcaggctcaggggcgagctccttctctggctcatcatcagattcatccaaacactccctcttccttttgcagccaagggacctacgcggggggctgggatctaccccaggggcaagcagcctgttgaaggcctcgtagtactcagggagcacgagcgacactcgccgtcgcttcgccttcatcttgaggccacacagcgtctctgccacccaggtctcctcaggctcaggggcgagctccttctctggctcatcatcagattcatccaaacactccctcttccttttgcagccaagggacctacgtggggggctgggatctaccccaggggcaagcagcctgttgaaggcctcgtagtactcagggagcacgagcgacactcgccgtcgcttcgccttcatcttgaggccacacagcgtctctgccacccaggtctcctcaggctcaggggcgagctccttctctggctcatcatcagattcatccaaacactccctcttccttttgcagccaagggacctacgtggggggctgggatctaccccaggggcaagcagcctgttgaaggcctcgtagtactcagggagcacgagcgacactcgccgtcgcttcgccttcatcttgaggccacacagcgtctctgccacccaggtctcctcaggctcaggggcgagctccttctctggctcatcatcagattcatccaaacactccctcttccttttgcagccaagggaccaggcagcaggtagagctgcctgccagttctgcgccttgctcccgcactcctcggcccttgggcggtcgatgggaccgggcgccgtggagcagggggcggcgctcctcgtggaggcttgggccgcgctggagccctgggtgatggagagtttggtcccctcgatggactgccactgctgcctccctgagctccgtgtgtccagctcaactcggcagaaatacacagactggtcctgcttctgcaggttggagatcctgaggaagccgctcttctgaccctctgtccagttcagaaagagccggttcacataatccttgtgaatggaaggcggccttgtgctgtagaaggactgcctgtggaagtggccccgtctccaggatattctcacgtcgggagctgtggctaactcccaggggtaatagaaggagaaggggatttccacagagccacccatggaggctgagaggtgttttggttgagtgaccccataaaggtagcttggaccagatcctgtggagccactaggctgcagaaatgctggcggcagcagcaagggcagtaggggcagcagcaggggccgacccatggccttgttcttctccaggggacggggagaccagcagagccgtccaggcaggagaggggccagttctgcaggctgtacaggaagcatggctggggaggcctcaggaaactgacaatcacggcagaaggcgaaggggaagcaggcacgtttcttcttaatattcctttgaaattctttatggtgcacaggtagcgtagaaaataactgcttcacactgactgtcatccctctggggtgggggtagggggttttctggatgattttcccatagtgatcaaacaccagtcgagtcccaaccttcgccgatacatggcaggtagaaatggtgacatcactcagtgcacaaagtgagctcagagcttccccccgaaagccaaaagtttcaacctgaggtaggtcggcaaactcttgaatcttagatgtgtgatgtttcagagttaagccttcgaagttttcttcttctaccccacatccattgcctgaaacttcaatgagatccactccatagtccttaagctttagatcaatattagtggcaccagcatccagactgttttctactaactccttcaccgcagtgcttagactcggtaccaccggcccagagcaaatctgatggactgacttccgatcaataggtttgatggccttagcaggttctgtacggactgcgttttttccgaacgccagcagcagggtcagaagggaggtagtcgccctccgtcgtggcctggcgtggattccgagcgttggtgtctggcggtttccgaccgttggtgtctggcacgcgccaccccgatgtaccaggtaaagccctatcacggggtcggcgcccctctccgtgtggagcccacctgcatgtactggctccccaacatgcacggcaggagcggcggcccagcactcggcactggccacttgcaggtaggagcgcggggcccccccgcccactgggttcacactgggaacccggtcaccattctgtgagcaaggccagcagtcaaaggaaaaggccgtgtgtaggtgttcttgccagcagtcctcaccgaggtcccagccaacatccat

SEQ ID NO: 734 - DNA, 460 bp, Homo sapiens
  misc_feature (1)...(460): n = a,t,c or g
ggcgtggtctggattgattatttgctgcccagtgatatttttccttaatggggttgtggttatttgaacatatttattagctctggaagataatcctgtgctgttttttatgtagaaaaaaacataannnnnnnnnnnnnnnnnnnnnnnnnnnnnnnnnnnnnnnnnnnnnnnnnnnnnnnnnnnnnnnnnnnnnnnnnnnnnnnnnnnnnnnnnnnnnnnnnnnnnnntctacatctannnnnnnnnnnnnnnnnnnnnagaaaaacaatagaagagaaggctgatcccaagctacannnnnnnnnnnnnnnnnnnnnnnnnnnnnnnnnnnnnnnnnnnnnnnnnnnnnnnnnnnnnnnnnnnnnnnnnnnnnnnnnnnnnnnnnnnnnnnnnnnnnnnnnnnnnnnnnnnnnnnnnnnnnnnnnnnnnnnnnnnnnnnnnnnnnnnnnnnnnnnnn

SEQ ID NO: 735 - DNA, 1104 bp, Homo sapiens
  SIMILAR (367)..(885): 611254mologous to Mus musculus putative,accession number AK015441,Smith-Waterman Score=538.
atggacagaacggagactaggttccgtaagaggggacagattaagggaaagatcacgaccagccgtcaaccgcacccccagaatgagcagagtccccagcggagcacctcggggtactccctccaggaggtggtggatgatgaagtgttgggatcatcagcccctggggtagatcccagccccccatgtaggtcccttggctggaaaaggaagaaggagtggtcagatgaatctgaggaggagccggagaaggagctcgcccctgagcctgaggagacctgggtagtggagatgctgtgtgggctcaagatgaagctgaagcaacagcgagtgtcacccatcctccctgagcaccacaaggacttcaacagtcagcttgcccctggggtagatcccagccccccgcataggtccttttgctggaaaaggaagagggagtggtgggacgaatctgaggagtcgttggaggaggagccacggaaggtgctcgcccctgagcctgaggagatctgggtggcggagatgctgtgtggcctcaagatgaagctgaagcgacggcgagtgtcgctcgtgctccctgagcaccacgaggccttcaacaggctgcttgaggatcctgtcattaaaagattcctggcctgggacaaagatctgagggtgtcggacaagtatctcctggctatggtcatagcgtatttcagccgggccggcctcccctcctggcaataccaacgcattcatttcttcctggctctctacctggccaatgacatggaggaggacgacgaggaccccaaacaaaacatcttctacttcctgtatgggaagacccgctctcgcatacccttggtccgtaaccgtcggttccagttatgccgttgcttgaacccgagggccaggaagaaccgctctcagatagccctgttccagaaacttcggttccagttcttctgttccatgagcggcagggcttgggtttcccgggaggagttggaggagaacaccggacccaggggagatgtggattttcagcaggaactttattccaatgctaatggcagacaacaggaaagaggagaggaaccatttgtgcagatcatctag

SEQ ID NO: 736 - DNA, 466 bp, Homo sapiens
gtcttttttctttttgggggggatggagtctcgctctgtcacccaggctggagtgcggtggcgtgaacccaggaggcagaggaaccatttgtgcagatcatctagaagaacctggaccattcttgatggagctgaatacagtgatcacgttgtcctcctaggagcaggggtggggggaggggggtggggtccttctaggagtccttggagaaaagtaagaaaccaggagcgtttcttacggacttgcagtccaggaggatttgaaggcacaatgcaggggctcagattgggacagaattcttttgtgaaatatcagtgccacagattgtaacagatagcttcatgcacactctgcattttattggtttgtatggaaaatgtcggccattgaattattcatagatttatttcaaatagtttggaaattgttgtacttttgaaaacatgctgttcctgtagttttttg

SEQ ID NO: 737 - DNA, 2172 bp, Homo sapiens
  SIMILAR (1905)..(1486): 901254mologous to Escherichia coli InsB,accession number D10483,Smith-Waterman Score=652.
ctagatgatctgcacaaatggttcctctccttcttcctggtgtctgccattagcattggaataaagttcctgctgaaaatccacatctcccctgggtccggtgttctcctccaactcctccggggaaacccaagccctgcagctcatggaacagaagaactggaaccgaagtttctggaacaggactatctgagagcggttcttcctggccctcgggttcatgcaacggcataactggaaccgacgcttacggagcaagggtatgcgagagcgggtcttcccatacaggaagtagaagatgttttgtttggggtcctcgtcgtcctcctccatgtcattggccaggtagctcagtgttggggtgactgtactcatttggaaattgcgggatggaggggtattcgaaggtcggatgcaaatccgagaagccagaggaagggttttgggtgatgctcccaggatggtgggctccgatgggatcttgtccgacaccctcagacctttgtcccaggccaggaatcttttaatgacaggatcctcaagcagcctgttgaaggcctcgtggtgctcagggagcacgagcgacactcgccgtcgcttcagcttcatcttgaggccacacagcatctccgccacccagatctcctcaggctcaggggcgagcaccttccgtggctcctcctccaacgactcctcagatttgtcccaccactccatcttccttttccagcaaaaggacctatgcggggggctgggatctaccccaggggcaagctgactgttgaagtccttgtggtgctcagggaggatgggtgacactcgctgttgcttcagcttcatcttgagcccacacagcgtctccactacccaggtctcctcaggctcaggggcgagctcccggcccccttccttcgtcttagtcaatcctatcccacctcttcttccaccagtcccctcatctgatggtcccaacacttcatcatccaccacctcctggagggggtaccccgaggtgctccgctggggactctgctcattctgggggtgcggttgacggctggtcgtgatctttcccgtaatctgtcccctcttacggaacctagtctccgttctgtccatggccttcttctggacactggaggccatggagtggaacttccagatgaactcatggtggtcctcatttccgaactgttccagcacacactcggcttgggccagccgctcccgggttccctgggcctgctccagctgcatgtccagggaggccaccaggccacgggtgtgaccccctatcccctccaggcagcgggccttctcctcgtccaccgggtggcgcagctcctggaactcgcggcggatcacccagctgaagacatccgactcattgacgattcgggtccggtttttcaccagtttggcgatgagctcatccaccttcttctgctcctgcttcagctcagagaagagggctgcgagctcctctttgtcatgcagctccaccgattttgagaacgacagcgacttccgtcccagccgtgccaggtgctgcctcagattcaggttatgccgctcaattcgctgcgtatatcgcttgctgattacgtgcagctttcccttcaggcgggattcatacagcggccagccatccgtcatccatatcaccacgtcaaagggtgacagcaggctcataagacgccccagcgtcgccatagtgcgttcaccgaatacgtgcgcaacaaccgtcttccggagactgtcatacgcgtaaaacagccagcgctggcgcgatttagccccgacatagccccactgttcgtccatttccgcgcagacgatgacgtcactgcccggcgggttgagaagcggtgtaagtgaactgcagttgccatgttttacggcagtgagagcagagatagcgctgatgtccggcggtgcttttgccgttacgcaccaccccgtcagtagataataccagtccccagcagccgctcttctctgtatagggccataataggattccgaagaaaccttttctttcttcacgtgatccataattttgcccaaatcttcaacatcaacaatggaatttaggctctgatggtcctcaccaccaaactcttcttcactggagctctcgaagggttcttcctccaaaagacacagcagcat

SEQ ID NO: 738 - DNA, 1338 bp, Homo sapiens
  SIMILAR (439)..(741): 551254mologous to Mus musculus putative,accession number AK015441,Smith-Waterman Score=274.
atgaacgatgacatcagagattccgaccttcctgattggagggaccggactccgtgtgtccagaagaaggccatggacagaacgaagactaggttccgtaagaggggacagattacgggaaagatcacgaccagccgtcaaccgcacccccagaatgagcagagtctccagcggagcacctcggggtaccccctccaggaggtggtggatgatgaagtgttgggaccatcagcccctggggtagatcccagccccccatgtaggtcccttggctggaaaaggaagaaggagtggtcagatgaatctgaggaggagccggagaaggagctcgcccctgagcctgaggagacctgggtagtggagatgctgtgtgggctcaagatgaagctgaagcaacagcgagtgtcacccatcctccctgagcaccacaaggacttcaacagtcagcttgcccctggggtagatcccagccccccgcataggtccttttgctggaaaaggaagagggagtggtgggacgaatctgaggagtcgttggaggaggagccacggaaggtgctcgcccctgagcctgaggagatctgggtggcggagatgctgtgtggcctcaagatgaagctgaagcgacggcgagtgtcgctcgtgctccctgagcaccacgaggccttcaacaggctgcttgaggatcctgtcattaaaagattcctggcctgggacaaagatctgagggtgtcggacaagatcccatcggagcccaccatcctgggagcatcacccaaaacccttcctctggcttctcagatttgcatccgaccttcgaatacccctccatcccgcaatttccaaatgagtacagtcaccccaacactgagggtgggtgccagtcctgagctagggacagtcccttaccttcctctctgggaagctgacctcagccggaggcctctcctggtggtgcccctgagcaccaacctgatttctgtcctcagctacctggccaatgacatggaggaggacgacgaggaccccaaacaaaacatcttctacttcctgtatgggaagacccgctctcgcatacccttggtccgtaaccgtcggttccagttatgccgttgcttgaacccgagggccaggaagaaccgctctcagatagccctgttccagaaacttcggttccagttcttctgttccatgagcggcagggcttgggtttcccgggaggagttggaggagaacaccggacccaggggagatgtggattttcagcaggaactttattccaatgctaatggcagacaacaggaaagaggagaggaaccatttgtgcagatcatctag

SEQ ID NO: 739 - DNA, 1322 bp, Homo sapiens
  SIMILAR (888)..(370): 581254mologous to Mus musculus putative,accession number AK015441,Smith-Waterman Score=500.
ctagatgatctgcacaaatggttcctctcctcctgcctggtgtctgccattagcattggaataaagttcctgctgaaaatccacatctcccctgggtccggtgttctcctccaactcctctggggaaacccaagccctgcagctcatggaacagaagaagtggaaccgtcgtttctggaacaggactatctgagagcggttcttcctggccctcgagttcatggaacggtataactggaaccgacgcttacagagcaagggtatgcgagagcggttcttcctggccctcgggttcgtggaacggtataactggaaccgacgcttacggagcaagggtatgcgagagcggttcttcctggccctcgggttcatggaatggcctaactggaaccaacgcttacggagcaagggtatgcgagagcggttcttcctatacaggaagtggaagatgttttgtttggagtcctcgtcgtcctcctccatgtcattggccaggtagagagccaggaagaaatgaatgcgttggtattgccaggaggggaagccggcccggctgaaatacgctatgaccatagccaggagatacttgtccgacaccctcagatctttgtcccaggccaggaatcttttaatgacaggatcctcaagcagcctgttgaaggcctcgtggtgctcagggagcacgagcgacactcgccgtcgcttcagcttcatcttgaggccacacagcatctccgccacccagatctcctcaggctcaggggcgagcaccttccgtggctcctcctccaacgactcctcagattggtcccaccactccatcttccttttccagcaaaaggacctatgcggggggctgggatttaccccaggggcaagctgactgttgaagtccttgtggtgctcagggaggatggatgacactcgctgttgcttcagcttcatcttgagcccacacagcatctccactacccaggtctcctcaggctcaggggcgagctccttctccggctcctcctcagattcatctgaccactccctcttccttttccagccaagggacctacatggggggctgggatctaccccaggggctgatggtcccaacatttcatcatccaccacctcctggagggggtaccccgaggtgctccgctggggactctgctcattctgggggtgcggttgacggctggtcgtgatctttcccgtaatctgtcccctcttacggaacctagtctccgttctgtccatggccttcttctggacacttccagaggacttgggctccaggacccagtaacgcagccctggacttgacc

SEQ ID NO: 740 - DNA, 2257 bp, Homo sapiens
  SIMILAR (1105)..(1692): 441254mologous to Mus musculus putative,accession number AK015441,Smith-Waterman Score=347.
  misc_feature (1)...(2257): n = a,t,c or g
atggactcacccacaccccatgacccagcagctccactcctggtgactgttctagagagtgtccagaagaagaccaaggacagaacagagactagcttcggtgagattggacagattttgggaaagatcatgacgagccatcaaccgcagccccaggaagagcagagcccccagcggagcacctcagggtaccccctccaggaggtggtggatgatgaagtgtcgggaccatcagcccctggggtagatcccagccccccacgtaggtcccttggctgcaaaaggaagagggagtgtttggatgaatctgatgatgagccagagaaggagctcgcccctgagcctgaggagacctgggtggcggagacgctgtgtggcctcaagatgaaggcgaagcgacggcgagtgtcgctcgtgctccctgagtactacgaggccttcaacaggctgcttgcccctggggtagatcccagccccccacgtaggtcccttggctgcaaaaggaagagggagtgtttggatgaatctgatgatgagccagagaaggagctcgcccctgagcctgaggagacctgggtggcggagacgctgtgtggcctcaagatgaaggcgaagcgacggcgagtgtcgctcgtgctccctgagtactacgaggccttcaacaggctgcttgcccctggggtagatcccagccccccacgtaggtcccttggctgcaaaaggaagagggagtgtttggatgaatctgatgatgagccagagaaggagctcgcccctgagcctgaggagacctgggtggcagagacgctgtgtggcctcaagatgaaggcgaagcgacggcgagtgtcgctcgtgctccctgagtactacgaggccttcaacaggctgcttgcccctggggtagatcccagccccccacgtaggtcccttggctgcaaaaggaagagggagtgtttggatgaatctgatgatgagccagagaaggagctcgcccctgagcctgaggagacctgggtggcggagacgctgtgtggcctcaagatgaaggcgaagcgacggcgagtgtcgctcgtgctccctgagtactacgaggccttcaacaggctgcttgcccctggggtagatcccagccccccgcgtaggtcccttggctgcaaaaggaagagggagtgtttggatgaatctgatgatgagccagagaaggagctcgcccctgagcctgaggagacctgggtggcggagacgctgtgtggcctcaagatgaaggcgaagcgacggcgagtgtcgctcgtgctccctgagtactacgaggccttcaacaggctgcttgaggatcctgtcattaaaagattcctggcctgggacaaagatctgagggtgtcagacaagatcccatcggagcccaccatcctgggagcatcacctaaaacccttcctccggcttctcggatttgcatccgaccttcgaatacccctccaccccgcaatttccacatgagcacagtcaccccaatgctgagctatctggccaatgacatggaggaggacgacgaggcccccaaacaaaagatcttctacttcctgtacgggaagacccactctcacatacccttgcgccctaagcattggttccagttatgccgtcccatgaacccgagggccaggaagaactgctctcagatagccttgttccagaagcgtcggttccagttcttctgttccatgcgctgcagggcttgggtttccccggaggagttggaggagaacaccggacccaggggagatgtggattttcagcaggaactttattccagtgctaatggcagacatcaggaaggaggagaggagccatttgtgcagatcatctagaagaacctggaccattcttgacagagctgaatacagtgatcacgttgtcctccaaggagcaggggtggggtgggggtacttctaggagtcagttctgcaggctgtacaggaagcatggctggggaggcctcaggaaactgacaatcacggcagaaggcgaaggggaagcaggcacgtttctggccatggtggagcaggagagacagagagagtgaagcaggaggtgctgcatgcttctaaacaaccagatcccatgagcgctcactcacttcttaatattcctttgaaattccttatggcgcacaagtaggcgttaaaaaatacctggtttacgctgactggtggtcctctggtggtatagtggggctnttttctctataaatatttt

SEQ ID NO: 741 - DNA, 1842 bp, Homo sapiens
  SIMILAR (1)..(603): 971254mologous to Homo sapiens PMS2L13,accession number AB017004,Smith-Waterman Score=1011.
gccgctcctgccgtgcatgttggggagccagtacatgcaggtgggctccacacggagaggggcgccgaccccgtgatagggctttacctggtacatcggggtggcgcgtgccagacaccaacgctcggaaaccgccagacaccaaggctcggaatccacgccaggccacgacggagggcgactacctcccttctgaccctgctgctggcgttcggaaaaaacgcagtccggtgtgctctgattggtccaggctctttgacgtcacggactcgacctttgacagagccactaggcgaaaaggagagacgggaagtattttttccgccccgcccggaaagggtggagcacaacgtcgaaagcagccgttgggagcccaggaggcggggcgcctgtgggagccgtggagggaactttcccagtccccgaggcggatccggtgttgcatccttggagcgagctgagaactcgagtacagaacctgctaaggccatcaaacctattgatcggaagtcagtccatcagatttgctctgggccggtggtaccgagtctaaggccgaatgcggtgaaggagttagtagaaaacagtctggatgctggtgcccactaatattgatctaaagcttaaggactatggagtggatctcattgaagtttcaggcaatggatgtggggtagaagaagaaaacttcgaaggccttaatctctttcagctctgaaacatcacacatctaagattcgagagtttgccgacctaactcgggttgaaactttggcttttcggggggaagctctgagcctcactttgtgcactgagtgatgtcaccatttctacctcccgtgtatcagcgaagggttgggactctgactggtgttggatcacgatgggaaaatcatcccagaaaaccccctaccccccaccccagagggatgacagtcagtgtgaagcagttattttctacgctacctgtgcaccataaagaatttcaaaggaatattaagaagaaacgtgccttgcttccccttcgccttctgccgtgattgtcagtttcctgaggcctccccagccatgcttcctgtacagcctgcagaactgactcctagaagtaccccaaccccacccctgctccttggaggacaacgtgatcactgtattcagctcttgtcaagaatggtccaggttcttctagatgatctgcacaaatggctcctctcctccttcctgatgtctgccattagcactggaataaagttcctgctgaaaatccacatctcccctgggtccggtgttctggaagtgagagagacaatgtcacacctcaaggagacagctctctagacaggaaggttattcacgtcccatgtcaagtctagctagagttcagagcaattgagaaatacaattttatctgctgcctttcattctataccctgcttctgaaccatcgtgttcaactgtgaaactcacattttggtgaccacgactccaaaactcacttaatacacccaaggtcagccccagtgatctgcttcatagcaaggactttgggtgggtctgcccagggagtagggcaccctcagagaatgtggctttggacttcatcacagctggggccttttgtgtcacttaagatctaaacttgtaaccatgctagatgtgtttctaatgtgacaacatcacgaaccacgagtccagaagcctaatccttaatcctacctcctcatgatgaagtctcatgctctgtgctcaacgtggttagctgcacaagatgtaaaccaaagcttcactgaaccctcgacccaaatcagtaactcaagtgcgtcaatcataatgaacctcccc

SEQ ID NO: 742 - DNA, 9273 bp, Homo sapiens
  SIMILAR (2796)..(2915): 821254mologous to Mus musculus E6-AP ubiquitin-protein ligase,accession number U82122,Smith-Waterman Score=154.
  misc_feature (1)...(9273): n = a,t,c or g
atggctgggaaggcttcagaatcatggcgaaaggtgaaagacacttcttgcatggcagtgacaagagaaaatgagaaggatgcaaaagcggaaacccctgataaaaccatcagatctcgtgagacttactaccacaagaacagcatgtgggaaactgcccccatgattcagattatctcccagggggtcactcctacaacacatgagaattatgggagtacaattcaagatgagatttggtgcttgactaacttttgccttgatgatatgttgagctttgtacttgagagctgtactaatcactgtgcttattgtttgaatgtttggtacaggaagcgagcagctgcaaagcatctaatagaacgctactaccaccagttaactgagggctgtggaaatgaagcctgcacgaatgagttttgtgcttcctgtccaacttttcttcgtatggataataatgcagcagctattaaagccctcgagctttataagattaatgcaaaactctgtgatcctcatccctccaagaaaggagcaagctcagcttaccttgagaactcgaaaggtgcccccaacaactcctgctctgagataaaaatgaacaagaaaggcgctagaattgattttaaagatgtgacttacttaacagaagagaaggtatatgaaattcttgaattatgtagagaaagagaggattattcccctttaatccgtgttattggaagagttttttctagtgctgaggcattggtacagagcttccggaaagttaaacaacacaccaaggaagaactgaaatctcttcaagcaaaagatgaagacaaagatgaagatgaaaaggaaaaagctgcatgttctgctgctgctatggaagaagactcagaagcatcttcctcaaggataggtgatagctcacagggagacaacaatttgcaaaaattaggccctgatgatgtgtctgtggatattgatgccattagaagggtctacaccagattgctctctaatgaaaaaattgaaactgcctttctcaatgcacttgtatatttgtcacctaacgtggaatgtgacttgacgtatcacaatgtatactctcgagatcctaattatctgaatttgttcattatcgtaatggagaatagaaatctccacagtcctgaatatctggaaatggctttgccattattttgcaaagcgatgagcaagctaccccttgcagcccaaggaaaactgatcagactgtggtctaaatacaatgcagaccagattcggagaatgatggagacatttcagcaacttattacttataaagtcataagcaatgaatttaacagtcgaaatctagtgaatgatgatgatgccattgttgctgcttcgaagtgcttgaaaatggtttactatgcaaatgtagtgggaggggaagtggacacaaatcacaatgaagaagatgatgaagagcccatccctgagtccagcgagctgacacttcaggaacttttgggagaagaaagaagaaacaagaaaggtcctcgagtggaccccctggaaactgaacttggtgttaaaaccctggattgtcgaaaaccacttatcccttttgaagagtttattaatgaaccactgaatgaggttctagaaatggataaagattatacttttttcaaagtagaaacagagaacaaattctcttttatgacatgtccctttatattgaatgctgtcacaaagaatttgggattatattatgacaatagaattcgcatgtacagtgaacgaagaatcactgttctctacagcttagttcaaggacagcagttgaatccatatttgagactcaaagttagacgtgaccatatcatagatgatgcacttgtccggctagagatgatcgctatggaaaatcctgcagacttgaagaagcagttgtatgtggaatttgaaggagaacaaggagttgatgagggaggtgtttccaaagaattttttcagctggttgtggaggaaatcttcaatccagatattggtatgttcacatacgatgaatctacaaaattgttttggtttaatccatcttcttttgaaactgagggtcagtttactccgattggcatagtactgggtctggctatttacaataactgtatactggatgtacattttccccatgggttgtccacaggaagctaatggggaaaaaaggaacttttcggtgacttgggagactctcacccagtttctatatcagagtttaaaagatttaattggagtatgaagggaatgtgggaagatgacatgatgatccactttccagatatccacagacagatctttttggtaacccaatgaatgtatgatctaaaggaaaatggtgataaaattccaattacaaatgaaaacaggaggggaatttgtcaatctttattctgactaccattctcaataaatcagtagaaaaacagttcaaggctttttcggggaggttttcatatggtgaccaaatgagattctccccctttaaagtcttatttcagccagaagagaattgaattgcttatatgtggaagccgggaatctaggatttcccaagcactagaagaaactacaagaatatgacggtggctatccccagggactctggttctgattagggagttctgggaaatcgtttcattcatttacagatgaacagaaaagactcttcttgcagtttacaacgggcacagacagagcacctgtgggaggactaggaaaattaaagatgattatagccaaaaatggcccagacacagaaaggtgtacctacatctcatacttgctttaatgtgcttttacttccggaatactcaagcaaagaaaaacttaaagagagattgttgaaggcccatcaccgtatgccaaagagatttggcatgctgtaaaacaaaacaaaacaaaataaaacaaaaaaaaggaaggaaaaaaaaagaaaaaatttaaaaaattttaaaaatataacgagggataaatttttggtggtgatagtgtcccagtacaaaaaggctgtaagatagtcaaccacagtagtcacctatgtctgtgcctcccttctttattggggacatgtgggctggaacagcagatttcagctacatatatgaacaaatcctttattattattataattatttttttgcgtgaaagtgttacatattctttcacttgtatgtacagagaggtttttctgaatatttattttaagggttaaatcacttttgcttgtgtttattactgcttgaggttgagccttttgagtatttaaaaaatatataccaacagaactactctcccaaggaaaatattgccaccatttgtagaccacgtaaccttcaagtatgtgctacttttttgtccctgtatctaactcaaatcaggaactgtattttttttaatgatttgcttttgaaacttgaagtcttgaaaacagtgtgatgcaattactgctgttctagcccccaaagagttttctgtgcaaaatcttgagaatcaatcaataaagaaagatggaaggaagggagaaattggaatgttttaactgcagccctcagaactttagtaacagcacaacatatttaattcttattcctactcatgccacagtatgtcgtcttcatgtgtcttgcaatgaactgtttcagtagccaatcctctttcttagtatatgaaaggacggggatttttgttcttgttgttctcgttgttgttttaagtttactggggaaagtgcatttggccaaatgaattggtagtcaaccctattgcaacaaaagttaggaagtttgttgtttgtttattataaaccaaaaggcatgtgaaaagtgccacttaaggataggggtttttattaattacttacttattacctagatttttatatagacaatcccaaagtctcccccttcgtgttgcccatcatcttgttgaatcagccattttatcgaggcacgtgatcagtgttgcaacataatgaaaaagatggctactgtgccttgtgttacttaatcatacagtaagctgacctggaaatgaatgaaactattactcctaagaattacattgtatagccccacagattaaatttaattaattaattcaaaacatgttaaacgttactttcatgtactatggaaaagtacaagtaggtttacattactgatttccagaagtaagtagtttcccctttcctagtcttctgtgtatgtgatgttgttaatttcttttattgcattataaaataaaaggattatgtatttttaactaaggtgagacattgatatatccttttgctacaagctatagctaatgtgctgagcttgtgccttggtgattgattgattgattgactgattgttttaactgattactgtagatcaacctgatgatttgtttgtttgaaattggccgggaaaaaatgcagccttccaaaccatgggggggaagaaaaaaggatgtcccttcaggattattttaaattaatttttttccataattgagacagaactgtttgttatgtacccataatgcctaaataaaactgtggcacttttcaccataatttaatttagtggaaaaagaagacaatgctttccatattgtgataaggtaacatggggtttttctgggccagcctttagaacactgttagggtacatacgctaccttgatgaaagggaccttcgtgcaactgtagtcatcttaaaggcttctcatccactgtgcttcttaatgtgtaattaaaagtgaggagaaattaaatactctgagggcgttttatataataaattcgtgaagaaatgtgtgctcttcagttctcaagttttattattatggtatttattaaagttctacaattgtaataacgtatccatatgacaagttttaaagtggtaattgaaataggttatcagatatagagttgttcacatcaagtagacttttaacagagtcagaatgaacctacccttaaaattttagagaaaaaaaatcgtcggttgcacagaatagctgctctagcttgcttaattatgccgggcatgttgtcactcctcttacttttgctgccttttcattactatttaatggaatgtccctgaacaataaggaagagcaaaacatagacattttgactacagtggatacttcctctaccccaaatgttatgttataaaagtactttttttgcccaggtactctattatatattttggttttctttgaattaaacctcaatctccaggaagctctggagggaaaaaaaggaaccataaactaaagtaactggttttccaaataaatgtaaacttttttaaccttttattattatagaacatttcaaacatacataaaacatgaaaacagcctgcagccaaacttttctggaccttggcagctccagcaaatgagctggtcatcctaaccctggtttcctgagacaactacttttggggatgcttgcttgtatagggagatgatagatagatagatacatatcaaaaagaaacttgaaaaaggcttcgaacagaacttgccgatgttactcatccctcctcggtacagacattctgttagaacagatggttgtaatggggcagcatcactccctattcccattaaaaacatgaccattctgagatttcaggccccttcgaggaatttttctcaagaattccatacaaactgtcagaggaagaaatgtcgtcccaagactagtccctgtgtagtcttgatccctttacctgcttactgtaattttttttctctgactttccgccagtgtctaagggccatctgtacccctcccacccttccatgagccactgtataatccaaaaacacaccttccatttgctccctcacttgtctccttttacctcaacagtgttagtgtgtaaagaattgcctggggagggtagagggttttacaagtacagagtcccaagtcttttctcccctccccgttagtgggttggcatttattaataggcactgcaagattttgatgcaggtgtggggtagatatcactgtgaaaggctactaatgcatggtagtttcaccgaaagtacagtcttcaaggatccttataatctcctcattgccaaaatcagtaacatctataaccttgacaacaccctagcttgggctgttgcttctctggctacttgtttttccatcccagtttacccagattttagatggatactcctccaattctgcttaaagtccttacctgttcttgcccagttccctctagtcaacctcagtcactcccaaagattcttccccaatcccatatcttttgctcagacctctgtctctgggatttctttgttacctcatagtcagtagtcctaaaaacaaaattcttcatcttgcatctctatcgaccgaccattctttgtttctttttaagaaatgtaaccttcaccccaatcatcaaaatctctcattcctcaattgtcacaggttgtcacttctttccccctaaacctctcccatcattccttccttctttatactgcccttacaggtcctgatcctctgactcacccggacattcttagcagctgcctaatttcactccctgactctcatctccctcttccaatccttttcattgtgctagaacactatcttgctaattttaatatcctctgcattcagtgcctccacagattgccccctcactgacctttccaatttggccttgtgttacacactttcctcgctgcattcctacccagcatcttcacttgtcatatttctcaaatactcttcatgaccagatatttaaagtacctcatccatgaagacttcatcaacccccaaagtgcctccaatgcttccgtggtagcacagcataatggggtacatttcttagttgaacagtgaggagtcactgggattcttacagagtgtcttagggtctcctcttgatactctttccacatttcagttaaggaattttcttacatctttttttcttctaataacctttgcctggagtgtaagtaaattcatgatagagactgtcatttttaaaaaaaaaaaacaaaccattttgcctttcacatgttattacctccatctttctgttatcttgtcagtgttgccacctaaatgattgaaaatgaccgagcatgcagtagaatgtagtgaagtttcctatttcatccattttttgcataagtgcattggtatctgtatatccatctgcccaagcaccagttgttgaaaagactattatttccccatgaatggtcctggtacccttgtcaaagaacagttgaccataaatataagactttctggattctcagtcttactccattgccctatatgtctgtcgttataccagcaccgcactgtcttgattgctgtagcttggtagtaagtttagatttgggatgtgcaagtcctccattttttttttttttttccccaaaatcattttgtctgttttgggtcccttgcattgcatatgaatttttatatgatcattgtgtcaattcctgcaaaacagctgggatcttgatagggatttagttgaattggtagataaatttgagaaataactgctattttaatggtgttaggttttctgttccatgactgtgggatgtctttgcatttgcttaggtctttatttcagtgatgttttagagatttcagtgtgcaagtcttgatgtctttaatttttttctaagtattttactgatgccactttaattatatgattattttctaatttttatttttgtattcatcactggtgttagaaataaaattaatttttgtatattgattttgtatattgtagcttttctaaaattctttttttgtcacttagtattttttgcatatgagatcatgcatctgtgaacagaaatacttttacttcttcctttccagtctagattcctattatttcattttcttgccttagtgtgctggctagcacctccagtacaatattggatagaagtgacaagagcagacatctttttcttgttcctgattttaaggggaaagcattcagtctttcaccattgagtatgatgttagctagctgtgggtttgcttcaagttgaggaaattcttttattaaacctagtttactgagtgttttttaatcaaaaaaaaaaaaggaggggctgtgggttttgttaaatgcttcttctgtatcaagattttcatgttgttttgtcctttattaatatgttgtattaatggacttttgtatattgaattaactttgcattcctgggataatctcagttgtccatgctacataaaccttgttctatgctgctggatttggtttgctagtattttgtttagaatgtttgcatctatattcataaggaatattggtctgtagttttcatattatatatctgtccaatttggggatgagagtcatactcctgacagaatgaattgggagctttccctgttcttaaacctactgaggtattttttaagtgaactacttggagaccttcacctgtgatcttcagatgctgggggacacagggatggtacctgactctgaaaaggctctcagggtaagacgtgtctgaactggcctgtggcagttaactaaagagtactcctaccaataatggagtcaagatgtatgtttcccataggccacgctggtcactgaaagagatgggctatgagccatcttgaaaactaccctgcacanatggactgccggcctggagccaggcaccctgcagctgagtgccatataatgttgaagctgttgagggaggagaggttggaagctgccagcttagcgaatctcagctgtcgtttcccagcagggtgtattccccaggaaagaaagtcattcccccacccctggctcaaagtaataattaacagtgactgggtaaggcaggatctttttttcctaattccctcccctccagaaagggcagcaacagctcttgaatgggaaagaaggtggagggaggaaaagaaaaaccaattgccccaacactgctgtctttaagcttcccacccaaagacctcagtaagaggcagaattatgttttcaattaagagagagtttggcctcttggtgtttcaaaagtgtaggctttttaatacctagagaaactgatgatttgttgattaccaaaaagggaccagaaaagctacatagcctgagatttcatccccagaaaaacgaatccagagagcagacttgcaaaaaaaaaaaaaaaaaa

SEQ ID NO: 743 - DNA, 2656 bp, Homo sapiens
  SIMILAR (2210)..(2566): 441254mologous to Homo sapiens Human myelin oligodendrocyte glycoprotein gene,accession number AAZ29204,Smith-Waterman Score= 190.
tttttcgtgatgttgtcacattagaaaacacatctagcatggttacaagtttagatcttaagtgacacaaaaggccccagctgtgataaagtccaaagccacattctctgagggtgccctactccctgggcagacccacccaaagtccctgctatgaagcagatcactgggggctgaccttgggtgtattaagtgagttttggagtcgtggtcaccaaagtgtgagtttcacagttgaacacgatggttcagaagcagggtatagaatgaaaggcagcagataaaattgcatttctcaattgacatgggacgtgaataactttcctgtctagagagctgcctccttgaagtgtgacattgtctctctcgcttccaagaacaccggaacccaaggggagatgtggattttcagcaggaactttattcccaatgctaatggcagacaccaggcaggaggagaggaacccatttgtgcagatcatctagaagaacctggaccattcttgatggagctgaatacagtgatcacgttgtcctcataggagcaggggtggggggaggggggtggggtccttctaggagtccttggagaaaagtaagaaaccaggagtgtttccagttccaccctttcctgcggcaccacctccctttttatattgctgaatgccaacctccctggggcggaacctggaggtcctgtttcttatggacttggttgccacagtccagggaggatttgaaggcacaatgcaggggctcagattgggacagaattcttttgtgaaatatcagtgccacaaattgtaacagatagcttcatgcacactctgcattttattggtttgtatggaaaatgtcggccattgaattattcatagatttatttcaaatagtttggaaattgttgtacttttgaaaacatgctgttcctgtagttttttgatgagagttatagttgttacatatacataaagataattttcttttcatttttaagagacaattctttttatcctaaatattttattatctttaaatttgtttctgtattattacatgtgctcctgaagcgagcactctttttaatcctatgatacttcccataataatctcctcctatttaatagcctattggtagttccccaccagaaaaaaacataattctggtgatagaaatttttatttgctgtttaggtttgtgactgaattgtgagaattcagttgtgatttttaacatgtctcagatatatatactaacacgtctaatacatactatctaatttattggtttattttgaaaaacatgggtatagaattatttaaatatccttttatttatgcacatatttattaaatatatttacttacttaaatatttactaaatacatctctttatataaatgttattactttaaatattattttaaatatttttggaaatactggtatttttgaatagatgctgtttctataaagctgtgtgatggatattataactgttgatatacacactacatataattttgttttcctttttaagagaggattcttttcatcctaaatcttttacctttcaatctttgcatctattattacacgtgctgctgaagggagcatggtttttatctgtgatacttagttaacatatatattacatttatagctatgtagtagttcccctaaattcttgtaaaaataaatttttatttgatatttcatatatgtttgaaatgtgagaattcaggtgtaattttttaccttgttttggcatgtttgcatgttactttaacgaggatgtgtgttctaaaggaggacatgagctgtgtgttttcaagagaacaatagagtgcgtgtcttggggaaacataataaaaatgaacttttctcaccttcacagcaattgggatcatattgggcctggattggttattttgctgccccagtgatattttttccttaatggggttgtggttatttgaacatatttattagcctctggaagataatcctgtgctgttttttatgtagaaaaaaacataaggctgggtgcagtgctcacacctacaatccctgtggttttggaggtcatggcgggaggatcacctgaggccaggagttcgaggccagcctcagcaacacagcatctacatctatttttaatttttattttttaaagaaaaacaatagaagagaaggctgatcccaagctacagggtttttttgtttgtttgtttgttttggagacagagtcttgttctgcctctcaggctggaatggagtggcccaatctcaactcactgcaacctccgcctcctgggttcacacaattcttgtgcttcagcctcctgagtagctaggcctaacgggtgtgccaccgcaccaggctcatttttgtatttttagtagagatggggcttctccgtgttgaccaggctggtctccaactcctggtctcaagcgatccacctgcttcagccttctaaagtgctgggattacaggcatgagccaccgcgtctggcatatttcttacatttttaatagagacgagggtcttgctatgttgcccaggcccgtctcaaactcctggcctcaagtgatcctcctgctttggcctcccagtgtgctgggattccaggcgtaagccaccactctcg

SEQ ID NO: 744 - DNA, 410 bp, Homo sapiens
  misc_feature (1)...(410): n = a,t,c or g
cnnnnnnnnnnnnnnnnnnnnnnnnnnnnnnnnnnnnnnnnnnnnnnnnnnnnnnnnnnnnnnnnnnnnnnnnnnnnnnnnnnnnnnncccattcaatttcagtgacatgactgctcccccccccacccatgccattgagatgcccttttcagaccctcagagcctctcgcgtcaaggaagccaattcactacccactgggccagctggcgtgggccgccccaactgcccaggaagccccactcagaccatgaccttgctgcctgtgcagtccaggccccggcaagggccaggcatggaacatatgctcagagcgatgggggtcagggccaaggccacagagcaagatgcagaggagcccaggctgggaccggttctgcctgaacatgagcccctcggagcaggggcccc

SEQ ID NO: 745 - DNA, 3049 bp, Homo sapiens
  SIMILAR (2250)..(2104): 751254mologous to Homo sapiens PRO2550,accession number AF130089,Smith-Waterman Score=176.
ccctgccagccattatcccttggctgaaaggctcagctctttggggggtctggggtcaccctccccacctcctggaaaactttagggtatttttgcgcaaactccttcagggttgggggactctgaaggaaacgggacaaaaccttaaagctgttttcttagccccctcacccaactgccattagcttggctccttaaaaggcccaaggcctccttttctgcccctctagcagggaggttttcccaactgttggaaggcgcctttgggggctgccccctttgtctggagtcactgggggctttccgagggtctccctcgaccctctgtcggtcctgggaatggctgtcgggagctgtatcaacctgggttctgtcccctggctctgtatcacggcactttattaaagctgggcctcagtggggtgtgtttgtctcctgctcttctggagcctggaaggaaagggcttcaggaggaggctgtgaggctggagggaccagataggaggaggccagcagctagccattgcacactgggggtgatgggtgggggcggtgactgccccagacttggttttgtaatgatttgtacaggaataaacacacctacgctccggcttcgtgtcctgtgtcgcctgggtcgagcacagccttctggtccagcgctgcatgcggcctcaagaccacgtcttccggttgggggctcccagtaaagcgatcctcagcttcttcagcagccagtggccagtgagagcactgacacggctcccgggacctcggcaggatggaagagaagctgaagaaaaccaagatcatctttgtggtgggtgggcctggctcagggaagggcacccagtgtgagaagatcgtgcagaagtatggctacacccacctctccaccggggacctcctgcggtccgaggtcaggctcaggctcggccaggggcaagaaagctgtcggaaatcatggagaaggggcagcttgttccactggagacagtgttgaacatgctcctgtgatgccatggtggccaaaagtcaatacttcaaaaaggctttcctgatttgaatggctacccgccgggaggttgcagcaaaggagaaagaattttgagcgacgggatttgacaagccccacactgcttgctgtaatgtggaacgcaggcccctgagacccattgacccaagcggcttcttgaaaacgtggaagaagaccaagcggggcgtgtgggacggacaaatgagggagacccattcaaaaaagcgggctggaagacctaattaacaaggccacagaaccccgtattcggccttcttattgagaaacgtgggcattgtgcgcaaggttcaacgcttgagggcttccgtgggacagtgtcttctccccaggtcttgcacccacctggacgccctaaagtagcaacgctggaagccgctttccccaagctcagagccccgccccaccccgtcctgattagaggtcctcctggcctgagcgcagcgcctccaccctgccctgctgagcacagacggaggaagccgcttatcctgttttcatggacagctgagcactaaaggaatttctaaggacatttggttttactgctttttctctgcttccagttggagttgattcatgtgcttgtgcctacctggccgcaagtccccagcccctcaaccctccgttcctcctcagcctccctttgccagccacccctcctctagctctggtgggaggcccggggcccttcctcgcacagggcatgcctggcctgaggacccggcgctgagtgttggggcccttgctccgaggggctcatgttcaggcagaaccggtcccagcctgggctcctctgcatcttgctctgtggccttggccctgacccccatcgctctgagcatatgttccatgcctggcccttgccggggcctggactgcacaggcagcaaggtcatggtctgagtggggcttccctgggcagttggggcggcccacgccagctggccccagtgggtagtgaattggcttccttgacgcgagaggctctgagggtctgaaaagggcatctcaatggcatgggtgggtggggagtcagtcatgtcactgaaattgaatgggggaggcccaatgaggtggctcatgcctgtaatcccagcactttgggaagctgaggcaggaggatcacctgaggtcaggagttcgagagcagcctggccaacatggcaaaaccccttatttactaaaaatacaaaaacttagccgggcatggtggcatgtgcctgtattcccagctactcatgaggctgaggcaggagaatggcgtgaacccgggaggtggagcttgcaatgagccaagattgcgccactgcactccagcctgggtgacagagcaagactccgtctcaaaaaaaaaaacagtacacaaaaagaaattgaattgggggagtcatggtcaggggtgagacctgaaggacctccccctgtgtggccctggacacagcccaccctctgtgagccgtttccaattctaaaacagactcaatgtccccctcacccccacctcaaggtcaggatgcgaacacactgagtgaggaagttgacgctgtccattcgccacggccatgagggctggagaccagaacagcatggcccgaagcgtgcggggccccggatgacttggggacaccccagaattcccctggggagaacccttcctgcgcgctttcattttttgacctcatcactgagaaaggctcaatttggtgctcacgtgtcacttaacacctgatctggcccaagctgggctccctttaaagccaagagagcctcttgtggaccccgcctgcccgaatgaaatccgaacagttgggggctgttcatggcaagtggggctggtttttcatttccattggttatttaaagtttcctttaaaataaacgattttaagttataaaaggtgaatctattgaaagaagaacatcaaagaaataaacaggagttcagcggagtagcagaagacaaggcatgtagggggagccattctgtcccag

SEQ ID NO: 746 - DNA, 1848 bp, Homo sapiens
  SIMILAR (536)..(781): 751254mologous to Homo sapiens Human myelin oligodendrocyte glycoprotein gene,accession number AAZ29204,Smith-Waterman Score= 334.
cagcccgttaaatttcaaaaaattaaattgaaccagagtcccctggccccgttgaaggaaaaataaataaaaatgtgttagtgccaagtagtaatttttggcattaggggattgatacaattttgcccttaaatcagaattgaagtttaaaaaccaggccatagtttcccttaataaattttttttttttttttttttaagatggagtcttgctctgtcgcccaggctggagtgcagtggcgcgatctcggctcactgcaagctccgcctcgcgggttcacgccattctcctgcctcagcctcccgagtagctgggactacaggcgcccgctaccacgcccggctaattttttctatttttagtagagacggggtttcaccgtgttagccacgatggtctcgatctcctgacctcatgatctgcccaccttggcctcccaaaatgctgggattacaggcgtgagccaccacacccagccagtctatgctctttttttttcttttgagacggagttttgctcttgttgctcaggctggagggcaatggcgcgatctcggctcaccacaacctccgcctcccaggttcaagcaattctcccacctcagcctcccgagtagctgggattacaggcatgcaccaccaagcctggctaattttttttgtatttttagtagagacagggtttctcccagttggtcaggctggtctcgaactcctgacctcaggtgattcgcccacctcggcctcccaaagtgctgggattacaggcatgagcccccgtgcctggccatgggttttgtgtttcatttaacgctttgaaagcccccttttttcaaagattatatgaaaagctttttccagttttttaaatatttgatccaagggtaatgttctttggtataaggagtgaggtatagatccagccttatatttttctttttttttttgagatggagtctcgctttgtcgctcaggccagagtgagtgcagtggtgtgaccttggctctctgcaagctccgcctcccgggttcacgccattctcctgcctcaagcctcccgagtagctggggactaaaaggcggccaccaccatggccttggctaaattttttgggtaatttttaaggtagaaaacggggggtttcaccatggttaagccagcatggtctcgatctcctggacctcatgaatccggcccaacctcgggccttcccaaagtggctggggattatagggcatgagccagcgcgcccagcctagtaaatagttttcaagtgcaaacgtgtatactacatatattggttttatagattatatatacagatcaatctatcaactgaagttacatgttaataaagattatgaaaaaataacctaaaatagcatatgattttaatatacacattttcatttaagcttgagtggattattcatttatttatttttaacttttttaagagatggggtcttactgtgtcacccaggctggagtgcagtggcataattatagctcaccggagcctcaaactcctgggctcaagcgatcctcccacctcagcctcccaagtagctgggactacaggggcccgccaccgcgcctggctaaattttttttgtatttttagtagagacggggtttcaccatgttagccaggatggtctcgatctcctgacctcgtgatccacccgcctcggcctcccaaagtgctgggattacaggcgtgagccaccgcgcccggccccctcttccccaatttttcatacagttgcccctatacaatatacacacccttgagggcaggtagaagtccagcccacctgcgccagggaccctgtggggagcattt

SEQ ID NO: 747 - DNA, 948 bp, Homo sapiens
  SIMILAR (277)..(780): 401254mologous to Homo sapiens lambda-immunoglobulin light chain,accession number X51754,Smith-Waterman Score=172.
gtgctggggtctcaggaggcagcgctctcaggacgtcaccaccatggcctgggctctgctcatcctcaccctcctcactcagggcacagggtcctgggcccagtctgccctgactcagcctccctccgcgtccgggtctcttggacagtcagtcaccttctcctgcagtggaaccagcagtgacattggtaattataattatgtctcctggtaccgacaacacccaggcaaagcccccaaactcatgatctatgaggtcactaagcggccctcaggggatgcctgaggcgattctctggctccaagtctggcaacacggcctccctgaccgtctctgggctccagttctgaagatgagggatgactattactgctgcagcatggcaagacaccactcagtggttgggtgttcggcggagggacccaagttgacccgtccttaggtcagcccaagcgtgccgccctcgggtcactctgtttcccgccctcccttggagaagcttcaagccaaccaaggcccacactggtgtgtgtcataagtgacttcttacccgggaagccgtgaacagtggcctgaaaggcaagatagcagccccgtcaaagcggggagtggagaccacccccacaccctccaaacaaaggcaacaacaattacgcggccaccagctattttgaccttaacgcctgagccattgaaagtcccacaggaagctaccgcttgcagggtcacgccttgaagggggcaccttggagaagacagtggcccctacagaatgttcataggttctcaaaccctcacccccccaccacgggagactagagctgcaggatcccaggggaggggtctctcctcccaccccaaggcatcaagcccttctccctgcactcaataaaccctcaataaatattctcattgtcaatcagaaaaaaaaaaaaaaaaaaagtaat

SEQ ID NO: 748 - DNA, 532 bp, Homo sapiens
  SIMILAR (139)..(306): 981254mologous to Homo sapiens XIAP associated factor-1 (ZAP- 1),accession number X99699,Smith-Waterman Score=313.
tttcgtgcatccccagagcctccctggacgctgtttgcaaggtcctcaccgcctggaagtccaggagccatttttagggaacagcattcaagctcaacatgaaacgaaactcaaccgaaagcctgcagagagcagaacatggaaggagacttctcggtgtgcaggaactgtaaaagacatacagtctctgccaacttcaccctccatgaggcttactgcctgcggttcctggtcctgtgtccggagtgtgaggagcctgtccccaaggaaaccatggaggagcactgcaagcttgagcaccagcaggcttatggatctggcataggcaagaggttctggtttcaggaaagactggctgttctcttgagatctgtaaagagaggatgtgaaaaaggaaggtcctggaaggcagtcagatggagccctgtttcccgcctttccatgtccattcctcctggggcccctgatctgtctctctggagatactcaagctcaggcagccggtgccaacataaaactgggctgacaacat

SEQ ID NO: 749 - DNA, 2053 bp, Homo sapiens
  SIMILAR (202)..(372): 981254mologous to Homo sapiens XIAP associated factor-1 (ZAP- 1),accession number X99699,Smith-Waterman Score=312.
gcgacagcaggggctggccatgctgtaaaggggcttcttgttaggttccagcctcaagaatcaaggggaactcctgagcgcgagaattctgaagatctcctccctccctgaagctgtgggctgggccatcggaaaactttcagttttgtttccttgcctgcaagaaacgaaactcaaccgaaagcctgcagagagcaaaacatggaaggagacttttcggtgtgcaggaactgttaaagacatgtagtctctgccaacttcaccctccatgaggcttactgcctgcggttcctggtcctgtgtccggagtgtgaggagcctgtccccaaggaaaccatggaggagcactgcaagcttgagcaccagcaggttagggtgtacgatgtgtcagcagatcatgcacaagtcctcgctggagtttcataaggccaatgagtgccaagagcgccctgtcgagtgtaagttctgcaaactggacatgcagctcagcaagctggagctccacgagtcctactgtggcagccggacagagctctgccaaggctgtggccagttcatcatgcaccgcatgctcgcacagcgcagagatgtctgtcgcagtgaacaggcccagctcgggaaaggggaaagaatttcagctcctgaaagggaaatctactgtcattattgcaaccaaatgattccagaaaataagtatttccaccatatgggtaaatgttgtccagactcagagtttaagaaacactttcctgttggaaatccagaaattcttccttcatctcttccaagtcaagctgctgaaaatcaaacttccacgatggagaaagatgttcgtccaaagacaagaagtataaacagatttcctcttcattctgaaagttcatcaaagaaagcaccaagaagcaaaaacaaaaccttggatccacttttgatgtcagagcccaagcccaggaccagctcccctagaggagataaagcagcctatgacattctgaggagatgttctcagtgtggcatcctgcttcccctgccgatcctaaatcaacatcaggagaaatgccggtggttagcttcatcaaaaaggaaaacaagtgagaaatttcagctagatttggaaaaggaaaggtactacaaattccaaaagatttcacttttaacactggcattccctgccctacttgctgtggtggtcttgtgaaaggtgatgggttttattcgttgggctttaaaagaaaaggtttggcagaactaaaaacaaaactcacgtatcatctcaatagatacagaaaaggcttttgataaaattcaacttgacttcatgttaaaaaccctcaacaaaccaggcgtcgaaggaacatacctcaaaataataagagccatctatgacaaaaccacagccaacatcatactgaatgagcaaaagctggagcattactcttgagaagtagaacaaggcacttcagtcctatttcaacatagtactggaagtcctcgccacagcaatcaggcaagagaaagaaataaaaggcaaccaaaaagaaaggaagtcgaagtatctctgtttgcagacgatatgattctatatctagaaaaccccatgatcttggccccaaaagctccctagatctgataaacaacgttcagctaactttcaggagacaaaatcaatatacaaaatatggtagcatttttatacaccaacgacatccaagctgagagccaaatcaagaatgcaatcctattcacaattgccacaaaaagaataaaatacctaggaatacagctaacccagggagatgaaagatctctacaacaaaaattacaaaacactgctgaaagaaatcagagatgacacaaatggaaaaacattccatacttatggataggaagaatcaatattgttaaaatggccatactacccaaagcaatttatagattcaatgctattcctatcaaactacccaattaacattcttcacagaatcagaaaaaaaaagcattaaaatttatttgaaaccaaaaaagagcccaaaaagccaaagcaatcctaagc

SEQ ID NO: 750 - DNA, 662 bp, Homo sapiens
aaaatgaataatttttactgctgcatcaagaacattcttaagtgaaaccggtactccaaccccaatttgggtggtgatgaagaatacaattcagcgcttcttacagctttgctcgatccctcctaaggcttcagcagtgtctacacaccattgcttttacaccattggtacaaatgttgacatggtgcaaaaagcaagtaacatcttagtgtcattacgaaaatagttttgatctcacagatgccctgaaagagggacatccaggtttctgcccaccacattgtgaaaattgatgattctagataatacaaaatggcttctgttactgttctggtggtttaaaaacaacaaaaaacctcatttagttctctacctagaagagtgaattgcaactctcatcttgtgcttttacctgtgattttaaaaattgtaatcttgcctttgaaacaaaaatatgccaattcataataaagtctacatgagagtacatgtttggatttatatttctgtgcttctttcttttatataacataccatttcatatttgtgggcccagagtaaagagctcattctgttacagacactgaatagccttgtttttgtcagtagtcagctctgttttaaaacaattgcttgggtcctgctggctcaacttgcagttg

SEQ ID NO: 751 - DNA, 477 bp, Homo sapiens
  SIMILAR (238)..(354): 921254mologous to Mus musculus putative,accession number AK004662,Smith-Waterman Score=192.
acagaactttgcccttaactagaagtttttgagcacatacttaaaaaatcagtagaaagtttgagagctcatttttacccaaatactaattttcatgttatttttgaacagatgcctttttggaaatcttaaaaaagcaaacatttcaaacagttggctaacacgcatgaactaacactcattcagtttttaaattacggatgatatccgtattaacattataatgactctatactacagattgacatggtacatcgtaacaagtccgaaggattcttccttgatgcatctcgacacatccttgaagcacctcaacatggactggagagaaggcacttggaagcaaatcagaatgtacactaaataaacagtcaacttttggggtgtggatggaaggggggtccattttaaaagtgcttttacattgaatttccctcccagattagatcagcaaataaatgaaatttattaaaagaa

SEQ ID NO: 752 - DNA, 2453 bp, Homo sapiens
  SIMILAR (311)..(508): 541254mologous to Mus musculus putative,accession number AK008983,Smith-Waterman Score=164.
tgggaagaaattcaagaacttaatgaagtcgcgagacatcggccacggtccacgttagttatgggaatccagcaagaaaacagacaaatcagagagttgcaacaagaaaacaaagaattacgtacatctctggaagaacatcagtcggccttggaacttataatgagcaagtaccgagaacaaatgtttagattgctaatggctagcaaaaaagatgatccgggtataataatgaagttaaaagagcagcactccaaggaactgcaagcacatgttgaccagataactgaaatggcagcagtaatgaggaaagccattgaaattgacgagcaacagggttgcaaggaacaagaacgaatatttcaacttgaacaagaaaacaaaggcttgagagagatccttcaaataactccgagaatcatttttgaacctaaggaaagatgatgcgtcggaaagtacttctttgtcagcattagtgaccaacagtgatttgagtctgaggaagagctgaagagtttctgagtctgtgagcttctttacatgggctccaaattggtcaaattaagtgaatgaatgaatgggaccagaaaattcaatcctttatttttttctctgtaaatatgtacagtgcacgggctatgagatagcaacaaaaaatgcatagttaatggtcatagactttattccaaaacataattggaaaatagaaactgagccattgccaaatggtaaagaaatgaaaagttttcacagtgactactgaatataccaagagcttttggcagtactgctggctttctgggtgattaattaggtaaacttgaatattcccagtaaatgtttgagaatgcataaaattataccaatttaaaaatataaatttttgccactgttttgtgaacggaggatttgtacgctaaatttcatccttatttggcgtcaaagttgatgcaaagtttatgtaccatgagacttctagtgattgcctactttcacatttatttaaatttttgtgaaagaaaatacagttttaaaggctataggaatgtgttatatgtaccttaaacagataatttaattttagcaatttatcataactgatacttagctaacaattgtccataacttgtttaagtgtaagaaataccatttcaggaatgaaaaagaaggaatactactttctaagaaagaagatcttataatagacatatttagtaggttaaactactcctttgaaagaataagttttggttcaaagtcaataatgaagacgagatttgtttttctcttctctggctgatttttaaggatattatgtagttcatttagttaacagaattgaaatgtttgatatggcaagataggtatggtaatttcaaagtgaattgggaattcctctggctcatagaacccttttttttttcctttaagtattcttgagatacaaaaaaaaaaagtaaatacaatttcaaaaaaaaaagttccggatctgtttttaagctccatctggtcctcataacctgcaagatttttcttaaaacctttcagctgaaagtgggggtaaaggtggagtaatctgtggatttgtttctgttgtcttttaaaatgtcaaatatataatatgtaatttttttaaaaaccaccagatacagaaatgtgctttaacatcagttgaaacctaaattttcttatgttgtggtgattgtattaaaaagggataaaagaagagtgtcaaacatggttaaatatattgtactcatttatgttgaatacgtattaaaattaagacaagtggaaaattatactttgagtatataatttgttaaatattactttatatggtaattttatgtataatttcatatattggtaaaattcaaaactacacttgagaatttttttatcttaagtttggggtgaatggggtggatgagactgattgaatagaaaagggctaatggcccaaacattatatagatttctttttttcagtcagaggccttatttgatattttataaataaatgacagtttttatttttaaactttttattgtttttgggaaagtattccttaatttaatgacacattcattcagatacttcttatccctgctaataaaggaaatctatttcaagctacaccattgagattaagtctgaggcagttcattgaggcagctctactataaaagcttacttgataaataattatttttgtaaacaagttgggttaacttattcttcgtctttttgcttggatatgaatttaaggtcttcatgtttaaagacatttactttgttatttagtgacacatttccatcctatttttttttttttttttggttgttgttaaacagaaccttaagtttatgtttgaggtatgtactgcataggaacctattttattattaaagatgaatgattaaaattggaaaaaaaaaaaaaaaaaaa

SEQ ID NO: 753 - DNA, 470 bp, Homo sapiens
  SIMILAR (2)..(160): 1001254mologous to Homo sapiens Neuron-associated protein,accession number AAB01395,Smith-Waterman Score=269.
taaagtcatcgggtgcagtggctgtggtgctcccattcaagtttccgaggtgaagctgctttccttttcatcagggcagcgaaccgttttcctcccagctgaggtgaaggccatagggacggagcatgatcacgtcctccctctgcaggaattggctatggagagggctgtatcatacctaccacagcttgctgaaaggaagacaactgttagttttgtggcttactgctgctccacccagtgtctgcagacttttgacctgctgagttgataaacactcaagaacctcaggagcgctgccagcttgacactggggaatccagccgagtccagcacactcttccatcctgtcctgtccaatgcgggggcactgcagaactctctagaaatgtcatgattggagcttcagagctaaaatgccttcacccttcccccaagttggaatatatcctccccggaaattaaggaaa

SEQ ID NO: 754 - DNA, 497 bp, Homo sapiens
  SIMILAR (446)..(354): 771254mologous to Homo sapiens Secreted protein encoded by gene 94 clone HPMBQ32,accession number AAW88627,Smith-Waterman Score=116.
tgcaggatgaattttaagcacaattataagagaggacctagatattgagttttaaaaggagaaaatataagtacaaaagaagaatgaagattgttacaacaggggcaagtagaagttagaagaaaatgtgataaagtaaatctacattttagaatagtactggaagttattatcaggtgttacagacaagtttgagacttccgtaagtgacctaaagaaattatggacactgcaagactaaataatcattcatttaggaaggagcttaaatgcactttctcaaggccgggcgaggtggctcacgcctgtaatcccagcactttgggaggccaaggtgggcagatcacgaggttcaggtgatcgagacaatcgtggttaacacggtgaaaccccgtctctactaaaaaatacaaaaaaaaattagccgggcacggtggcgggcgccttagtcgcatctactcgggaggctgaggcaggagaatggcgtgaacccggga

SEQ ID NO: 755 - DNA, 902 bp, Homo sapiens
  SIMILAR (284)..(778): 541254mologous to Mus musculus putative,accession number AK004662,Smith-Waterman Score=367.
  misc_feature (1)...(902): n = a,t,c or g
tttcgtgccggtcggaggcggtcggcggaggtgtctaccccgccggtgatggcgttgaacgccactggcttcccggccttccgtccgctgcctccgtccgattctgcgtctgcttgctgaggaggcggattaggggggcgcggagtctcttcccttgagtgcataggtcccggttggtagagggtttgagtccgcatcgccacagctgaaggctgcgagggactaagagcagaatattaccttaggaattgagtggaccatttgggaagggcattttccgagcgctaaagctcttgttgaaagattaagagatcatgacgattgcagcagaatctcctgattgagcaaaccacagctcctcaacaagccgaggtagaagccatgaaacagtatcatggaagaaattcaagaacttaatgaagtcgcgagacatcggccacggtccaccgttagttattgggaatccagcaagaaaacagacaaatcagagagttgcaacaagaaaacaaagaattacgtacatctctgggaagaacatcagtccggccttgggaacttataatgagccaagtaccgagaacaaatggttaagattgctaatggctagcaaaaaaagatgatccggggtataataatgaagttaaaaggagcagcactcccangattgacattggtacatcgtaacaagtccgaaggattcttccttgatgcatctcgacacatccttgaagcacctcaacatggactggagagaaggcacttggaagcaaatcagaatgtacactaaataaacagtcaacttttggggtgtggatggaaggggggtccattttaaaagtgcttttacattgaatttccctcccagattagatcagcaaataaatgaaatttattaaaagaaa

SEQ ID NO: 756 - DNA, 1295 bp, Homo sapiens
  SIMILAR (849)..(694): 1001254mologous to Homo sapiens Secreted protein encoded by gene 48 clone HBJCI95,accession number AAY01430,Smith-Waterman Score=277.
tttttttttcttttttaaaagttttattttagttttaattgacacataataattgtataccaaatagcaatttttaaaaatagggagacccaagagttaaaaacacaaagtttttccactgttctttgtaaaatttctcatactgaggaaactgtttttataaagcaaccatgtatcgttgccattacagtgtactggcatacttattaggacaattgacagggaaaaacaacttttgggcacaaggaatgccaatttattccttttttgggacacataaacacaaaatatccctggcagggccaaaaaaaaattgcaaaatttaaacgaccgatcatccttatctccaacatgaggggtacaacccctcccttaatagtttgggaaggtacctcgtattggctgggggccatacatccagtccaaatttaataaaatacattttaaaacattaccaggtctaataatatagaaacaaaaatcacaccattagtcaaatgaacaaatgcaaacattttcagccactagacgtagaaaggagcatgaatatgtcaatagcaaggcataagaaaatggttaatcaataacaagatctttcctttaattttacaaggaaaacttcttggagttgccaaacagtattgatacaatgccctcagcctccactttcttaaaatgaaagcagagctacccccttgctattgagcaagaaaatatcacagcacattcacaaaaggtcgttaggacagggtggagagggtgagccttgttaaacagtggattatattttcccacttgaagggtaggcagctttgccaggtaggcaagctctgatagaggctgggcacccagaacccttaaaacaacagacccatatagaaacatgtctgccttgaaaatccatcacctttggaaagcagcaaaatagaattttacagtaagaatgaaatatgttcctgctgccccagaaacgctggctgcattaaagccagctagttcactttataaaccattcaggattcaacagctaagaacaccaccaccaaaacataattggttcaacatttgggtcatcaccactctcttaatgtcccccccccctttttttttttgagacagagtttcgctcttgttgcccaggctggagtaatagctcactgcaccgtccacctcctgggttcaagcaattcattctgaatttcttaggatgaaagcatcatacccatatttatttgcacaatcgtgtgcgcgcatgtgtgtgtgtgtgtgtgtgtgtattattttcacagaaacta

SEQ ID NO: 757 - DNA, 367 bp, Homo sapiens
  SIMILAR (115)..(366): 981254mologous to Homo sapiens -14,accession number X90857,Smith-Waterman Score=426.
gcgggacaacaccagccccatcagcgtgattctggtgagctcggggagcaggggcaataagctgctgttcaggtaccccttccagagaagccaggagcacccggcgtcccagacaagttttcagatgttattctggcaacaattttggcaaccaagtctgaaatgtgtggccaaaaatttgaactgaagattgataatgtgcgatttgttgggcacccaacactgctacagcatgctctggggcagatctccaaaacagatccttccccgaagagggaagcacctactatgattctttttaatgtggtgtttgcactgagggccaacgcagacccgtcagtgataaactgtctgcataacctgtccc

SEQ ID NO: 758 - DNA, 615 bp, Homo sapiens
  SIMILAR (39)..(428): 921254mologous to Homo sapiens -14,accession number X90857,Smith-Waterman Score=602.
cgctgccagtactccacccgggaggccaagctgatcctgcgctccaggatgagtgtccgccatggctgatgaaatgaagtcctcagtccccattccatcacatcctgcccaagtgcaagctggccagggacctcaaggaagcttatgacagcctgtgcacgtcgggcgtagttcggcttcacatcaacagctggctggaggtgagcttctgcctgccccacaagatccactatgcggcctccagtctgatccccccagaggccatcgaacggagcctgaaagccatccgcccctaccatgccctgctgctgctcagtgatgagaagtccttgctgggtgagcttcctattgactgctcccctgccctagtgcgggtgatcaagaccacatctgctgtgaagaacctgcagcagctagcccaagatgcgcttcttcctcccaggctaccctgagcctttcctggcccagtcctcaccacagtccacagaagccacaaacaggctcatagccaagctgtgacctggaggaagagctagctccagacatgggttgatcacctagaggagctctggctaaggcacagttttctagaaataaaacatttattcggttttt

SEQ ID NO: 759 - DNA, 468 bp, Homo sapiens
  SIMILAR (1)..(450): 701254mologous to Homo sapiens -14,accession number X90857,Smith-Waterman Score=496.
ctgtctcccaatgccagcgtatgtctgtactccccgctggccgagcagttctcccaccagttcccatctcatgacctgccgtccgttcttgccaagttctccttgccggtctccttgtcagaatttaggaatcccctggcccccgctgtgcaggagacccagctcatccagatggtggtgtggatgctgcagcgccggcttctcatccagctgcacacctatgtctgcctgatggcctcacccagcgaggaggagccccgtccgcgagaggacgacgtccccagcatggacaactccagcgcagagctacttcccagcggggactcgccactgaaccagaggatgacggagaacctgctggccagcctgtcggagcatgaacgcgcagccatcctcagtgtacccgcagcccagaaccctgaggacctccgcatgtttgccaggctccttcactacttccgcggccgc

SEQ ID NO: 760 - DNA, 834 bp, Homo sapiens
  SIMILAR (2)..(115): 1001254mologous to Homo sapiens Similar to Conserved gene telomeric to alpha globin cluster,accession number BC004185,Smith- Waterman Score=188.
caacgagaacacgcggcgctcccagctgctcatgctgtttgacaagttccgcagcgtgctggtggtgaccacccacgaggaccctgtcattgccgtcttccaggctctgctcccctgaggcctggcattgggtggatgcgggctggccgtggcccagtgaagcctgcagagccccgctgtccttgcccctggtggttccgctgtggggctgctgccctctgtgttcctacgcttccctccagtccttgccgcacgcgtaggcatctccacgctggaggggggcctgccaggactcctgtctctgggtgaggccgcatccttcaaggcccatgtgggctgtgcgtttctcagaccctccttctgtccctacacctgctccttggaccccccagtctgtggccaccctgaagaatgtgcagaaacacttgtgtggcctgtccctgtctctctgacagccttccacagtccacagaagccacaaacaggctcatagccaagctgtgacctggtcctgaccatctggggcacgaaggccttgggctgccctggtagggcttgaaaaccccttgacccttgcacacacttgttggggggaggcttggcccattgtgcaggaaccccaccctcggggggctttgggtttccacactgattgattctccccaggatccacaccgggcctggcgcttcgtactcaggcccccagctcttgtgttcctggagaagagctagctccagacatgggttgtcacctagaagactctggcttagggcccagtttctagaaataaacatttaattcgtttttaacaattaaaaaaacttgtctgggca

SEQ ID NO: 761 - DNA, 671 bp, Homo sapiens
  SIMILAR (27)..(437): 951254mologous to Homo sapiens -14,accession number X90857,Smith-Waterman Score=671.
gacgccgattccaggttttcagaggtatttctgccacaattttggcaacccagtttgaaatgtgtggccaaaaatttgaactgaagattgataatgtgcgatttgttgggcacccaacactgcacaggcatgctctggggcagatctccaaaacagatccttccccgaagagggaagcacctactatgattctttttaatgtggggtttgcactgagggccaacgcagacccgtcagtgataaactgtctgcataacctgtcccgtcgtatcgccaccgtgctgcagcacgaggagcgccgctgccagtacctcacccgggaggccaagctgatcctggcgctccaggatgaggtgtccgccatggctgatggaaatgaaggtcctcagtccccattccatcacatcctgcccaagtgcaagctggccagggacctcagctttggctccccaaccagcagcgatgacatgaccctcaccagccccagcatggacaactccagcgcagagctacttcccagcggggactcgccactgaaccagaggatgacggagaacctgctggccagcctgtcggagcatgaacgcgcagccatcctcagtgtacccgcagcccagaaccctgaggacctccgcatgtttgccaggctccttcactacttccgcggccgc

SEQ ID NO: 762 - DNA, 374 bp, Homo sapiens
  misc_feature (1)...(374): n = a,t,c or g
atgcttggggaaaaatccatcattgtgggaacccgaaaagccccccanggtggggtccctgcacagtgggcccatgcctcccacagggcacttcacaaatggaaggctgtcagagagacagggacaggcccacacaagtgtttctgcacattcttcagggtggccacagactggggggtccaaggagcaggtgtagggacagaaggagggtctgagaaacgcancanccacatgggccttgaaggatgcggcctcacccagagacaggagtcctggcaggcccccctccagcgtggagatgcctacgcgtgcggcaaggactggagggaagcgtaggaacacagnaggcagcagccccacagtcgnggncgagg

SEQ ID NO: 763 - DNA, 1716 bp, Homo sapiens
  SIMILAR (1173)..(727): 951254mologous to Escherichia coli K12 putative ATP-binding component of a transport system,accession number AE000313,Smith- Waterman Score=785.
ttagttgccgctccgtagccccctcatgacagactgccggcccttcccccgtcttggaggttccccagccccactttccgcgttatgagccaatagtcctttgatcgcagcagcgtccacctggtctctgttgtccgtgggcggcgggcgcttggggaaggcggacgggaagaaggcgcccccgctgtcttggggccactgcttggccccaaggatccttgcaccgaccccagggtctagggcggcttcacggtgatgtaacaggctggcaagcccgttgagtaacagagcattaaacgtttcgggatcggtcacgttgcaggcgtgtccgccatagggcatcaccattttctggctatcgggcagggcggcatgaagttcactggaacatgctgttggcaccagcagatcatcactggcgcagatgatttgcaccggacagcggatgcgatccgcatggtgactagagcactctgtatatggtccactgttagttgcttccttggcctttaacaaccagcttttgttcaggcttgtggcaaagtcagaagttaattcccagcagtgcttcttcaacaaaggcctgaagagatttatgtacaacgagaacacgcggcgctccaagctgctcatgctgtttgacaagttccgcagcgtgttggtggtgaccacccacgaggaccctgtcattgccgtcttcaaggctttgctcccttgggccccaggcggagggcggaaggctgcacgccccggtaaccactgataccccgcctccagcgaggcgataatccccgacgagtggtaatgatctgtgccatcttcttgttcggaaacatcattgctaaaccacgcgtattgcagccagctatccagccaggccccttgcttctgattaccgtgctgaaaccagcttgatgtcagcccaacggcataaccgtggttctggttatcggcgcgagttccggtcatattcgagcggctgtcgccctggttatcgctgtagccaccaacaatcccaagcatccactcgccatccgtgccccagcgcccgctaaacagatcgccgctaagttgcaccgtagaagtgtcttcatgttgagccagttgccccgctgctgtgtaatgataatctccgccgataacacgtaaattcagcgtctgaccatccaacccctcccctttgaaggggttaaaggaaaacattccggggggcgggattttccccggggggggcaaatctttaacggttgttgggggaattgaaaaaagcttaccggtacgggtcgcgggcaagggtgtatatccggcgcttggcgcaaaaagtgaaagttgacgcccaaaaccggtcgtgaaaccattatcgtccacgaaattccgtatcaggtaacaaaagcgcgcctgatcgagaagattgcggaactggtaaaagaaaaacgcgtgaaaggcatcagcgcgctgcgtgacgagtctgacaaagacggtatgcgcatcgtgattgaagtgaaacgcgatgcggtcggtgaagttgtgctcaacaacctctactcccagacccagttgcaggtttctttcggtatcaacatggtggcattgcaccatggtcagccgaagatcatgaacctgaaagacatcatcgcggcgtttgttcgtcaccgccgtgaagtggtgacccgtcgtactattttcgaactgcgtaaagctcgcgatcgtgctcat

SEQ ID NO: 764 - DNA, 901 bp, Homo sapiens
gcggccgccaccaccttgggaggagattatgtacaacgagaacacgcggggctcccagctgctcatgctgttttgacaaagtttcgcagcgtgctggatggtgaccacgcacgaggaccctgtcattgccgtcttcccaggctctgctcccctgagccccaggcggagggcggaaaggctgctggggtgccgcaggtttggaaaggccccttggattccttggcttggggacaatgatgacctggacccttggccagaagagccctggccctccagcaaggcagcacctgctctgatgcacctgtgcacccctggccctcccagaccacctgggagcccgaagcttagcctgtaggtggccaagccagttccctactcttgggctgcggccacgttgaggctccgcatcagacagccaggggcaaggcactagtggacaaagccagcaaatgcggcgttcctgtgagcagataccctcaaccagccagctgtcaaaagtatttcaagataaaatcagggccaagcaaagcctttaagttcccgtccattctgtgattcccacgctgcttccagctcaccaggtggggtgcctgctgcccaccctgacccacctcagtagggaggagcaggaccctctacatccctgtgggtgcagggcacacgcccctcgttgtctcactgagcccccacagagccgcctgcaaatgagtcaaagcctggccgccctcatcaccacagccccgtgccctggctccttcacacagaacacatccaagtcccacatcctgacaaaaacatgacccctttgatcacttcctgccaaacctccctttcctcaccgactcctccgctgaccctaagtccccctgctgtgcccactgctccatccttggcaacctga

SEQ ID NO: 765 - DNA, 421 bp, Homo sapiens
  SIMILAR (47)..(112): 631254mologous to Homo sapiens Human secreted protein, SEQ ID NO: 5107,accession number AAG01026,Smith-Waterman Score=75.
cccggcgtggctgagccgttttacctgtgcggccacttatatcaagatgccggaggaataggagacccattaccaacccatggaggaggaggaggctgatacgttcacctatgggctaaaatggccccgctgatgttatagatcatcaatactttctactcgagcaaagagatctctctgagagagctcatttcaaattcatcagatgtaagtgacttattaacccacaatcggattttggtttcagagtgaacttattgggggtgctgaatgcttaaattaatattttttgttaacaggcattggacaaaatccggtatgaaagcttgacagatcccattaaattagactctgggaaagagctgcatattaaccttataccgaacaaacaagatcgaactctcactattgtggatactgg

SEQ ID NO: 766 - DNA, 3098 bp, Homo sapiens
  SIMILAR (1052)..(1876): 461254mologous to Homo sapiens -14,accession number X90857,Smith-Waterman Score=424.
  misc_feature (1)...(3098): n = a,t,c or g
tttcgtggcacgtgggccccctccgcctccggctccgttctcctcaggctccctccgcctccggctccgtcctcctctggccccctccgcccccggccccggccccacggcgggatgcgggacaacaccagccccatcagcgtgattctggtgagctcggggagcaggggcaataagctgctgttcaggtaccccttccagagaagccaggagcacccggcgtcccagacaagtaagccgcgtagcagatacgctgccagcaacacgggcgaccatgcctgatgagcaggacggcgattccaggttttcagatgttattctggcaacaattttggcaaccaagtctgaaatgtgtggccaaaaatttgaactgaagattgataatgtgcgatttgttgggcacccaacactgctacagcattgctctggggcagatctccaaaacagatccttccccgaangaagggaaagcaccctactatgattcttttttaatgttggttgtttgcactggagggccaacgcagacccgtcagttgataaactgtctgcataacctgtcccgtcgtatcgccaccgtgctgcagcacgaggagcgccgctgccagtacctcacccgggaggccaagctgatcctgggcgctccaggatgaggtgtccgctatggctgatggaaatgaatgatcctaagcccccattccatcacatcctgcgccaagtgcaagctggccagggacctcaaggaagcttatgacagcctgtgcacgtcgggcgtagttcggcttcacatcaacagctggctgggaggtgagcttctgcctgccccacaagatccactatgcggcctccagtctgatccccccagaggccatcgaacggagcctgaaagccatccgcccctaccatgccctgctgctgctcagtgatgagaagtccttgctgggtgagcttcctattgactgctcccctgccctagtgcgggtgatcaagaccacatctgcctgtgaaagaacctgcaggcagctagcccaagatgcggacctggccttcgctgcaggttttccagcttgcagctcatctgggtgtactggggcaaggccatcatcatctacccgctgtgtgagaacaacgtctaccatgctgtctccccaatgccagcgtatgtctgtactcccccgctgggccgagcagttcttcccaccagtttccattctcatggacctggccgtccgttcttgccaagttctccttgccggttttcctttgtcagaattttaggaatcccctggccccccgctgtgccaggagaacccagcttcattccagatggtggtgtggaatgctgcagcgccgggcttctcatccagctgcaacacctatgtcctgcctgatggcctcacccagcgaaggaggagccccgtccgcgaagaggacgacgtccccttcacttgcccgggtcggcggtcgcagcctcagcacgccccaacgccctcagctttggctccccaaccaagcagcgatgacatgaccctcaccaagccccaagcatggacaactccaagcgcagagctacttcccagcggggactcgccacttgaaccagaggatgacggagaacctgtttggcctagcctgtcggagcatgaacgcgcagccatcctcacgcgtacccgcagcccagaaccctgaggacaaaaacatgtttgcccaggcatccttcactacttccgcggccgccaccacctggaggagattatgtacaacgagaacacgcggcgctcccagctgctcatgctgtttgacaagttccgcagcgtgctggttggtgaccacccacgaggaccctgtcattgccgtcttccaggctctgctcccctgagcccaggcggagggcggaaggctcgctggggtgcgcaggtgggcgctcgcgtctccccaccccagggctccccccgtgctgaggctgagccctcttggccctgaggcctggcattgggtggatgcgggctgtccgtggcccagtgaagcctgcagagccccggctgtccttgcccctggtggttccgctgtggggctgctgcctgctgtgttcctacgcttccctccagtccttgccgcacgcgtaggcatctccacgctggaggggggcctgccaggactcctgtctctgggtgaggccgcatccttcaaggcccatgtgggctgtgcgtttctcagaccctccttctgtccctacacctgctccttggaccccccagtctgtggccaccctgaagaatgtgcagaaacacttgtgtggcctgtccctgtctctctgacagccttccatttgtgaagtgccctgtggccccctccccagcacctctgtctgccatgcgctttcttccttccccagggcttacccttgagcctttcctggcccaagtccttcacccacagtccacagaagccacaaaacaggctcatagccaagctgtgacctggtcctgaccatctgggcacggagggcctgggctggccctgctaggctggagaagccctgtcacctgtgcacatcttgctggtggaggcatggcccactgtgcaggaccccaccctcgggggctttcggctcccacactgatgattctccccagcatccacaccgggcctggcgctacgtactcaggcccccagctctcgtgtcctggaggaagagctagctccagacatgggttgatcacctagaggagctctggctaaggcacagttttctagaaataaaacatttattcgggtttggaaaggccccttggattcctggctggggacaatgatgacctggaccctggccagaagagccctggccctccagcaaggcagcacctgctctgatgcacctgtgcacccctggccctcccagccacctgggagcccgaagcttagcctgtaggtggccaagccagtccctactcttgggctgcggccacgtgaggctccgcatcagcagccaggggcgagcactagtggacaaagccagcaaatgcggcgttcctgtgagcagataccctcaaccagccagctgtcaaaagtatttcaagataaaatccaggccaagc

SEQ ID NO: 767 - DNA, 806 bp, Homo sapiens
ccactgaagcgctcagatggctgtaacgacggccgacccacgcgtccgcccacgcgtccggacacaactgtgttcactagcaacctcaaacagacacgcatggtgcatctgactcctgtggagagagtctgccgttactgccctgtggggccaagcgtgaacctggatgaaagttggtggtaaggccctgggcaaggctgctgggtggtcctaccctgggaccccaaaaggtcctttgaagtcctttgggggaatctgtcccaactccctgaatgctgttaatggggcaaacccctaaaggtgaaaggcctcaatggcaaaagaaaaagtgctcgggtgccctttaagtgaatggcccctggctcacctgggacaaccctcaaagggcaccctttgccccacactgaagtgaacttgaactgtgacaaagctgcaccgtggatccctgaagaacttcagggctccttgggcaaacgtgcttggtctgtgtgcctggcccaatcaacttttggcaaaagaattcaaccccaacaagttgcaaggcttgcctaatcaagaaaagttggttggcttggtgttggctaaatgcccttggccccacaagtatcacctaaagctcgcctttcttgctgtccaatttctatttaaaggttcctttgttccctaagtccaactactaaactggggggatattatgaagggccttgagcatcttggattttgcctaataaaaaacatttattttcatcgcatacaagaataaaacaagcgcggccgattaagaggatacttcaggggcgcaagat

SEQ ID NO: 768 - DNA, 1299 bp, Homo sapiens
  SIMILAR (330)..(401): 791254mologous to Homo sapiens Human myelin oligodendrocyte glycoprotein gene,accession number AAZ29204,Smith-Waterman Score= 105.
  misc_feature (1)...(1299): n = a,t,c or g
ttttaataagttgatattttttccctgtgtagatttaaataatttcctttaaaagccgtaagctttggctgggcatggtggccttatgccctgtaatccccagcactttgggaggcctacgatgggtggatcaccctgaggtcaggagttcaagacccagtctggccaacatggtgaaatgccgtctctactaaaaatacaaaaattagctgggcatgatggcgagtgtctgtaatcccagctactcaggaggctgaggcgggagaatcacttgaacctgggaggcagaggttgcagtgagctgagatcgcgctactgcattccagcctgggcgcccgagatagcgccattgcactccagcctgggcgacctgaataaaactctgtctcaaaaaaaaacaaaaacggtaagcttttatatttaattaactgatacctttcactgtggcaatctccaagagggaagattttctaaattaggacattggtctttaccttaaaggaaggaaaattggtctatttcagtgtcttttttagcaagattgaccaaaaacaggtggtaaggtgtggaattttttacctgtcatgaaatactgtaatgcgcacctttgctaataaggaaatggtctccctttgaattatggggaagtttcttgtctgtgatatgggggtgtctgtgtacatatatgtatatttccttttttaatacagggataataatatgggggtcttgtccttccaccttttaagttcaggggaaccagtttgtccctgacccacacatatgtttatcagtgtaatgctttatggaggctttaggaaatgaggctcatggactcattaaaaaataataaaacatgatgctattttaaatattttcaaataaataatcctgaggatgtgtttcatactttagcatcaacgctgagttgtgcccctgtagaattgccattgnccctatacatgccaaaagacctattaagttaggatgaacctagattccccaattaccagtgaaattcctatccttgcaaatggctatagaataacttgcattttaaacgtgtatttgcacattttacatatgcctatgtggttgcctttggggttttctgtacagattgttttttgttattaaatggaaaaggcctgaattatgctcttatgtgaagtaaattgatataacctattgactgtattctgtgtattattccctcttttgggaccttctgtgtaaaagaaaatattacctaaattggttagatacaaagaaatcattaaaattattaatgtatatatg

SEQ ID NO: 769 - DNA, 745 bp, Homo sapiens
atccttaattaaattaatccccccccccccccccccggacaactcggtggtggccactgcgcagacccagactttcgctcggtactcgtgcggcctcgcttcgcttttcctcccgcaaaccatgtcagaacaaacccgattatggcttgagatcggagaaattccgataaagtcggaaacttgaggaagacagagaccgcaagagaaaaattcccactgcccttcccaaagaaaccgattgaaccaggagaagccaagccaggcgaaatcgtaaatggaagcgtgcgcccgcccaatatgccactgtacattcccacaagcattgcccttccttattttaccttccttttagctgtcttaactttgtaagatgcaaagaggttggatcaagtttaaatgactgtgctgcccctttcacatcaaagaacctattgacaacggaaggccggcgcttggcctttcccatctgtctatctatctggctgggcagggaaagaaaagaacttgcatgttgggtgaaggaaaaaagtgggggtggaagaagtgggggtgggacggcagtgaaatctaggagtaaaaccaagctgggccccaaggtgttcctgcaggctggtaattgcagttttaattcagagtggccatttttttttttttgttttgttcaaatgattttaattattggaatgcacactcttttttaatatgcaaaataaaaaggtttaaaaggtaaaaaaaaaaaaaaaaa

SEQ ID NO: 770 - DNA, 1720 bp, Homo sapiens
cccagtaggggcagcattttgctaaatgtaaaagatagccatttaaaactcatacatatacatgtgtatatacagttatatcaacactatttatatacatatatatctggagagcaatatttcattgcctttgaatatctatatatctactcccacaatatatactagagacatactgtgtgagtacatacgaaagcatatgtacacatgctctgacatgtatatatacacttttgtctgtgtgtgcataagagctttaaaggcacaatatatagggatgcaagttttctagagagctgcagcaaagttaatacagaatgtcacaaactgagaaaagtcaaaaggaaatatagcagaattcatcacacaggaattcatcaaagcagtttcatcatgagaaaaatgagttagttacagaattcaagaggctaacatgtgaccttgtatgctttccattaaaatgtaaatggtgaagttatgattaaactacaaagcaaataaaaatatgtaaatgacaaattaatgacagtaagtgtggaaataaacctaacactaatatcgatcataaaatcataattatgttcttttgtaatttaagtaaaatgtccccaaattattgagctaaaactttcaaatttgttttatttgaaggttggctttctgtttgtttttgagacaaagatgaatgcccaagtctcaaaattcctattgataatattaccaaaacttgtatccttctgggaaaatttcagagataaagatcctttaaaagaaataacagagaagttgatgaaatatgcttaagccagatgcttctggctagaagagacagaattaagggggaaaaaaaccacaatgatgtgtgattttttttttttaagtgatgaaagactgaccagtagaaggtggtgaagatgaagaatagtggaactggcaagtaagaactgttcagacaagcattcattgtgtaatatccataaacaaaactataatccaaaggacttccattttagtatgttctgatgatgtactctagactgtcacctcctctggcttacagaataatccagaactttccatagacattaatcttgcttaacaaaggctgtttacctattatacacacacatttttaagggaaatatatgtatatagctttatctatacacacacatatacatacgtgtatatatagatttatacaaatgtataaataaacataatacttttcaatctttccattgacagggcaagttcacattcagcaaagtgccaccacatcccatatacacatatctgtacagatatacacataagggtctgttttcaccccttccaaccgggaagaattttttcctagcaaatccccattaaccagcaactgaagggagaaatggcaccagtacaaactccccctcctttccatttgccatgccatatgtacaagaaatatgccagatcctaaaaacaaaatccccaaaacaagagtgaatgaaaccaggagatgctgcaaaaatacaactgtagaaaagaacagcatatagagctttcctagatcttcactatatctaagatgaagtaaatgatgctcaagagacaactacaaattcaggtatattatcagaagttgctttgacatatttcaaagtacatgattttttaagtattaaaaataaatgtcattggaacatttaataccaactctacttttgactatttc

SEQ ID NO: 771 - DNA, 2056 bp, Homo sapiens
  SIMILAR (328)..(1230): 421254mologous to Homo sapiens core protein II precursor,accession number J04973,Smith-Waterman Score=376.
tagcggggaacgctgggaaactcccggcctccgccaccatcttgctttcctttaatccggcagtgaccgtgtgtcagaacaatcttgaatcatgaagcatactaacccagagcccggctctttctcgagattttattccctcaaagttgcccccaaagttaaagccacagctgcgccttgcaggagcaccgccacaacctcaggaccttgagtttaccaagttaccaaatggcttggtgattgcttctttggaaaactattctcctgtatcaagaattggtttgttcattaaagcaggcagtagatatgaggacttcagcaatttagggaaccacccatttgctgcgtctttacatccagtcttgacggacaaaaggagcttcatcttttcaagataaccccgtgggaattggaaggcagttgggtgggcaaattaagtgttgaccgcaacaaggggaaaacatgggcttatactggtgggaatgcctgccggggtgatgttgatattcctaatgggagttcctgctcattgttcaccacaggcaccagaatttcgttcgttggggaagtaggtgaaccttcagcctcagcttaaagattgacaaagctgtgggcctttcagaatcccgcagactcatggccattggaaatttgcatgcagcagctttaccgggaatgccttggctaatcccttgtattgtcctgactataggattggaaaagtgacagtcagaggagttacattacttcgttcagaaccatttcacaagtgcaagaatggctttgattgggacttggtgtgagtcatcctgttctaaagcaagttgctggaacagtttctcaacatgagggggtggggttggtttatctgggtggcaaagggccaactaccgtggaggtgaaatccgagaacagaatggagacagtcttgtccatgctgccttttgtagcaaaaagtgctgtcgcgggaagtgcaaagccaaatgcatttagtgttcttcagcatggtcctcggtgctggggccaccatgtcaagaggggcagcaacaaccaccagcccatctgcaccagggctgtttcccaggcaactcagcagcccatttgatgtttctgcatttaatgccaggtactcaggatctgggactctttgggatttaatactatctcccaaggccaccagctggctggagattgtatcaagggctgccctataatcaagtaaaaccaataaggtccaagaaacccttttttccaacccaaggtgtgtcagctgcccaagaacaaaggctgaaaagctgggatacccctaatggtccagtggaagtccttcctgaagtgttcccccggaagaaagtccgggtcccccggcctcctagttgcctggttccttacatgcccacccatcccacagtcccttccagccagatggattccagtggcttaatgcttgatatcataaatggcgggcaaagaagtttgttttctgggccagaagttcaatgggcagcaagtttggaaaatttggggacattacacctttttgtttgatggagttgtaattactggatggcacacattaccaggagagagctgaacgttctctcagcccagagcagcaaaccacatgaaagtcagaaagtctctaatataatcatttgtcttttttcccagtaagggtaaaataagggcataatgccaggtaaattattccccagctgacctaaaagtcaataaaacattctggtttaagtggttttcctacgtttttccccatgaggttaatcaacaagtatttattatgtgctgatatcttggttttaagatgccttaaaggagacagggatataattattgagtatagaagcatccagaaactattaaaattaaggctaagtggctatcggggtaaatagtgccagattactattggtggcgtttaagatgaaagcaagttcaaaatttgtcattttgggtgtcaacagctaaatggtctggtttttacccctgttttgcctttttttgcaataacattatttccaaaaaacataaaaaaaaa

SEQ ID NO: 772 - DNA, 420 bp, Homo sapiens
  SIMILAR (59)..(418): 861254mologous to Homo sapiens ST1C2,accession number AB008164,Smith-Waterman Score=507.
ggcctttgagctgctgactttcagctggaacttgaagggaccccaaccctgagacactatggccctgacctcagacctggggaaacagataaaactgaaagaggtggaggggaccctcctgcagcctgcaactgtggacaactggagccagatccagagcttcgaggccaaaccagatgatctcctcatctgcacctaccctaaagcagcctcagggacaacgtggattcaggaaattgtggatatgattgaacagaatggggacgtggagaagtgccagcgagccatcatccaacaccgccatcctttcattgagtgggctcggccaccccaaccttctgtgcttgtactacgcagatgtttcctcttgagctattttaaaggtgtggaaaaagccaaagcaatgccctctccacggat

SEQ ID NO: 773 - DNA, 387 bp, Homo sapiens
  SIMILAR (223)..(2): 1001254mologous to Homo sapiens dJ1085F17.3 (A novel protein),accession number AL035071,Smith-Waterman Score=398.
tgcagtgcaggcggcccatggcgcgcgccccagccccgcaggttccaccgccgccgccgccctgctcagcttcctcctccgctgccgctgccaccgctgccggcctctccgcgcatccacaaccgcactttcgccacggccgtcgcagcgcactcctcccccggccgccctgggctgtccggagccggggagccctcgcagggccgcggacacgcgcggccgccgggctccggggagggagatcccacagtgtcatcaccaggatattgacattgatacagtcaagacgcagaacatttccatggcagcaacgatctcccatgttgcccaatggcattttaacagaagggacaagtgctagatcctctaacaaaaactagaagaaaa

SEQ ID NO: 774 - DNA, 1263 bp, Homo sapiens
  SIMILAR (649)..(1260): 1001254mologous to Homo sapiens ST1C2,accession number AB008164,Smith-Waterman Score=1115.
atggccctgacctcagacctggggaaacagataaaactgaaagaggtggaggggaccctcctgcagcctgcaactgtggacaactggagccagatccagagcttcgaggccaaaccagatgatctcctcatctgcacctaccctaaagcagggacaacgtggattcaggaaattgtggatatgattgaacagaatggggacgtggagaagtgccagcgagccatcatccaacaccgccatcctttcattgagtgggctcggccaccccaaccttctgcccctctggctcctctggctttcgaagaagagaaaatggtcactagttattgtcccatggaagaaaccaatgcagatgatataacaacaagcatggagggctactggcagggtgaggggaacatggccaatgaaccgttcctggagctagtgggcttgggaatgggccctgcagcctgggctgtgtcatgcacactctccacgctgtgcttctccaccctgagtctgagcaaccatcgtggtattcctggcggaatctgcaggtgtgtgattaacaggaaagatcttcataatgttcaggccaccatgtctccagcagtgaaagtacttggagagacccttgaagaatgtttcctcttgagctattttaaaggtgtggaaaaagccaaagcaatgccctctccacggatactaaagactcacctttccactcagctgctgccaccgtctttctgggaaaacaactgcaagttcctttatgtagctcgaaatgccaaagactgtatggtttcctactaccatttccaaaggatgaaccacatgcttcctgaccctggtacctgggaagagtattttgaaaccttcatcaatggaaaagtggtttggggttcctggtttgaccacgtgaaaggatggtgggagatgaaagacagacaccagattctcttcctcttctatgaggacataaagagggacccaaagcatgaaattcggaaggtgatgcagttcatgggaaagaaggtggatgaaacagtgctagataaaattgtccaggagacgtcatttgagaaaatgaaagaaaatcccatgacaaatcgttctacagtttccaaatctatcttggaccagtcaatttcctccttcatgagaaaaggaactgtgggggattggaaaaaccacttcactgttgcccagaatgagaggtttgatgaaatctatagaagaaagatggaaggaacctccataaacttctgcatggaactctga

SEQ ID NO: 775 - DNA, 2905 bp, Homo sapiens
  SIMILAR (409)..(1257): 321254mologous to Homo sapiens ST1C2,accession number AB008164,Smith-Waterman Score=241.
ccaggaaagatgtgaaaaactctagctggtgaccgagaggaggagtagagtgtgcccttagttcatatgaactagagggagttggtatttgcacagcagtcagggtcacatgagtgatcatggtacagtgagaagttctccctcccagggccaggtcacagggtttgtttctgttcaatccggattcttccagtaaaagcttcaacttcccacactgaagctgagagcctcccaaagtgctggctacctgctgagcgcccccgtaactctgacacagtagtaatttgagcctctgcaattgccgtctgcttcctgtgaaagtcctttccgtgcccactgacccttgagtgggcctttgagctgctgactttcagctggaacttgaagggaccccaaccctgagacactatggccctgacctcagacctggggaaacagataaaacttgaaagagggtggaggggacccttctgcagcctgcaactgtggacaactggagccagatccagagcttcgaggccaaaccagatgatctcctcatctgcacctaccctaaagcagggacaacgtggattcaggaaattgtggatatgattgaacagaatggggacgtggagaagtgccagcgaagccatcatccaacaccgccaatcctttcatttgagtgggctcggccaccccaaccttctggtgtggaaaaagccaaagcaatgccctctccacggatactaaagacttcacctttccacttcagctggctgccaccgtctttctggggaaaacaactgcaagtttcctttatgttagcttcggaaattgccaaagactggtatggtttcctaatgaccattttccaaaggatgaaccacatgcttccctgaccctgttacctggaaagagtatttttgaaaccttcatcaatggaaaaagtgttttggggttcctggttttgaccacgtgaaaggaatggtggggagatgaaagacagacaccagatttctcttccttttctatgaggacataaagagggaccccaaggcatgaaattcgaaaaggtgatgcagttcatgggaaagaaggtggagtaaacagtgctagataaaattgtccaggagacctcatttgagaaaattaaagaaaatcccatgacaaatcgttctacagtttccaaattctatcttggacccagtcaattttccctcccttcatgagaaaaggaactgtggggggattgggaaaacccacttcactgttgccccagaatgagaggtttgatgaaatcctatagaagaaagatggaagggaacctcccataaacttctgcatggaactctgagcaagatgtaaataaaatttaaaaggtggatggcaagagtgcaaatactatcttcaatccttcagtcccagccagaagaatctctgaaagcatattgtgaatgtatacaatgtagtacaaacaatctctgtgatgattaacagtatgtcaccacttcattttttaaaaaaaggatcacgtctaatgcccattttcccaactattctttccaaagtaagatataaggtagcttaataaactaagtaaaacgtatgacttgagtacaataggattgttttaatccccattattctggaaagtgcatcctagtctcccagtctataacatcataataccttgaggtataagtccaaatattaggttatatctaatttaaaaacaaaatttctgtcatctgtcctggccattcaggcaactccagcctggggcttcaatcctgggagttctgtctggtcactatcagaaggaacactttgaggggaaaccctggtgcagccagccctgagggaaacatgggcctgagtgccctcactgggtgggtgggaataaaatggaagtgcacagaggagatgtcagaagaccaaaacttggtgaatagtcccagtgctaggtcatataggaaacagaaagcatgacagtggccttttgggaacccaagttacgtcctggtgaaagcagaaaggaggagacaggatggctgtcaacaacgtcagcatgggcatggctcccaggcatggaggtaattgggtcttggcttcaatgccacccttttgggaagccctaaaccaagtgaggtgttcttttcccttgcttcccatatttgtcccagttgcagccctgttgttatgtatttactcttcaatttcttatttatacctctcacttcaattgttgaatttctttggggtttcagttcttcatgccatatttgactcctagtacctaatgcagtgcctggcacacagcaagtgcccccttgaagaacttgtagaggggagtaaaaaaagtgccatgggataaatgactgcagcaaatccacaaattttgaactttgaccccttttcttttagtccccaaatagtggcattcccatagctgagggtagtaggagcagttcacccctgggagcagacaataagaggaagaatgaagccaactaaaattctgaatgctttttgttggatttccgtagggtattttttttaaaaatagggtcttgccaatgttgcccaggctggtcttaactgactgctttttaattattaccatgcactggcaattccaaacaatgtcagtggttaaaatgcttctccctgaaaaagagaaaaaaaaaaggaaaaaaagaaaagaaaagtgaaaagaaaaactcttaattggcctaagttctaaataatagaataggaaccactgagttttaactatatgtatatgagcttcaaataagcacctttttattatgtaaataaataaaagttatctgtatccccactgcattgtaaaatttttgttgttttgtttcatgtcttattcacctttgtatggaaattaattcagaaaccccaagcatag

SEQ ID NO: 776 - DNA, 833 bp, Homo sapiens
  SIMILAR (2)..(541): 871254mologous to Homo sapiens alpha-tubulin isoform 1,accession number AF081484,Smith-Waterman Score=815.
  misc_feature (1)...(833): n = a,t,c or g
acacggcatccaggcgcatggccagattccaagttacaagaccattgggggaagagatgactccttccacaccttcttcagtgaaacgggcgctggcaagcacgtgccccggctgttgttgtagaactggaaacccacagtcatggatgaagttcgcactggcacctaccgncagctcttccaccttgagcagttcatcacagcaaggaagattgctgccaataactatgcccgagggcactacaccattggcaaggagatcattgaccttgtgttggaccgaattcgcaagctggctgaccagtgcaccggtcttcagggcttcttggttttccacagctttggtgggggaactggttctgggttcacctccctgctcatggaacgtctctcagttgattatggcaagaaatccaagctggagttctccatttacccggcaccccaggtttccacagctgtagttgagccctacaactccatcctcaccacccacaccaccctggagcactctgattgtgccttcatggaggaaggcgagttttcagaggcccgtgaagatatggctgcccttgagaaggattatgaggaggttggtgtggattctgttgaaggagagggtgaggaagaaggagaggaatactaattatccattccttttggccctgcagcatgtcatgctcccagaatttcagcttcagcttaactgacagatgttaaagctttctggttagattgttttcacttggtgatcatgtcttttccatgtgtacctgtaatatttttccatcatatctcaaagtaaagccattaacatcaaaaaaaaaaaaaaa

SEQ ID NO: 777 - DNA, 1712 bp, Homo sapiens
  SIMILAR (200)..(421): 861254mologous to Hirudo medicinalis alpha-2 tubulin,accession number U67676,Smith-Waterman Score=350.
  misc_feature (1)...(1712): n = a,t,c or g
gctagtgcgttacttacctcgactcttagcttgtcggggacggtaaccgggacccggtgtctgctcctgtcgccttcgcctcctaatccctagccactatgcgtgagtgcatctccatccacgttggccaggctggtgtccagattggcaatgcctgctgggagctctactgcctggaacacggcatccagcccgatggccagatgcccaagtgacaagaccattggggggaggagatgactccttcaacaccttcttcagtgagacgggcgctggcaagcacgtgccccgggctgtgtttgtagacttggaacccacagtcattgatgaagttcgcactggcacctaccgccagctcttccaccctgagcagctcatcacaggcaaggaagatgctgccaataactatgcccgagggaacttacaccattggcaaggagatcattgaccttgtgttggaccgaattcgcaagctggctgaccagtgcaccggtcttcagggcttcttggttttccacagctttggtgggggaactggttctgggttcacctccctgctcatggaacgtctctcagttgattattgcaagaaatccaaggctggagttctccatttacccgggcaccccaggtttgcacagctgtagttgaaccctacaactacattctcaccgaccacaccacccctggagcactctgattgtgccttcatggtagacaatgaggccatctatgacatctgtcgtagaaacctcgatatcgagcgcccaacctacactaaccttaaccgccttattagccagattgtgtcctccatcactgcttccctgagatttgatggagccctgaattttacccttacgaatttcgggaccaaactggttcctttccccccgaatcccacttcccttctgcccaataatgccccctgttcattttgcttgagaaaggcctcccatgaacagcttttctgtaagcagagatcacccaaatgctttgctttgagcccagcccaaccagattggtgaaatggtgaccctcgcccatgggtaaaatcatggccttgctgccttgttgctaccggtggtgacgtggttcccaaaagatgtcaaatgctgcccattgcccacccatcaaaacccaagcgcagccatccagtttgtggattggtgccccactggcttcaaggtttggcatcaactaccagcctccccactgtggtgcctggtggaaacctggcccaaggttaccagagaagctgtgtgcatgctgagcaaacaccacagcccatttgctgaggcctgggctcgccctggacccacaagttttgacctgatgttatgccaagcgtgcccttttgttcactggtacctgggtgcaggggatggaggaaggcgagttttcagagggccgtgaaagatagggctgcccctttagaaaggattatgagaaggtttggtgtggattctgttgaaggagagggtgaggaagaaggaaaaggaatactaattatccattccctttttgggnccctgcagcatgtcatgctcccagaatttcagcttcagcttaactgacagatgttaaagctttctggttagattgttttcacttggtgatcatgtcttttccatgtgtacctgtaatatttttccatcatatctcaaagtaaagtcattaacatcaaaaaaaaaaaaaaaaaagggcggccg

SEQ ID NO: 778 - DNA, 1781 bp, Homo sapiens
  SIMILAR (281)..(595): 601254mologous to Sordaria macrospora alpha-tubulin,accession number Z70290,Smith-Waterman Score=334.
  misc_feature (1)...(1781): n = a,t,c or g
gctggagctcaaggatccttaattaaatttatcccccccccccgaggttctcttacatcgaccgcctaagagtcgcgctgtaagaagcaacaacctctcctcttcgtctccgccatcagctcggcagtcgcgaagcagcaaccatgcgtgagtgcatctccatccacgttggccaggctggtgtccagattggcaatgcctgctgggagctctactgcctggaacacggcatccagcccgatggccagatgccaagtgaccaaaaccattgggggaaggagatgattccttcaacaccttcttcagtgagacgggggctggcaagcatgtgccccgggcagtgtttgtagacttggaacccacagtcattgatgaagttcgcactggcacctaccgccagctcttccaccctgagcaacttatcacaggcaaagaagatgctgccaataactatgcccgagggcactacaccattggcaaggagatcattgacctcgtgttggaccgaattcgcaagctggcccgaccagtgcacggggtctccagggcttcttggttttccacagccttggtgggggaaactgggttctggttccacctcccccctgccttcaacttgggggggggggggnggggaaacgtctctcagttgattatgggcaagaagtcccaagctgggagttctctatttacccgggcgcccccaggtttccacagcctgtagttgagccctacaacttccatcctaccaacccaacacccaccctgggagcactctgattgtgcccttcatgggtagacaatgaggccatctatgacatctgtcgtagaaacctcgatattgagcgtccaacctatactaacctgaataggttaataggtcaaattgtgtcctccatcactgcttccctgagatttgatggagccctgaatgttgacctgacagaattccagaccaacctggtcccctatccccgcatccacttccctctgggccacattatgccccctgtcatttttgctgaagaaagcctaccatgaaccagctttcctgtagcagagatcacaaatgctttgctttgagccagccaacccagatgggtgaaatgtgaccctcgccctggttaaatacatgctttgctgccctgttgtacccgtggtgacgtggttccccaaagaatttcatttctgccattgcccaccatcaaaacccaagcctaaccatccattttttggattggtcacccactgacttcaagttggtcatcaactaccagcctcccactgtggtgcctggtggagcacctgaccaaggtacagagagctgtgtgcatgttgagcaacacccacagccattgctgaggcctgggctcgcctggaccacaagtttgacctgatgtatgccaaacgtgcctttgttcactggtacgttggggaggggatggaggaaggtgagttttcagaggcccgtgaggacatggctgcccttgagaaggattatgaggaggttggtgtggattctgttgaaggagagggtgaggaagaaggagaggaatactaaaggttaaaacgtcacaaaggtgctgcttttacagggaagcttattctgttttaaacattgaaaatgttgtggtctgatcagttaatttgtatgtagcagtgtatcgctctcatatacaattagctgacctatgctctaaaacatgaatgcctttgttacagacccaagctgtccatttctgtgatgggttttgaataaagtatttccctgtcttaaatga

SEQ ID NO: 779 - DNA, 655 bp, Homo sapiens
  SIMILAR (462)..(187): 491254mologous to Homo sapiens Human myelin oligodendrocyte glycoprotein gene,accession number AAZ29204,Smith-Waterman Score= 188.
  misc_feature (1)...(655): n = a,t,c or g
ttaataaatatttgctagtattattccaaagaatgttcatgacattttcgacattcaaacactataaaaggtaaatcatttttattgccacaaattgataaattgttgtgaaaaaaagagaaactggcacacatgaaataacacaaacataagaagaatataagacccaaaatagatttgaattaaggtctcccaggctggattgcagtggggcgatctcagctcactgcaacctctgcctcccaggttcaaggcaattctcatgcctcaagcctcgaagtaggctgggattacaggcatgcaccaccatgcctgggataatttttgtattttatttagtaggagatgggggttttgccatgttggccagggctggccttngtaactcttgacccaagtgatctgcccgccctggcctccccaaagtgctggggattatagggtgtcagcctgtgcccctggcctaaactctgactttttgaaaagggtttcttaaactttatttttaaacaatcaaccaataagtatttcactgtgcacctattagtatgtctaacacaatgctaagtaaggggaattatgagaagattataagcttatcacgtgatcttgtctttaaatagtttataacctagctacctatgattatgaagac

SEQ ID NO: 780 - DNA, 454 bp, Homo sapiens
ggcaccactgtgaatattctcctctgaaccactagagggcaggccaggcaggccaggcggggcccgtgcagcttgtggccaagaaggagctggcaaggaccggcgctgctggagactgacccagccctctggctgaggacatgcagcggctcctaaatgtagagaatttggccacaaccaaattgatgctggctggaaccagaggccagaaagcctggccttgtccccatgtgggagccctgtcctcagccctcttgtccccttgagctcagtgaattcccaccaggtgcccacagctcctggacttcaaattctatatattgagagagttggagagtatatcagagatatttttggaaaggagttggtctatgcaatgtcagtttggaatcttcttgaaagtttaatgtttttattaggagatttaaagaaaataaaggtctacaatatcaaa

SEQ ID NO: 781 - DNA, 3133 bp, Homo sapiens
  SIMILAR (3132)..(2776): 1001254mologous to Homo sapiens Human Th2-specific polypeptide, h1419,accession number AAY92215,Smith-Waterman Score= 616.
gtgcgggatcggaattccatttttcagatgggaaaagtgaggctcagagaaaggaatctggaacgatgaaggtgatgattgtgcctgtggccaagaccgggagaaccctggatccctacaccttccccacccctggaatgtcactatacatatctgacttcttctgatgttgcctttgaccctaaagtcaatatgataaagtaacaagaagctgggacagaggaacaaacacagcccactcaagcagtggtggcaacattctgttagaaaggaggggagtcaaagaaaaaaacacccctccgcccatctccttatcacctccctaaagacagaggagaacatggacaccctccatcctgatagacatgccatgtggtcagtttgtgcggtaaacaggaaaaaaaaaaaacctaaagatattgtagacctttattttacttttaaatctcctaatattatctttataactttcaagaaggattccaaactgacattgcatagaccaactcctttccaaaaatatctctgatatactctccaactctctcaatatatagaatttgaagtccaggagctgttgggcacctggtggggaattcactgagactcaaggggacaagagggctgaaggacaggggctccccacatgggggacaaagggccaggcgtttctgggcctcctgggttccaggccagcatcaaatttggttgtggccaaaattctcagtccaatcaccctgggcccagggcctgggcgtggggaggatgtgggcaggctctgtctccttctggggttcctggtctggagggagtctccccaacacgcgccaaaggctggctgttttccgcccaaagccccagaaactttgaatgagaggcaaatctaccctgaatgcacctccctcataggctgggtgagagtcacgcagacacagaagggcaggacagaactccccatcttctgggggccaattcgtctggacacttgtgcggtcagcttcctttttaaagtgccagtatcggtggggcaggaagggacttctcaggggctgagcagagccttctccagcgcgagcaaacactctgttcccgcctcggcaggcaccttctaacattcattttctaagggttaggtgagtaaaacaacaacaacaaatgctggaaatgctctgttcccaatgccagggagttccaagaccaagaagcccaactctcaccagcgggggcagatggggagctagggaaggaaccctcccagcctggggagggcacctgcacccctcccagagagagaagcccccatcccggccccccagctgggccccagcgctgctggaaccagccggcaggtggggcagaaaagcagcacctcccctcaccagggcgaggaggcaatattgaaccgtgaactcaagaagaaagacggaaagaaaaaatgaaaaaagctacagggctaagtaaacaccagcctgctgggtttatacaaaatgagtgaaatttaaaaggggcaggagagtttgtccacgggactggctggcagccagaacccaccttcaagcaaattacaaggacttgggggaaagtgctgagagcagaggctttagtagggggcagggccagactgctccccactgggaaagcacaccccttaaaggagcccttcccccttgcccagaacgggggatgcttccagaggaaggctgaggcttttctggtaaggaagccagcttcggaccaggccagccacagtccacctgcctctctggcatccgccccagcctgggtagctgacccctggggcagtaaaggactttgcttgctccaaccttcctgcaggaaaaccaactgtttaggacaccaggcctgggcagagggcacggtcggtgctcagacctttctcagcacgggtctcagacctgagctggagctaactggaggaagaggcagcacccgttcccgccgggctgctggaccctgggcctctgactgcacagcaggcagtgaccaggagtccttgggaaggagctcagggaaggggaggtgaggggccagtgggactgtgctgggggtgagcatgtgcaaagtgcaggctgcaaggcagcgggaggacatttgccggggggaggcaggggtctcgatctggagtgtgggtggggtctgaggtcatggctcccaggaagaggccgccagcaggtcccccaggacacaaggaagggacagctgaagcagtaagcagtcagacagtcacaggtggcaggattccggaggcggtctggccccaccaccaccagggcaagggaacaacggagcaagagccctgctgctaagacgtgaccaaagccagtgctcctggagtgagtggggacacaggtagagaggccccctccagccacaggcatctcctaacatttaaggagctgctgcatgtcccttcagccagagggctgggtcaagtctccagcagcgccggtccttgccagctccttcttgcccacaagctgcacgggcccgcctggcctgcctggcctgccctctagtggttcagaggagaatattcacagtggtgcctgggccttggtgggccaggagggtcccagcatggatgggaggggcaatggaatgatgctacggggagtgtggactggagtgcatggaggaggcatggatgagatgtggcgcagaggtgatctgaaggggaaagttcctcatggaatgatacaggtctggactccagagaaagcaggactcttctccagcccggactcctgctcctcaatggctttcaatcacaactggctcgtagaccccagaagagaccctggtggcaagctggatgccgctcagcgtggcagagccatcgcggctcacgaacagccggaggttgctgtcctcggtgttgctgccatctgtgaagtcctggctctgcacgatcttctccacgatggcatccgcatcgatccgcgtgtcgtccacccaggtcgggtggctctccaccgagtccttcttccgcctgaaagagcgatcggacagatgcaggggccggggtggccgcggcggcttctccgggggccggtgctcccgctcactgccctcagggccctccacggtcatgccaaggcccccagaggcgctg

SEQ ID NO: 782 - DNA, 2796 bp, Homo sapiens
aacaaaagtttccagactgaagcccagaagggaatcctgcaaatcgtgatactgataatcctccactcaggcccctttttctaccagccacttcagtagggtctcaggtgcaaagggattctgcagagggagtgagggcaggctcatatgcaacactgtgattagaaaagatgtaaggcacctgagctaagttgtcagcacaccccccaaagccaagggacctgttagaaatccgggactccttgatccagatctgaagtttcatccattaatgtgtcacttgaattgaggctttagaattcttgaaaatcggtgttccttactcagcagacacactcccacccacacccacagccacacatacattggggccctcaagcctgaggtgccatccagccttatgtagggtcatggtacagatcagatccatggcacacgattacaataggaagaagtgaaaagttgtttttattgtttatatattaatccaagcaggcatctgatggacctgtggaattagaaataccagcagacatttccaaggggtaggtgcacaaggtcaacagaacttaaactacagtgatcttcccttagatccttttctactcgaggtgaaatagctcaaaagacaaggatgccttgtagtccagggctaacccctgtagcctcctacggcaattaacacaggaaggaaaggccttcctcccttccaggcactggggctcaacaggtggactgagtgtttgggtagtgtaccatttcccaatcctaaataagaagcaaagcccagacttctgcctttgaatgaactgaagcctacaggggacagggagtgggtcccaagggttcttcaaattctgtttttgtttttttcccaaaacttcctaatactattgtctgccctagggttgtaggggaatgctgggttaggtttgcttgaacagacactgtgtttccagcaagggtttgtggtaatcttcaaaatccccaggtctcagcccaaaagctttgccagttcaccctgactcccagggaacagggcctcctttcgaggtcgaggcacttgggttcttcgcccttgcttcttcccagtgagaactgtttcctcctacttctacaagcattgcacttgcccagctgagagcactgactcaggcggggcaacccctcacccaagtaaaccagggggcattcagcatgcccctctgggttcttgaccccagagagaggggggacttgaaaattaaaccctcttttttgctcttgtggggctgggcccacttgggctttcaacatgaggcgctttgggctttgggctgtgccttcattgaggagaggggaggggagagagaggcttttctggggccagagatgttttcttggggagggtttgcccacccttgtccttgaacccatcaattttggccaggggaaccacaggggtgtaaggtggaagacactgcgggaaggccccacgtgaaaagtggccagccttagctcctactttccaaaaagagaaaccagtggttccagtgacccctgaagccattcctgtgtgccaggagggagctccccctggaacagccaagtccatccactgccctcctgaaatacacacaaaggaggcctgccctgtccccgggaaagaagaaaacgttccagggaagagaaagatctggtcaaagaaaagggacagacagggtagagcccaggaatcaagaatccagggtagtgaagagattccctaacacctgccccccaggcagttctatactttaggtctagatgttaaacagagaccccccttcctccctcaaaaaaaaaatggagtgcaaggggcaacaaacactgtggcagagaagccttcctaagtttttaactcaatttccaaggagaaactgggaactaattaatggaatggacctaaatatctaagtttattttaattaagactcccaataactcacttcagtaaccttcctcaaagcccctggcaacgtgttctcagatcccttcctatgtgaagttcgctcttagaagctgcctatagatcctgtccctcagcctctccatctcatgtccagcagtggagaggaaattggcatcccaactaattcctcctctccttcagagttttttccaaacatccctctttgggaagggaaatactctaatagtttaacgttctaagcaatgtatatatgtatatatattttatttttgacccgacttcacctccttaaatccttccctttttttggatgtttggaaatgccacagccatcttattactatgaggggaagaaccaatatcctgaagatggcagagcagaaagaggaaagaactgtaatgagcagctcatggaatactcaaaattccatgagctcccgtttttaccaattctggaaacacccaacttcaagacttcttgatatatgaactaagaaatctccttgttattaaagaaaaaaagaaaagaaaacccttccccagcagagaccacttttactacaaacttaaaatgtcttttctttatcctcggcctcaactatatgttgcggcattgaattagcattgccaaaccccgcagccactttttaccccgagccaggagagaaaggaagcatgctatgtggtggggcttgaagtcctcattaggtaggcagctgtatgtttgatcatggcgagaggttcctcttgcttcgcttccctcatccttgccttcatacatgctaactctctcccccgacaatttacctgctttagaagctttgtgtcaaatgaagttgcttttc

SEQ ID NO: 783 - DNA, 788 bp, Homo sapiens
  SIMILAR (556)..(765): 561254mologous to Homo sapiens Human RECAP polypeptide, SEQ ID NO: 14,accession number AAB68884,Smith-Waterman Score=186.
ggcacgagcccacgctcatccagtcttccttgtgaccggcagtccactgtgcgcaacgctgcagccatacagagggacaactcgaagttagaactagcaccttggtcttgttggaataagcagatctgagtagagccagctgcagtcttatggttgtttagcagaagttattcttcttagcagagaatattatacggtcattttccagaactgtaaaaactctatcatttgttttaaaccagatgatgtgcttcatttctgtctttgacgtcttcagtttcttctcccctggctttacctcctttgttatcagtttgtgctttggttttgctgccaaccttataggcttaggtttggcggcaaaggcactagactctggtgccttcttttccttcgttgtcttaagcccttcttttcctctgccctcatgccctcaccacttcactcttttgaaggtcataatgaacacaaggtcagagatcccttttttggcgccaagcaccctgggcttttttgagatggagtctcactgtgtcacccaggcagtggcgcgaatctgcccactgcagcctccatctccctggttgaagcaattttcctgtctcggcctcctgagtagctgggactacaggtgcaagccacgacaactggctaatttttctgtttttagtagagacggggtttcaccatgctgatcagggtggtctcaaattctgacctcaaataatccacccacttgggcttccaaagtggttagggttacagtgtgagccctgcggctggctttc

SEQ ID NO: 784 - DNA, 430 bp, Homo sapiens
  SIMILAR (428)..(321): 881254mologous to Homo sapiens dJ1085F17.3 (A novel protein),accession number AL035071,Smith-Waterman Score=176.
  misc_feature (1)...(430): n = a,t,c or g
ntgagctggttaatcatcagagtctgacctatggcccatcgagcaagggtgggagcattctgcttccacttttcagaaaagtaagtggctttctcctccctaagacccagagttatgcaatccgcctggacctgcttggctgtgagacttttcttcaaagctccttttggacccagaaggaggcttttctcgatgcttctgagggagccaaggctaatttgattggtggtggcaaattcagagagctgagccagaattctttccgccttttttggctcagttaggaagtggaaaagcccctctgtcagggctgaaaattgctgcgcgcccagatggttcagatgctgcatgtctccgcccgcggctttcggcaccgggtcctcagtgcagtgcagacggcccatggcgcgcgccccagccccgcaggttc

SEQ ID NO: 785 - DNA, 1030 bp, Homo sapiens
  SIMILAR (275)..(201): 841254mologous to Homo sapiens Human secreted protein, SEQ ID NO: 6953,accession number AAG02872,Smith-Waterman Score=104.
tgaacagccatgccaacatacgtttgtttattaattattatataaactactaccattagctgggagacattcctggagccccattcctccagcccccttatgcctctataagcacaaaattccctctagtaaatatctttctgcttaaaatacctagactggtgctggacacggtggcttaatgcctgtaatccctagccattttgggaggccgtggcgggcagatcacctgaggtcaggagttcgagaccagcctggccaacatgggtgaaaccctgtctctactaaaaatacaaaaattggctgggcgtgatggcgggcacctgtaatcccaggctacttaggaagggctgaggcagggagaatcgcttgaacccgggagggcagagggagccagacggtgccactacattccagccgggggcgacagagtgagactctgtctcaaaaaaaaaaaattaaattaaattaaaaaataaaatatctagactgatttctatttcctgccctgaaacacagcagaacagaagcaaagagatttgggagacaaagggactagaccacagcagatgctgtttgtacatgacaatccaacctggctcctccttctgagttctgcgcacatggattgggtggtgaccgaggtggaaaggcttatctttgagaatcaattatttactctttaaatgtttcctaggcccttctgggccagggtcaaagccctataaagatgaacctgacagaatccatgccttgctatgtcaaaagaggaagatgtacaaaaaaacaaacaaccacagtacatttctaaaagggccagaaaagagaaatgacaaagtcatgacagctcagtagccttgaaagaaacaaaaatccacattggtgatactttccctgggcaatgtttatgtctatttctagatgaacttccaggttcaagcctcaagttaaatcacttacttcccaccctccccattctaactcttaaccaacctcatcgttaatcagacaaatcctaactacaacccct

SEQ ID NO: 786 - DNA, 1164 bp, Homo sapiens
  SIMILAR (49)..(963): 971254mologous to Homo sapiens putative p150,accession number U93563,Smith-Waterman Score=1527.
atgtcttcttttgagaagtgtctgttcatgtcctttgcccactttttgatggatgcagaaaaggcctttgacaaaattcaacaacccttcatgctagaaaccctcaataaattaggtattgatgggacgtatttcaaaataataagagctatctatgacaaacccacagccaatatcatgctgaatgggcaaaaactggaagcattccctttgaaaactggcacaagacagggatgccctctctcaccactcctattcaacatagtgttggaagttctggccagggcaattaggcaggagaaggaaataaagggtattcaattaggaaaagaggaagtcaaattgtccctgtttgcagacgacatgattgtatatctagaaaaccccattgtctcagcccaaaatctccttaggctgataagcaacttcagcaaagtctcaggatacaaaatcaatgtacaaaaatcacaagcattcttatacaccaataacagacaaacagagagccaaattatgaatgaactcccactcacaattgcttcaaagagaataaaatacctaggaatccaacttacaagggatgtgaaggacctcttcaaggagaactacaaaccactgctcaaggaaataaaagaggatacaaacaaatggaagaacattccatgctcatgggtaggaagaatcaatatcgtgaaaatggccatactgcccaaggtaatttacagattcaatgccatccccatcaagctaccaatgcctttcttcacagaattggaaaaaactactttaaagttcatatggaaccaaaaaagagcccacatcgccaagtcaatcctaagccaaaagaacaaagctggaggcatcacgctacctgacttcaaactatactataaggctacagtaaccaaaacagcatggtactggtaccaaaacagagatatagatcaatggaacagaacaaaggacatgaacagacacttctcaaaagaagacattcatgcagccaaaaaacacatgaaaaaatgctcatcatcactggccatcagagaaatggacatcaaaaccactatgagatatcatctcacaccagttagaatggcaatcattaaaaagtcaggaaacaacaggtgctggagaggatgtggagaaataggaacactttga

SEQ ID NO: 787 - DNA, 1380 bp, Homo sapiens
  SIMILAR (181)..(1365): 941254mologous to Homo sapiens putative p150,accession number U93563,Smith-Waterman Score=1968.
atggataaattcctcgacacatacaccctcccaagaataaaccaggaagaacttgaatctctgaatagaccaataacagcctctgaaattgtggcaataatcaatagcttatcaagcaaaaagagtccaggaccagatggattcacagctgaattctactggagtgttggaagtgctggccaggcaatcaggcaggagaaggaaataaagggtattcaattaggaaaagaggaagtcaaattgtccctgtttgcagatgacatgattgtatatttagaaaaccccattgtctcagccccaaatctccttaagctgataagcaacttcagcaaagtctcaggatacaaaatcaatgtacaaaaatcacaagcattcttatacaccaataacagacaaacggagagccaaatcatgagtgaactcccattcacaattgcttcaaagagaataaaatacctaggaatccaacttataagggatgtgaaggacctcttcaaggagaactacaaaccactgctcaaggaaataaaagaggatacaaacaaatggaagaacattccatgctcatgggtaggaagaatcaatatcgtgaaaatggccatactgcccaaggtaatttacagattcaatgccatccccatcaagctaccaatgactttcttcacaatattggaaaaaaatactttaaagttcatatggaaccaaaaaagagcccgcattgccaagtcaatcctaaaccaaaagaacaaagctggaggcatcacactacctgacttcaaactatactacaaggctacagtaaccaaaacaacatggtactggcaccaaaacagagatatagatcaatggaacagaacagagccctcagaaataacgcctcatatctacaactatctgatctttgacaaacctgagaaaaacaagcaatggggaaaggattccctatttaataaatggtgctgggaaaactggctagccatatgtagaaagctgaaactggatctcttccttacaccttatacaaaaattaattcaagatggattaaagacttaaaggttagacctaaaaccataaaaaccctagaagaaaacctaggcattaccattcagcacataggcatgggcaaggacttcatgtctaaaacaccaaaagcaatggcaacaaaagccaaaattgacaaatgggatctaattaaactaaagagcttctgcacagcaaaagaaactaccatcagagtgaacagggaacctacagaatgggagaaaattttcgcaacctactcatctgacaaagggctaatatccagaatctacaatgaactcaaacaaatttacaagaaaaaacaaacaactccatcaaaaagtgggcgaaggacatga

SEQ ID NO: 788 - DNA, 938 bp, Homo sapiens
  SIMILAR (1)..(210): 981254mologous to Homo sapiens NAG13,accession number AF194537,Smith-Waterman Score=351.
atgattatctcaatagatgcagaaaaagcctttgacaaaattcaacaacccttcatgctaaaaactctcaataaattaggtattgatgggacgtatttcaaaataataagagctatctatgacaaacccacagccaatatcatactgaatgggcaaaaactggaagcattccctttgaaaactggcacaagacagggatgccctctctcactctgcacttcctttcattgccaactggggagagcttcagaaaggaggaacataagcattgggatgcacgaggagactttctaaagacacagaataaacaatgcaattatccaatagcaggttctaaaacatgggtaaaaagaagagagaatgacagttttggaaactggatatactctgtattcagcaattgccttgtaatagacttcaagagtgagaaaaaagaatcccttaataatagtttctgcaaatgtgtgaaagctgagtgtgaggagaaaaagttgttttcaggaactaggagctggttcacctttaaaaagaaaatcagctgcctctggcaaaatggaattgcagcattgtcctggatggtaatttgcactagtaaatttatcaccaacctggcaggggagatgctgaagacaaaagcttttatctctcaccttgatccttggggatgccaattttatttgctggttctgctaccggtggagggtgtccaggttctcggtgtcttgaacataaattggacaaaacgtacaaagaaagaaagaatgaagcaactaaagcagagatttattgaaatcagaaacatactccacaagtttgtacttgacctcatctgtaagcctactgttgagcagaaaaacatgtaccagttaccaatgccaggtgaagattccaactatctggaggatagacaaggtcatcataatgccagccacctgtaa

SEQ ID NO: 789 - DNA, 1183 bp, Homo sapiens
  SIMILAR (1095)..(1181): 861254mologous to Homo sapiens putative p150,accession number U93563,Smith-Waterman Score=139.
atgaagctgaaaaggaacaatgagatgtctggcaaagccctggaccctagagaaggtttttgtgatgcctcttatgaaatacaaactaccatcagagaatactataaacacctctatgcaaataaactagaaaatctggaagaaatggatacattcctcgacacatacactctcccaagactaaaccaggaagaagttgaatctctgaatagaccaataacaggagctgaaattgtggcaataatcaacagtttaccaaccaaaaagagtccaggaccagatggattcacagccgaattctaccagaggtacaaggaggaactggtaccattccttctgaaactattccaatcaatagaaaaagagggaatcctccctaactcattttatgaggccagcatcatcctgataccaaagccgggcagagacacaaccaaaaaagagaattttagaccaatatccttgatgaacactgatgcaaaaatcctcaataaaatactggcaaaccgaatccagcagcacatcaaaaagcttatccaccatgatcaagtgggcttcatccctgggatgcaaggctggttcaatatacgcaaatcaataaatgtaatccagcatataaacagagccaaagacaaaaaccacctgattatctcaatagatgcagaaaaagcctttgacaaaattcaacaacccttcatgctaaaaactctcaataaattaggtattgatgggacgtatttcaaaataataagacagacacttctcaaaagaagacatttatgcagccaaaaaacacatgaaaaaatgctcattatcactggccatcagagaaatgcaaatcaaaaccacaatgagataccatctcacaccagttagaatggcaatcattaagaagtcaggaaacaacaggtgctggagaggatgtggagaaataggaacacttttacactgttgctgggactgtaaactagttcaaccattgtggaagtcagtgtggcgattcctcagggatctagaactagaaataccatttgacccagccatcccattactgggtgtatacccaaaggactataaatcttgctgctataaagacacatgcacacatgtttattgtggcattattcacaatagcaaagacttggaaccaacccaaatgtccaacaatgatagactggattaa

SEQ ID NO: 790 - DNA, 1392 bp, Homo sapiens
  SIMILAR (348)..(1391): 941254mologous to Homo sapiens Human secreted protein encoded by gene 3 clone HNHCT15,accession number AAB38012,Smith-Waterman Score=1673.
atgtatattaacatgtgtgtgcatgtgtgtgtacatgcatgcacacatctgtactgctctcctgacaggtactgctgtcctttggcacacctctagtgctgaccacaaaaagagagaagaatcaaatagatgcaataaaaaatgataaaggggatatcaccaccgatcccacagaaatacaaattaccagcatagaatactataaacacctctacgcaaataaactagaaaatctagaagaaatggataaactcctcgacacatacaccctcccaagactaaaccaggaaggagttgaatctctgaatagaccaataacaggatctgaaattgaggcaataattaatagcttacgaccaatatccctgatgaacatccatgcaaaaattctcaataaaatactgggaaactgaatccagcagcacatcaaaaagcttatccaccatgatcaagtgggcttcatccctgggatgcaaggctggttcaacatacgcaaatcaataaacgtaatcgagcatataaacagaaccaaggacaaaaaccacatgattatcttaatagatgcagaaaaggcctttgacaaaattcaacaacccttcatgctaaaaactctcaataaattaggtattgatgggacgtatctcaaaataataagagctatctatggcaaacccacagtcaatatcatactgaataggcaaaaactggaagcattccctttgaaaactggcacaagacagggatgccctctctcaccactcctattcaacatagtgttggaagttctggccaaggcaattaggcaggagaaggaaataaagggtattcaattaggaaaagaggaagtcaaattgtccctgtttgcggacgacatgattgtatatctagaaaaccccatcatctcagcccaaaatctccttaagctgacaggcaacttcagcaaagtctcaggatacaaaatcaatgtgcaaaaatcacaagcattcttatacaccaataacagacaaacagagagccaaatcatgagtgaactcccattcacaattgcttcaaagagaataaaatacctaggaatccaacttacaagggatgtgaaggacctcgtaaaggagaactacaaaccactgctcaaggaaataaaagaggatacaaacaaatggaagaacattccatgctcatgggtaggaagaatcaatatcctgaaaatggccatactgcccaaggtaatttatagattcaatgccatccccatcaagctaccaatgactttcttcacagaattggaaaaaactactttaaagttcatatggaaccaaaaaagagcctgcattgccaagtcaatcctaagccaaaagaacaaagctggaggcatcacgctacctgacttcaagc

SEQ ID NO: 791 - DNA, 432 bp, Homo sapiens
  SIMILAR (1)..(204): 981254mologous to Homo sapiens Human secreted protein, SEQ ID NO: 7284,accession number AAG03203,Smith-Waterman Score=350.
atgagtgaactcccattcacaattgcttcaaagagaataaaatacctaggaatccaacttacaagggatgtgaaggacctcttcaaggagaactacaaaccactgctcaaggaaataaaagaggatacaaacaaatggaagaacattccatgcccatgggtaggaagaatcaatatcgtgaaaatggccatactgcccaaggtggctaccattaccgtgctcactttacaggtgaggttcagagatttatgtaacatgccaaaggtcacacagctggacacagcagaaccaagattcaaatctgcacagctgagtgttctacatgtttatgtcgtatggcccctgaaagaattcgtatttgaagctctgggtaagtggttaggaaaggaccagctgcaggcaacaatgcgagtgtgccttatttcctcaact

SEQ ID NO: 792 - DNA, 452 bp, Homo sapiens
  SIMILAR (1)..(411): 971254mologous to Homo sapiens putative p150,accession number U93563,Smith-Waterman Score=708.
atgagtgaactcccattcacaattgcttcaaagagaataaaatacctaggaatccaacttacaagggatgtgaaggacctcttcaaggagaactacaaaccactgctcaaggaaataaaagaggatacaaagaaatggaagaacattccatgctcatgggtaggaagaatcaatatcgtgaaaatggccatactgcccaagataatttacagattcagtgccatccccatcaagctaccaatgactttcttcacagaattggaaaaaactactttaaagttcatatggaaccaaaaaagagcctgcatcgccaagtcaatcctaagccaaaagaacaaagctggaggcatcacactacctgacttcaaactataccacaaggctacagtaaccaaaacagcatggtactggtaggcattaccttttcaaaaaagattccttcatttaattag

SEQ ID NO: 793 - DNA, 1404 bp, Homo sapiens
  SIMILAR (460)..(1401): 911254mologous to Homo sapiens putative p150,accession number U93574,Smith-Waterman Score=1539.
atggggcaacatgacaagcagcagtacttggaggtgcaaagcaacaagataatagccatctggatttctgatgatcatgaagacatcatatctgaactggggtgtctgcatatccctgagaggcaaaaaatgtctatattgtttccgtccagcgcgacttccgggtgggcgcgggctcagcgcgacttccgggtgggcgcgggctcggcgcgccccgcactcttgagcggtcggctggcgccgccggccctgggcagtgagaggcttagcacccgggccagcagctgcggagggctcccgcgcgccaccccgaggggacgggcgccacctcctgctacgcggcacccggtcccgtcaaccgcccaacggctgaggagtgcggcagcgcgccagagactggcgggcagctccgcccgcggccgggatgcactaggcaaagccagctgggctcctgagtccgtgttggaagttctggccagggcagtcaggcaagagaaagaaataaagggcattctattaggaaaagaggaagtcaaattgtccctgtttgcaggtgatatgattgtatatttagaaaaccccatcatctcagcccaaaatctccttaacaaaatcaatgtacaaaaatcacaagcattcttatacaccagcaacagacaaacagagagccaaatcctgagtgaactcccattcacaattgcttcaaagagaataaaatacctaggaatccaacttacaagggatgtgaaggacctcttcaaggagaactacaaaccactgctcaaggaaataaaagaggatacaaacaaatggaagaacattccatgctcatgggtaggaagaatcaatatcgtgaaaatggccatactgcccaaggtaatttacagattcaatgccatccccatcaagctaccaatgcctttcttcacagaattggaaaaaactactttaaagttcatacggaaccaaaaaagagcccgcatcgccaagtcaatcctaatccaaaagaacaaagctggaggcatcacactacctgacttcaaactatactacaaggctacagtaaccaaaacagcatggtactggtaccaaaacagagatatagatcaatggaacacaacagagccctcaaaaataatgccgcatatctacaactatctgatctttgacgaacctgagaaaaacaagcaatggggaaaggattccctatttaataaatggtactgggaaaactggctagccatatgtagaaagctgaaactggatcccttccttacaccttttacaaaaatcaattcaagatggattaaagacttaaatgttagacctaaaaccataaaaaccctagaagaaaacctaggcattaccattcaggacataggcatgggcaaggacttcatgtaa

SEQ ID NO: 794 - DNA, 510 bp, Homo sapiens
  SIMILAR (458)..(487): 801254mologous to Homo sapiens Human secreted protein encoded by gene 3 clone HNHCT15,accession number AAB38012,Smith-Waterman Score=49.
atgttggaagttctggcctgggcagttaggcaggagaaggaaataaagggtattcaactaggaaaagaggaagtcaaattgtccctgtagctgatgagcaacttcagcaaagtctcaggttacaaaatcagtgtgcaaaaatcacatgcatttgtatacaccaataacagacaatcagagagccaaatcatgagtgaactcccattcacagttgctacaaagagaataaaatacctaggaatccaacttacaagggatgtgaaggacctctttaaggaaaactacaaaccactgctcaacgaaatacaagaggacacaaacaaatggaagaacattccatgctcatgggtaggaagaatcaatatcgtgaaaatggccatactgcccaaggtaatttatagattcaatgccatccccatcaagctaccaatgactttcttcacagaattggaaaaaactaaagttcatatggaatcaaaaaaagagcccatattgccaagacaatcctaa

SEQ ID NO: 795 - DNA, 409 bp, Homo sapiens
  SIMILAR (409)..(302): 1001254mologous to Homo sapiens Unknown (protein for IMAGE:3343149),accession number BC000628,Smith-Waterman Score=175.
caatgtgacttctatggcaagagcttcttgctcgtcaaccttcttcttcaatcccagccattccgttcccaccctttccctttttcaaaacggctcttcaactgtgggggctccaacctgccagtggctttctaacactccttgtgccatctttcaggagaggaaaggcagtggaacagctactccacagctggcaatgactgtttttatagaagacatgatttgtggtgagcgtcaccagcccctgattgcagagaacacaaaaaaggtgaagaggctcaagtgggaattcagactcacctatatacacattttcggtttgatttcctttcttaaccaccaactttagttgtaaaaatatacttcccactttctccaattcgctgctcccagatgtcactccaaattt

SEQ ID NO: 796 - DNA, 2055 bp, Homo sapiens
  SIMILAR (1)..(867): 961254mologous to Homo sapiens putative p150,accession number U93564,Smith-Waterman Score=1413.
atgattatctcaataggtgcagaaaaagcctttgacaaagttcaacaacccttcatgctaaaaactctcaataaattaggtattgatgggacgtatttcaaaataataagagctatctatgacaaacccacagccaatatcatactgaatgggcaaaaactggaagcattccctttgaaaactggcacaagacagggatgccctctctcaccactcctattcaacatagtgttggaagttctggccagggcaatcaggcaggagaaggaaataaagggtattcaattaggaaaagaggaagtcaaattgtccctgtttgcagacgacatgattgtttatctagaaaaccccatcgtctcagcccaaaatctccttaagctgataagcaacttcagcaaagtctcaggatacaaaatcaatgtacaaaaatcacaagcattcctatacaccaacaacagacaaacagagagccaaatcatgagtgaactcccattcacaattgcttcaaagagaataaaatacctaggaatccaacttacaagggatgtgaaggacctcttcaaggagaactacaaaccactgctcaaggaaataaaagaggatacaaacaaatggaagaacattccatgctcatgggtaggaagaatcaatatcgtgaaaatggccatactgcccaaggtaatttacagattcaatgccatccccatcaagctaccaatgactttcttcacagaattggaaaaaactactttaaagttcatatggaaccaaaaaagagcccgcatcgccaagtcaatcctaagccaaaagagcaaagctggaggcatcacactacctgacttcaaacttgcagacaacatgactgtatatctggaaaaccccatcgtctcagcccaaaatctccttaagctgataagcaacttcagcaaagtctcaggatacaaagtcagtggacaaaaatcacaagcattattatacaccaataacagacaaacagagagccaaatcatgagtgaactcccattcacaattgcttcaaagagaataaaatacctaggaatccaccttacaagggatgtgaaggacctcttcaaggagaactacaaaccactgctcaaggaaataaaaaaggatacaaacaaatggaagaacattccatgctcatgggtaggaagaatcaatatcgtgaaaatggccatactgcccaaggacatcatccaggagaacttccccaatctagcaaggcaggccaacattcagattcaggaaatacggaaaacaccacaaagatattcctcgagaagagcaactccaagacacataattgtcagattcaccaaagttgaaatgaaggaaaaaatgttaagggccgccagagagaaagcatcacaccacacctattccaaaattgaccccatacttggaagtaaacctctcctcagcaaatgtaaaagaacagaaattataacaaactatctctcagaccacagtgcaatcaaactagaattcaggattaagaatctcactcaaaactgctcaactacgtggaaaccaaacaacctgctcctgaacgactactgggtacataacgaaatgaaggcagaaataaagatgttctttgaaaccaacgagaacaaagacacaacataccagaatctctgggacacattcaaagcagtgtgtagagggaaatttatagcaacaaatgcccataagaggaagcaggaaagatccaaagttgacaccctaacatcacagttaaaagaactagaaaagcaagagcaaacacattcaaaagctagcagaaggcaagaaataactaaaatcagagcagaactgaaggaaatagagacacagaaaacccttcaaaaaattaatgaatccaggagctggttttttgaaaggatcaacaaacttgacagacctctagcaagactagtaaagaaaaaaagagagaagaatcaaatagatgcaataaaaaatgataaaggggatatcaccaccaatcccacagaaatacaaactaccatcagagattattacaaacacctctag

SEQ ID NO: 797 - DNA, 762 bp, Homo sapiens
  SIMILAR (313)..(711): 881254mologous to Homo sapiens Human secreted protein encoded by gene 3 clone HNHCT15,accession number AAB38012,Smith-Waterman Score=608.
atgaacattgatgcaaaaatcctcaataaaatactggcaaaacaaatccagcagcacatcaaaaagcttatccaccatgatcaagtgggcttcatccctgggatgcaaggctggttcaatatacgcaaatcaataaatgtaatccagcatataaacagaaccgaagacaaaaaccacatgattatctcaatagatgcagaaaaggcctttgataaaattcaacaacccttcatgctaaaacctctcaataaattaggtatcgatgggacgtatttcaaaataattagagctatctatgacaaatccacacccaatatcatactgaatgggcaaaaactggagctgatgagcaacttcagcaaagtctcaggttacaaaatcagtgtgcaaaaatcacatgcatttgtatacaccaataacagacaatcagagagccaaatcatgagtgaactcccattcacagttgctacaaagagaataaaatacctaggaatccaacttacaagggatgtgaaggacctctttaaggaaaactacaaaccactgctcaacgaaatacaagaggacacaaacaaatggaagaacattccatgctcatgggtaggaagaatcaatatcgtgaaaatggccatactgcccaaggtaatttatagattcaatgccatccccatcaagctaccaatgactttcttcacagaattggaaaaaactaaagttcatatggaatcaaaaaaagagcccatattgccaagacaatcctaa

SEQ ID NO: 798 - DNA, 1150 bp, Homo sapiens
  SIMILAR (283)..(1023): 961254mologous to Homo sapiens putative p150,accession number U93564,Smith-Waterman Score=1208.
gccactgccacctcacttccaacaagctcagagaacttctctggagaagccttatgttctctgaaacctttacctaaacagcttcccaagagactcatcaggaaagttcagcatgaaaatggccaagagctctctaaagtcctcagaccctaccctatcattggtgtaagggtctggggtaaaggcttgagaaatccacaagattttgccaatctgaattcaacaaactgtctatatggctacaccttccaacagaaacccagaaatgcccctttcccttggaagcatataaacagagccaaagacaaaaaccacatgattatctcaatagatgcagaaaaagcctttgacaaaattcaacaacccttcatgctaaaaactctcaataaattaggtattgatgggacgtatttcaaaataataagagctatctatgacaaacccacagccaatatcatactgaatgggcaaaaactggaagcattccctttgaaaactggcacaagacagggatgccttctctcaccactcctattcaacatagtgttggaagttctggccagggcaattagacaggagaaggaaataaagggtattcacttaggaaaagaggaagtcaaattgtccctgtttgcagacgacatgattgtatatctagaaaaccccatcatctcagcccaaaatctccttaagctgataagcaacttcagcaaagtctcaggatacaaaatcaatgtacaaaaatcacaagcattcttatacaccaacgacagacaaacagagagccaaatcatgagtgaactcccattcacaattgcttcaaagagaataaaatacctaggaatccaagttacaagggatgtgaagcacctcttcaaggagaactacaaaccactgctcaaggaaataaaagaggatacaaacaaatggaagaacattccatgctcatgggtaggaagaatcaatatcatgaaaatggccatactgcccaaggtaatttacggattcaatgccatccccatctcatttaattggtatggagtacagccagggcactaacattgttaaaagctcccctgatgattctaagatgtttgctgttacagcattaaggacgtgggcagcagctgtcaatcctggcacactatga

SEQ ID NO: 799 - DNA, 1383 bp, Homo sapiens
  SIMILAR (484)..(1188): 721254mologous to Homo sapiens putative p150,accession number U93563,Smith-Waterman Score=847.
atgggagactttaacaccccactatcaacattagacagatcaacgagacagaaagtcaacaaggatacccaggaattgaactcagctctgcaccaagcggacctaatagacatctacagaactctccaccccaaatcaacagaatatacatttttttcagcaccacaccacacctattccaaaattgaccacatagttggaagtaaagctctcctcagcaaatgtaaaagaacagaaattataacaaactatctctcagaccacagtgcaatcaaactagaactcaggattaagaatctcactcaaaaccgctcaactacgtggaaactgaacaacctgctcctgaatgactactgggtacataacgaaatgaaggcagaaataaagatgttctttgaaaccaacgagaacaaagacacaacataccagaatctctgggacgcattcaaagcaataattgaatctctgatattccataacagagctgaaattgtggcaataatcgatagtttaccaaccaaaaagagtccaggaccagatggattcacagctgacttctaccagaggtacaaggaggaactggtaccattccttctgaaactattccaatcaatagaaaaagagggaatcctccctaactcattttatgaggccagcatcattctgataccaaagccgggcagagacacaaccaaaaaagagaattttagaccaatatccttgataaacattgatgcaaaaatcctcaataaaatactggcaaaacgaatccagcagcacatcaaaaagcttatccaccatgatcaagtgggcttcatccctgggatgcaaggctggttcaatatacgcaaatcaataaatgtaatccagcatataaacagagccaaagacaaaaaccacatgattatctcaatagatgcagaaaaagcctttgacaaaattcaacaacccttcatgctaaaaactctcaataaattagcccaaaatctccttaagctgataagcaacttcagcaaagtctcaggatacaaaatcaatgtacaaaattcacaagcattcttatacaccaacaacagacaaacagagagccaaatcatgagtgaactcccattcacaattgcttcaaagaaaataaaatacctaggaatccaacttacaagggatgtgaaggacctcttcaaggagaactacaaaccactgctcaaggaaataaaagaggatacaaacaaatggaagaacattccatgctcatgggtaggaagaatcaatatcgtgaaaatggccatactgcccaaggctatgctgtgtctggatgtggcctatcccacagatgacacaaggtggtacaaactttatacccagaaatggacccactttagctag

SEQ ID NO: 800 - DNA, 937 bp, Homo sapiens
  SIMILAR (1)..(861): 951254mologous to Homo sapiens putative p150,accession number U93572,Smith-Waterman Score=1395.
atggatacattcctcaacacatacactctcccaagactaaaccaggaagaagttgaatctctgaatagaccaataacaggatctgaaattgtggcaataatcaatagcttaccaagcaaaaagagtccaggaccagatggattcacagccaaattctaccagaggtacaaggaggaactggtaccattccttctgaaactattccaatcaatagaaaaagagggaatcctccctaactcattttatgagggcagcatcattttgataccaaagccaggcagagacccaccaaaaaaagagaattttagaccaacatccttgatgaacattgatgctaaaatcctcaataaaattctggcaacccgaatccagcaacacatcaaaaagcttatccaccatgatcaagtgggcatcatccctgggatgcaaggctggttcaatatacccaaatcaataaatgtaatccagcatataaacagagccaaagacaaaaaccacatgattatctcaatagatgcagaaaaggcctttgacaaaattcaacaacccttcatgctaaaaacactcaataaattaggtattgatgggacgtatttcaaaataataagagctatttatgacaaacccacagccaatatcatactgaatgggcaaaaactggaagcattccctttgaaaactggcacaagacagggatgccctctctcaccactcctattcaacatagtggtggaagttctggccagggcaattaggcaggagaagaaaataaagggtattcaattaagaaaagaggaagtcaaattgtccctgtttgcagacgacatgattgtatatctagaaaaccccattgtctcagcctgaagactgtgtggtgataagatcacagcgcaagtgccatgttcctcttgacatctctctaaagagacatgtgtag

SEQ ID NO: 801 - DNA, 1554 bp, Homo sapiens
  SIMILAR (283)..(1065): 911254mologous to Homo sapiens putative p150,accession number U93574,Smith-Waterman Score=1211.
gccactgccacctcacttccaacaagctcagagaacttctctggagaagccttatgttctctgaaacctttacctaaacagcttcccaagagactcatcaggaaagttcagcatgaaaatggccaagagctctctaaagtcctcagaccctaccctatcattggtgtaagggtctggggtaaaggcttgagaaatccacaagattttgccaatctgaattcaacaaactgtctatatggctacaccttccaacagaaacccagaaatgcccctttcccttggaagcatataaacagagccaaagacaaaaaccacatgattatctcaatagatgcagaaaaagcctttgacaaaattcaacaacccttcatgctaaaaactctcaataaattaggtattgatgggacgtatttcaaaataataagagctatctatgacaaacccacagccaatatcatactgaatgggcaaaaactggaagcattccctttgaaaactggcacaagacagggatgccttctctcaccactcctattcaacatagtgttggaagttctggccagggcaattagacaggagaaggaaataaagggtattcacttaggaaaagaggaagtcaaattgtccctgtttgcagacgacatgattgtatatctagaaaaccccatcatctcagcccaaaatctccttaagctgataagcaacttcagcaaagtctcaggatacaaaatcaatgtacaaaaatcacaagcattcttatacaccaacgacagacaaacagagagccaaatcatgagtgaactcccattcacaattgcttcaaagagaataaaatacctaggaatccaagttacaagggatgtgaagcacctcttcaaggagaactacaaaccactgctcaaggaaataaaagaggatacaaacaaatggaagaacattccatgctcatgggtaggaagaatcaatatcatgaaaatggccatactgcccaaggtaatttacggattcaatgccatccccatccaaaatctccttaagctgataagcaacttcagcaaagtctcaggatacaaaatcaatgtacaaaaatcacaagcatttttatacaccaacaacagacaaacagagagccaaatcatgagtgaactcccattcacaattgcttcaaagagaataaaatacctaggaatccaccttacaagggatgtgaaggacctcttcaaggagaactacaaaccactgctcaaggaaataaaagaggatacaaacaaatggaagaacattccatgctcatgggtaggaagaatcaatattgtgaaaatggccatactgcccaaggtaatttacagattcaatgccatccccatcaagctaacaatgactttcttcacagaattggaaaaatctactttaaagttcatatggaaccaaaaaggagcccgcatcgccaagtcaatcctaagccaaaagaacaaagctggaggcatcacactacctgacttcaaactatactacaaggctacagtaaccaaaacagcatggtactggtactaa

SEQ ID NO: 802 - DNA, 3545 bp, Homo sapiens
  SIMILAR (2403)..(2570): 1001254mologous to Homo sapiens putative p150,accession number U93572,Smith-Waterman Score=298.
atggatacattcctcaacacatacactctcccaagactaaaccaggaagaagttgaatctctgaatagaccaataacaggatctgaaattgtggcaataatcaatagcttaccaagcaaaaagagtccaggaccagatggattcacagccaaattctaccagaggtacaaggaggaactggtaccattccttctgaaactattccaatcaatagaaaaagagggaatcctccctaactcattttatgagggcagcatcattttgataccaaagccaggcagagacccaccaaaaaaagagaattttagaccaacatccttgatgaacattgatgctaaaatcctcaataaaattctggcaacccgaatccagcaacacatcaaaaagcttatccaccatgatcaagtgggcatcatccctgggatgcaaggctggttcaatatacccaaatcaataaatgtaatccagcatataaacagagccaaagacaaaaaccacatgattatctcaatagatgcagaaaaggcctttgacaaaattcaacaacccttcatgctaaaaacactcaataaattaggtattgatgggacgtatttcaaaataataagagctatttatgacaaacccacagccaatatcatactgaatgggcaaaaactggaagcattccctttgaaaactggcacaagacagggatgccctctctcaccactcctattcaacatagtggtggaagttctggccagggcaattaggcaggagaagaaaataaagggtattcaattaagaaaagaggaagtcaaattgtccctgtttgcagacgacatgattgtatatctagaaaaccccattgtctcagcgccagctgcttttctgcaaagtctgtggagcagtactatggctggaacattggaaaaaggagagccgctgagtggcaaagagcaatgacaatgcgaaaagtcttacaagaaatcctggagaagaatccgagatttcaccacctgactcccctcaaaaccaagcacatcgctcactggtgccgctgtcatggctacaccccaccggaccctgagagcctgaggaatgacggggactccatcgaggacgtgctgacccagatcgacagcgagcccgaccatgggtctcttggagacggaaagtcctcttccgttggccccacagctgttgtaacactgcttgcctgtcatttagagtgcccatcatcattctcctctgctgacaacctctgccgcaaactggaggacctgcaacagttccagaaaagggaacccgagaatgaggaggaggtggacatcctcagcctctccgagccagtgaagataaacatcaagaaggagcaggaagagaaacaagaggaagtcaagttctacctgccaccaaccccagggtctgaatttattggggatgtcacacagaagggaggtatgcttgtttggagagaggctgtttctaaagcagcgatacgaacaaacggctttcttctgcttttccagattgggatcaccctgcagcccgtggcactccacaggaacgtgtatgcgtccgtggtggaggacatgatcctgaaggctacagaacagctggtgaatgatatcctgagacaggctttggcagttggataccagacagcttctcacaacaggtattactatctctgcagtctgtggtgtgaggcttacacctctttcctaacagttgaattgcccatgaaggtgttttatacttacatcaatccagtaggagatggaggatcaaagacatgtgatacaatggtttttaatcatcctgctatcaagaaatttttggaatcaccatctaggtcatcatctcctgccaatcagagagcagaaacaccatcagccaatcattcagaaagtgattctttatctcagcacaatgacttcttatctgacaaagataataacagcaatatggatatagaggaaagactctcaaacaacatggagcagagaccaagccgaaatactggaagggatacttctagaattactggctcccataaaacagaacagcggaatgctgatctcacagatgagacttcacgactttttgtaaagaaaacaatagtagtgggcaatgtgtccaagtatatacctccggataagagggaagaaaatgaccagtcaactcataagtggatggtatatgtccgagggtcccgtagagaacccagcattaatcattttgtcaagaaggtttggttcttccttcatcctagctataaaccaaatgaccttgtggaagttaggtacaagatagtggtgactagatatgtgctaggctcagggcgtgataaagggactgtgaagatgagcacggggccttggctttgggaaaccaaaaaggtcttcctgcccttgagaataaaatacctaggaatccaacttacaagggatgtgaaggacctcttcaaggagaactacaaaccactgctcaaggaaataaaagaggatacaaacaaatggaagaacattccatgctcatgggtaggaagaatcaatatcgtgaaaatggccatactgcccaagactgagaggggtgaggaagcttcagaggaaaagtatgaagctagcagatgttggttcgtgaggtttaaggaaggatgccgtctccataacatacagttgcaaggtgaagcagcaagtgctgatggagaagctgcagcaagttatccagaagatccagctaagatcattgatgaaggtggctacaccaaacaacatattttcactgtatatgttgtcggtggctatgatgggcaaaacagacttagcagcgtagaatgttatgattccttttcaaatcgatggactgaagttgctccccttaaggaagccgtgagttctcctgcagtgactagctgtgtaggcaaactgtttgtgattggtggaggacctgatgataatacttgttctgataaggttcaatcttatgatccagaaaccaattcttggctacttcgtgcagctatcccaattgccaaaaggtgtataacagctgtatccctaaacaacctgatctatgttgccggtggactgaccaaggcaatatactgttacgatccagttgaagattactggatgcacgtacagaatacattcagccgtcagagaggagagcttggtgtttttgtggtgccaagtgcaggattcccagctagcactgaagctgaacgacacactccgttttatgctttgccatcttcattggaaagaacacccaccaaaatgactacatcccagaaagttaccttttgttcccatggcaattcagctttccagccaatagcatcaagctgcaaaattgttccacaaagtcaggttcctaatcctgagtcacctggaaaatccttccagcccatcaccatgagctgcaagattgtgtcagttcttctaagcagtgttatgtttaacaaaaggaagtttatcactgttgattggcaaagctgtcacaaggcaaaaacaaagctcattcatacggaaatgaatggaggagataaatga

SEQ ID NO: 803 - DNA, 889 bp, Homo sapiens
  SIMILAR (182)..(886): 881254mologous to Homo sapiens putative p150,accession number U93574,Smith-Waterman Score=1128.
atgtgggaactgccagctgctgaagccatagcagtcccctgttcactctcgctaatacctgtccctaaaaatccatacacactattggagaaacagcaccttatagtggacagtgattcagagcatattcagccatgtagagaatcttgcccatgcctcctgaggtactgccacctagctgcttaaaagggatgtgaaggacctcttcaaggagaactacataccactgctcaacgaaataaaagaggatacaaacaaatggaagaacattccatgctcatgggtaggaagaatcaatatcgtgaaaatggccatactgcccaaggtaatttatagattcaatgccatctccatcaagctaccaatgactttcttcacagaattggaaaaaactactttaaagttcacatggaaccaaaaaagagcccacattgccaagacaatcctaagccaaaagaacaaagctggaggcatcatgctacctgacttcaaactatactacaaggctacagtaacccaaacagcatggtactggtaccaaaacagagatatagaccaatggaacagaacagagccctcagaaataataccacacatctacaaccatctgatttttgacaaacctgacaaaaacaagaaatggggaaaggattccctatttaataaatggtgctgggaaaactggctagccatatgtagaaagttgaaactgaatcccttccttacaccttatacaaaaattaattcaagaaggattaaagacttaaatgttagacctaaaaccataaaaaccctagaagaaaacctaggcaataccattcaggacataggcatgggcaaggacttcatgtcattactaaatgacatgtcatttaccgaatgtaaatga

SEQ ID NO: 804 - DNA, 1077 bp, Homo sapiens
  SIMILAR (112)..(492): 911254mologous to Homo sapiens Human secreted protein encoded by gene 3 clone HNHCT15,accession number AAB38012,Smith-Waterman Score=643.
atggataaattcctggacacatacactctcccgagactaaaccaggaagaagttgaatctctgaataggccaataacaggagctgaaattgtggcaataatcaatagcttatggaacagaacagagccctcaaaaataatgccacatatctacaactatctgatctttgacaaacctgacaaaaacaggaaatggggaaaggattcgctatttaataaatggtgctgggaaaactggctagccatatatagaaagctgaaactggatcccttccttacaccttatacaaaaattaattcaagatggattaaagacttaaatattagatctaaaaccataaaaaccctagaagaaaacctaggcaatactattcaggacataggcatggggaaggacttcatgtctaaaacaccaaaaccaatggcaacaaaagccaaaattgacaaatgggatctaattaaactaaagagcttctgcacagcaaaagaaactcacagctcatggaggcctgcctgcctctgtaggctccacctctgggggcagcgcacaggcaaacaaaaggacagcagtaacctctgcagacttaaatgtccctgtctgacagctttgaagagagcagtggttctcccagcatgcagctggagatctgagaaggggcagactgcctcctcaaaacaaagctggacggagaatgactttgacgagctgagagaagaaggcttcagacgatcaaattactccgagctacgggaggacattcaaaccaaaggcaaagaagttgaaaactttgaaaaaaatttagaagaatgtataactagaataaccaatacagagaagtgcttaaaggagctgatggagctgaaaaccaaggctcgagaactacgtgaagaatgcagaagcctcaggagccgatgcgatgaattggaagaaagggtatcagcgatggaagatgaaatgaatgaaatgaagcgagaagggaagtttagagaaaaaagaataaaaagaaacgagcaaagcctccaagaaatatgggactatgtgaaaagaccaaatctacgtctgattggtgtaccttaa

SEQ ID NO: 805 - DNA, 1170 bp, Homo sapiens
  SIMILAR (1)..(600): 971254mologous to Homo sapiens putative p150,accession number U93563,Smith-Waterman Score=986.
atggatacattcctcgacacatacactctccaaagactaaaccaggaagaagttgaatctctgaatagaccaataacaggctctgaaattgtggcaataatcaatagtttaccaaccaaaaagagtccaggaccagatggattcacagccgaattctaccagaggtacatggaggaactggtaccattccttctaaaactattccaatcaatagaaaaagaggggatcctccctaactcattttatgaggccagcatcattctgataccaaagctgggcagagacacaaccaaaaaagagaattttagaccaatatccttgatgaacattgatgcaaaaatcctcaataaaatactggcaaagcgaatccagcagcacatcaaaaagcttatccaccatgatcaagtgggcttcatccctgggatgcaaggctggttcaatatatgcaaatcaataaatgtaatccagcatataaacagagccaaagacaaaaaccacatgattatctcaatagatgcagaaaaagcctttgacaaaattcaacaacgcttcatgctaaaaactctcaataaattaggtattgatgggacgtatttcaaatggaagaacattccatgctcatggataggaagaatcaatattgtgaaaatggccatactgcacaaagcactttatagattcaatgccatccccatcaagctaccaatgactttcttcacagaattggaaaaaactactttaaagttcatatggaaccaaaaaagagcctgcattgccaagtcaatcctaagccaaaagaacaaagctggaggcatcacgctacctgacttcaaactacactacaaggctacagtaaccaaaacagcatgggggccctatgatagagcattgactttggaatcagacagacctgatgtgtgctgtgctaccttccaggtatgtgaccctgcaagactcttcaattctatgaaagatgagataagtgaagaagctacagaagaaaagtttgcagctggcagacttggttcagggtttaaggaaagatgtctccataacataaaagggcaaggagaagctacaagagctggtatagaagctgaagcaagttttacagaagatctagctaagataactgatgaacgtggcacactaaacagattttcaatttag

SEQ ID NO: 806 - DNA, 1990 bp, Homo sapiens
  SIMILAR (1765)..(1496): 441254mologous to Homo sapiens dJ1085F17.3 (A novel protein),accession number AL035071,Smith-Waterman Score=133.
acacaaagcatttcacatgttatgctttttcctgtggcttttaacctgagtttccccggaattgctcttacaaattccaactttggaacagacccaatttcactggagacccaggatcgtcacaaaaccaggaagataatttttaaagacaagagcaagcactagctctctgcaaggtacacgactctttaatccatgcagaaagacaactggatccagaccttttcttcagaacctttttattcatcatctaaccaacagaggtggttggctcgaactcaaactaaaatggcctcaaaaggcccacctcgttacgacatgacagggcaaaaccagaagtagggacagagtttagcctcagttctctgcagagaagaccaaagcaggtatttacacacaaggtgcctcatttaaaaactgaattggcattgttccacccagccacagcacccagagtgtgcaaaaatccgtgggggctctgtatatgtgtcatttcagacaatcccgccgatccctcagccataaaccaagctcttgctttttggggagggaggggtgatcagcatggttatcttgaaatggatggcacccatttgtttacttctgggaacttttgaagggggagggtgacaactttattttctccccctgaaatctgaagatgcagtggccttgtcaagagtatctaaaaatgtggtccctggaagaacaggtgggtgggtggttgcccctaacagagagttttaccaggggtaatttgtgttgggcttcttttcagtactttaatcctgctgttttttcagaaaccctttgcacctggggccccatggagccagcagggccccatggagcattcccacaggcctgtgagtgaagtgcctctcagagcagtcaacccagggaagggaggagggcagggaacggggccaggggagatgcagggacaagaaatcagcagaaacacctccatgctggttctgactcgctccatctcgtgcaggaagctgtagaactgaggcaaggttaattctatatacacattttcggtttgatttcctttcttaaccaccaactttagttgtaaaaaatcataacttccccaactttctaccaaattcgctgctccccagatgtccactcccaaatttcccactcccatatcctatgagctggttaatcatccagagtcgtggccctatggcccagcgagcaagggcggaaagcagtatgcttacacttatcaggaaagtaagtggctgtatcctcactaagacacagagttatgaaatccgcctggacctgcttggctgtgagactcttcttcaaagcaccatttggaaccagaaggaggcttttcacgatgcttctgagggagccaagactgatctgattggtggtggcaaattcagagagctgagccagaaatctttccacctcttttggctcagttaggaagtggaaaagcacctctgtcagggctgagaactgctgcgcgcccagcataattaagctgctgcatgtcgccgcccacggcctccggcaccgggtcctcagtgcagtgcaggcgggcccatggcgcgcgccccagccccgcaggttccaccgccgccgccgccctgctcagcttcctcctccgctgccgctgccaccgctgccggcctctccgcgcatccacaaccgcactttcgccacggccgtcgcagcgcgctcctcccccggccgccctgggctgtccggagccggggagccctcgcagggccgcggacacgcgcggccgccgggctccggggaggggcaggggcggcgccggcaccggcagacgcgaggtttcctgccagctctcccgctgagtgaccaaagtttcctcaaaatagtgcgagggctttgaccggtttccctcgatgcacagatcccacagtgtcatcaccaggatattgacattgatacagtcaagacgcagaacatttccatggcagcaacgatctcccat

SEQ ID NO: 807 - DNA, 1401 bp, Homo sapiens
  SIMILAR (1313)..(1399): 861254mologous to Homo sapiens putative p150,accession number U93565,Smith-Waterman Score=139.
atgagtgaactcccattcacaattgcttcaaagagaataaaatacctaggaatccaacttacaagggatgtgaaggacctcttcaaggagaactacaaaccactgctcaaggaaataaaagaggatacaaacaaatggaagaacattccatgctcatgggtaggaagaatcaatatcgtgaaaatggccataatgcccaaggtaatttacagattcaatgccatccccatcaagctaccaatgcctttcttcacagaattggaaaaaactactttaaagttcatatggaaccaaaaaagagcccgcatcgccaaggcaatcctaagccaaaagaacaaagctggaggcatcacactacctgacttcaaactatactacaaggctacagtaaccaaaacagcatggtactggtaccaaaacagagatatagatcaatggaacagaacagagccctcaaaaataacgccgcatatctacaactatctgatctttgacagacctgagaaaaacaagcaatggggaaaggattccctatttaataaatggtgctgggaaaactggctagccatatgtagaaagctgaaactggatcccttccttacaccttatacaaaaattaattcaagatggattaaagacttaaatgttagatctaaaaccataaaaaccctagaagaaaacctaggcaataccattcaggacacaggcatgggcaaggacttcatgtccaaaacaccaacagcaatggcaacaaaagacaaaattgacaaatgggatctaattaaactaaagagcttctgcacagcaaaagaaactaccatcagagtgaacaggcaacctacaaaatgggagaaaatttttgcaacctactcatctgacaaagggctaatatccagaatctacaatgaactccaacaaatttacaagaaaaaaacaaacaaccccatcaaaaagtgggcgagggacatgaacagacacttctcaaaagaagacatttatgcagccaaaaaacacatgaaaaaatgctcattatcactggccatcagagaaatgcaaatcaaaaccacaatgagataccatctcacaccagttagaatggcaatcattaagaagtcaggaaacaacaggtgctggagaggatgtggagaaataggaacacttttacactgttgctgggactgtaaactagttcaaccattgtggaagtcagtgtggcgattcctcagggatctagaactagaaataccatttgacccagccatcccattactgggtgtatacccaaaggactataaatcttgctgctataaagacacatgcacacatgtttattgtggcattattcacaatagcaaagacttggaaccaacccaaatgtccaacaatgatagactggattaa

SEQ ID NO: 808 - DNA, 1413 bp, Homo sapiens
  SIMILAR (1)..(1137): 961254mologous to Homo sapiens putative p150,accession number U93569,Smith-Waterman Score=1953.
atgagtgaactcccattcacaattgcttcaaagagaataaaatacctaggaatccaacttacaagggacgtgaaggacctcttcaaggagaactacaaaccactgctcaaggaaataaaagaggatacaaacaaatggaagaacattccatgctcatgggtaggaagaatcaatatcgtgaaaatggccatactgcccaaggtaatttacagattcaatgccatccccatcaagctaccaatgcctttcttcacagaattggaaaaaactactttaaagttcatatggaaccaaaaaagagcccgcattgccaagtcaatcctaagccaaaagaataaagctggaggcatcacactacctgacttcaaactatactacaaggctacagtaaccaaaacagcatggtattggtaccaaaacagagatatagatcaatggaacagaacagagccctcagaaataacgccgcatatctacaactatctgatctttgacaaacctgagaaaaacaagcaatggggaaaggattccctatttaataaatggtgctgggaaaactggctagccatatgtagaaagctgaaactggatcccttccttacaccttatacaaaaatcaattcaagatggattaaagacttaaacgttagacctaaaaccataaaaaccctagaagaaaacctaggcaataccattcaggacataggcatgggcaaggacttcatgtctaaaacaccaaaagcaatggcaacagaagacaaaattgacaaattggatctaattaaactaaagagcttctgtacagcaaaagaaactaccatcagagtgaacaggcaacctacaaaatgggagaaaatttttgcaacctactcatctgacaaagggctaatatccagaatctacaatgaactcaaagaaatttacaagaaaaaaacaaacaaccccatcaaaaagtgggcaaaggacatgaacagacacttctcaaaagaagacatttatgcagccaaaaaacacatgaaaaaatgctcatcatcactggccatcagagaaatgcaaatcaaaaccacaatgagataccatctcacaccagttagaatggcaatcattaaaaactcaggaaacaacagctgcctgagaaacacattcagatctgtgcccagcgactcggcagtcattgcacaaggcacaggaacacaccctcggggagacacacctagtcacaaagcaggggtcctggttgtggggatgtccttccctgaagagccggtcctacaagacagaagtgatgacttttctttagctcatggcagtaaacaggggaactctgtcctttgtgttggacagtggaagacacagggcccttgttccaggaacgagcagtatcggcccatcacaggccccggttcacactga

SEQ ID NO: 809 - DNA, 2249 bp, Homo sapiens
  SIMILAR (1626)..(1916): 961254mologous to Homo sapiens putative p150,accession number U93572,Smith-Waterman Score=489.
atggatacattcctcgacacatacactctcccaagactaaaccaggaagaagttgaatctctgaatagaccaataacaggctctgaaattgtggcaataatcaatagtttaccaaccaaaaagagtccaggaccagatgggttcacagctgaattctaccagaggtacaaggaggaactggtaccattccttctgaaactattccaatcaatagaaaaagagggaatcctccctaactcattttatgaggccagcatcattctgataccaaagccgggcagagacacaaccaaaaaagagaattttagaccaatatccttgatgaacattgacgcaaaaatcctcaataaaatactggcaaaccaaatccagcagcacatcaaaaagcttatccaccatgatcaagtgggcttcatccctgggatgcaaggctggttcaatatacgcaaatcaataaatgtaatccagcatataaacagagccaaagacaaaaaccacatgattatctcaatagatgcagaaaaagcctttgacaaaattcaacaacgcttcatgctaaaaactctcattaaattaggtattgatgggacgtatttcaaaataataagagctatctatgacaaacccacagccaatatcatactgaatgggcaaaaactggaagcattccctttgaaaactggcacaagacagggatgccctctctcaccgctcctattcaacatagtgttggaagttctggccagggcaatcaggcaggagaaggaaataaagggtattcaattaggaaaagaggaagtcaaattgtccctgtttgcagacaacatgattgtttatctagaaaaccccatcgtctcagcccaaaatctccttaagctgataagcaacttcagcaaagtctcaggatacaaaatcaatgtacaaaaatcacaagcattcttatacaccaacaacagacaaacagagagccaaatcatgagtgaactcccattcacaattgcttcaaagagaataaaatacctaggaatccaacttacaagggatgtgaaggacctcttcacatctgtgatatcgcaggtgtgggtagggagtctcgacacatcattgatactgcagttgtgggtagggagtctcgacatatctgtgatattgcagttgtgggtagggagtctcgacacatctgtgatatcgcagttgtgggtaagaagtctggacacatctgtgatatcgcagttgtgggacattgccttcctgagccatgtgcctggaatgctcagttagaagtcacaggtttccttggccacactcatgcaaaggatgagctcccatggacttgggcagctccaaccttgtggctctgcagggtacagctctcatggctgctttcacagactggcattgaatgcctgtggctcttccagtgcacagtgcaagctgctggtggatctacctttctggggtctggacggtggccttcttctcacagctgcacgaggccattccccaggggcactctgtgtgagggttccaaccccacatttcccctccatgctgccctagtagagcttctccatgagggctctgaccctgcagcagacttctgcctggaaatcccagctgataagaacttcagcaaagtctcaggatacaaaatcaatgtgcaaaaatcacaagcattcttatacaccaataacagacaaacagagagccaaatcatgagtgaactcccattcacagttgcttcaaagagaataaaatacctaggaatccaacttacaagggacgtgaaggacctcttcaaggagaactacaaaccactgctcaatgaaataaaagagggtacaaacaaatggaagaacattccatgctcatgggtaggaagaatcaatatcgtgaaaatggccatactgcccaagagaaccaaaagaggccacgaccggtttgaggtgtcgctcacgacctgcattcagcgtttacccccgattatgatgcctcggctggcatttatcttcggcctcatggcgaatggcaaccagtacgggtgccggttccggtggtcagcatgccctgggaactgggataatgggcggcatgatatcggccattattctggctatttacttcgtgccgctgttctttgtgctggtgcgcggccgcttcccgttgaagccgcccccggaataagcaataaaaaatgcgcacatggcaatgtgtcgcctttttcaactttccgattaagaacctgctaa

SEQ ID NO: 810 - DNA, 1575 bp, Homo sapiens
  SIMILAR (509)..(736): 751254mologous to Homo sapiens putative p150,accession number U93563,Smith-Waterman Score=283.
atgaacactgatgcaaaaatcctcaataaaatactggcaaaccgaatccagcagcacatcaaaaagcttatccaccatgatcaagtgggcttcatccctgggatgcaaggctggttcaatatacgcaaatcaataaatgtaatccagcatataaacagaaccaaagacaaaaaccacatgattgtctcaacagatgcagaaaagacctttgacaaaattcaacaacccttcatgctaaaaactctcaataaattaggtattgatgggacgtatctcaaaataataagagctatctatgacaaacccacagccaatatcatactgaatgggcaaaaactggaagcattccctctgaaaactggcacaagacagggatgccctctctcaccactccataaattcctcgacacatacactctcccaagactaaaccaggaagaagttgaatctctgagtagtccaataacaggatctgaaattgtggcaataatcagtagcttacgaacgaaaaagagtccaggaccagatggattcacagccgaattctaccagaggtataaggaggaactgaataaaatacctaggaatccaacttacaagggatgtgaaggacctcttcaaggagagctacaaaccactgctcaaggaaataaaagaggatacaaacaaatggaagaacattccatgctgatgggtaggaagaatcaatatcgtgaaaatggccatactgcccaagaattggaaaaaactactttaaagttcatatggaaccaaaaaagagcctgcatcgccaagtcaatcctaatccaaaagagcaaagctggaggcatcacactacctgacttcaaactatactacaaggctacagtaaccaaaacagcatggtactggtaccaaaacagagatatagatcaatggaacagcacagagccctcagaaataatgccgcatatctacaactatctgatctttgacaaacctgagaaaaacaagcaatggggaaaggattccctatttaataaatggtgctgggaaaactggctagccatatgtagaaagctgaaactggatcccttccttacaccttatacaaaaatcagttcaagatggattaaagacttaaacgttagacctaaaaccataaaaaccctagaagaaaacctaggcaataccattcaggacataggcatgggcaaggacttcatgtctaaaacaccaaaagcaatggcaacaaaagccaatattgacaaatgggatccaattaaactaaagagcttctgtacagcaaaagaaactaccatcagagtgaacaggcaacctacaaaatgggagaaaattttcgcaacctactcatctgacaaagggctaatatccagaatctacaatgaactcaaacaaatttacaagaaaaaaaacaaacaaccccatcaaaaaatgggcaaaggacatgaacagacactcctcaaaagaagacatttatgcagccaagaaacacatgaaaaagtgctcatcatcactggccatcagagaaatgcaaatcaaaaccacaatgagataccatctcacaccagttag

SEQ ID NO: 811 - DNA, 4083 bp, Homo sapiens
  SIMILAR (1502)..(1576): 361254mologous to Homo sapiens putative p150,accession number U93574,Smith-Waterman Score=46.
atgaaagttaaagtactgtccctcctggtcccagctctgctggtagcaggcgcagcaaacgctgctgaagtttacaacaaagacggcaacaaattagatctgtacggtaaagtagacggcctgcactatttctctgacaacaaagatgtagatggcgaccagacctacatgcgtcttggcttcaaaggtgaaactcaggttactgaccagctgaccggttacggccagtgggaatatcagatccagggcaacagcgctgaaaacgaaaacaactcctggacccgtgtggcattcgcaagtctgaaattccaggatgtgggttctttcgactacggtcgtaactacggcgttgtttatgacgtaacttcctggaccgacgtactgccagaattcggtggtgacacctacggttctgacaacttcatgcagcagcgtggtaacggcttcgcgacctaccgggacactgacgtgttcggtctggtaccgactcgattgcatccggcccgcgtgtgctgtgctctacgcgaactgaaagacgcaggcgcagatcgtatctggtacatcgccgatgcgttccgtgcgggcctgtctgtggacggcgtcttcaacctgaccaacattgaccgctggttcctgcatataaacagagccaaagacaaaaaccacatgattatctcaatagatgcagaaaaagcctttgacaaaattcaacaacccttcatgctaaaaactctcaataaattaggtattgatgggacgtatttcagaataataagagctatctatgacaaacccacagccaatatcatactgaatgggcaaaaactggaagcattccctttgaaaactggcacaagacagggatgccctctctcaccgctcctattcaacatagtgttggaagttctggccagggcaatcaggcaggagaaggaaataaagggtattcaattaggaaaagaggaagtcaaattgtccctgtttgcagacgacatgattgtttatctagaaaaccccatcgtctcagcccaaaatctccttaaactgataagcgacttcagcaaagtctcaggatacaaaatcaatgtacaaaaatcacaaacattcttatacaccaataacagacaaacagagagccaaatcatgagtgaactcccattcacaattgcttcaaggagaataaaatacctaggaatccaacttacaagggatgtgaaggacctcttcaaggagaactacaaacctctgctcaaggaaataaaagaggatacaaacaaatggaagaacattccatgctcatgggtaggaagaatcaatatcgtgaaaatggccatactgcccaaggtattttatagattcaatgccatccccatcaagctaccaatgactttcttcacagccagctgcttttctgcaaagtctgtggagcagtactatggctggaacattggaaaaaggagagccgctgagtggcaaagagcaatgacaatgcgaaaagtcttacaagaaatcctggagaagaatccgagatttcaccacctgactcccctcaaaaccaagcacatcgctcactggtgccgctgtcatggctacaccccaccggaccctgagagcctgaggaatgacggggactccatcgaggacgtgctgacccagatcgacagcgagcccgaccatgggtctcttggagacggaaagtcctcttccgttggccccacagctgttgtaacactgcttgcctgtcatttagagtgcccatcatcattctcctctgctgacaacctctgccgcaaactggaggacctgcaacagttccagaaaagggaacccgagaatgaggaggaggtggacatcctcagcctctccgagccagtgaagataaacatcaagaaggagcaggaagagaaacaagaggaagtcaagttctacctgccaccaaccccagggtctgaatttattggggatgtcacacagaagggaggtatgcttgtttggagagaggctgtttctaaagcagcgatacgaacaaacggctttcttctgcttttccagattgggatcaccctgcagcccgtggcactccacaggaacgtgtatgcgtccgtggtggaggacatgatcctgaaggctacagaacagctggtgaatgatatcctgagacaggctttggcagttggataccagacagcttctcacaacaggtattactatctctgcagtctgtggtgtgaggcttacacctctttcctaacagttgaattgcccatgaaggtgttttatacttacatcaatccagtaggagatggaggatcaaagacatgtgatacaatggtttttaatcatcctgctatcaagaaatttttggaatcaccatctaggtcatcatctcctgccaatcagagagcagaaacaccatcagccaatcattcagaaagtgattctttatctcagcacaatgacttcttatctgacaaagataataacagcaatatggatatagaggaaagactctcaaacaacatggagcagagaccaagccgaaatactggaagggatacttctagaattactggctcccataaaacagaacagcggaatgctgatctcacagatgagacttcacgactttttgtaaagaaaacaatagtagtgggcaatgtgtccaagtatatacctccggataagagggaagaaaatgaccagtcaactcataagtggatggtatatgtccgagggtcccgtagagaacccagcattaatcattttgtcaagaaggtttggttcttccttcatcctagctataaaccaaatgaccttgtggaagttaggtacaagatagtggtgactagatatgtgctaggctcagggcgtgataaagggactgtgaagatgagcacggggccttggctttgggaaaccaaaaaggtcttcctgcccttgagaataaaatacctaggaatccaacttacaagggatgtgaaggacctcttcaaggagaactacaaaccactgctcaaggaaataaaagaggatacaaacaaatggaagaacattccatgctcatgggtaggaagaatcaatatcgtgaaaatggccatactgcccaagactgagaggggtgaggaagcttcagaggaaaagtatgaagctagcagatgttggttcgtgaggtttaaggaaggatgccgtctccataacatacagttgcaaggtgaagcagcaagtgctgatggagaagctgcagcaagttatccagaagatccagctaagatcattgatgaaggtggctacaccaaacaacatattttcactgtatatgttgtcggtggctatgatgggcaaaacagacttagcagcgtagaatgttatgattccttttcaaatcgatggactgaagttgctccccttaaggaagccgtgagttctcctgcagtgactagctgtgtaggcaaactgtttgtgattggtggaggacctgatgataatacttgttctgataaggttcaatcttatgatccagaaaccaattcttggctacttcgtgcagctatcccaattgccaaaaggtgtataacagctgtatccctaaacaacctgatctatgttgccggtggactgaccaaggcaatatactgttacgatccagttgaagattactggatgcacgtacagaatacattcagccgtcagagaggagagcttggtgtttttgtggtgccaagtgcaggattcccagctagcactgaagctgaacgacacactccgttttatgctttgccatcttcattggaaagaacacccaccaaaatgactacatcccagaaagttaccttttgttcccatggcaattcagctttccagccaatagcatcaagctgcaaaattgttccacaaagtcaggttcctaatcctgagtcacctggaaaatccttccagcccatcaccatgagctgcaagattgtgtcagttcttctaagcagtgttatgtttaacaaaaggaagtttatcactgttgattggcaaagctgtcacaaggcaaaaacaaagctcattcatacggaaatgaatggaggagataaatga

SEQ ID NO: 812 - DNA, 3957 bp, Homo sapiens
  SIMILAR (1)..(1176): 931254mologous to Homo sapiens putative p150,accession number U93572,Smith-Waterman Score=1863.
atggataaattcctcgacacatacaccctcccaagactaaaccaggaagaagttgaatctctgaatagatcaataacaggctctgaaattgtagcaataatcaatagcttaccaaccaaaaaaagtccaggaccagatggattcacagccgaattctaccagaggtacaaggaggagctggtactattacttctgaaactattccagtcaatagaaaaagaagcaaccctccctaactcattttatgaggccagcatcatcctgataccaaagcctggcagagacacaacaaaaaaagagaattttagaccaatatccttgatgaacattgatgcaaaaatcctcagtaaaatactggcaaaccaaatccagcagcacatcaaaaagtttgtccaccatgatgaagtgggcttcatccccaggatgcaaggctggttcaatatacacaaatcaaaaaacgtaatccagtatataaacagaaccaaagacaaaaactacatgattatctcaatagatgcagaaaaggcctttgacaaaattcaacaactcttcatgctaaaaactctcagtaaattaggtattgatgggacgtatctcaaaataataagagctatctatgacaaacccacggtcaaaatcatactgaatgggcaaaaactggaagaattccctttgaaaactggcacaagacagggatgccctctctcaccactcctattcaacatagtgttggaagttctggccagggcaattaggcaggagaaggaaataaagggtattctattaggaaaagaggaagtcaaattgtccctgtttgcagatgacatgatcgtatatctagaaaaccccatcgtctcagcccaaaatctccttaagctgataagcaacttcagcaaagtctcaggatacaaaatcaatgtgcaaaaatcacaagcattcttatacaccaataacagacaaacagagagccaaatcatgagtgaactcccattcacaattgcttcaaagagaataaaatacctaggaatccaatttacaagggacgtgaaggacctcttcaaggagaactacaaaccactgctcaatgaaataaaagaggatacaaacaaatggaagaacattccatgctcatgggtaggaagaatcaatatcgtgaaaatggccatactgcccaagcctccgctgctgatacccaggcaaacagggtcgggagtggacctccagcaaactccaacagacctgcagctgagcgtcctgactgttagaaggaaaattaacaaacagaaaggacatccacaccaatacctcatctggacgtcaccatcatcaaagaccaaaggaaggcagctcctcgccagcaacagaacaacgaatggaaaggaaattagaccagaggattgaaaaggagaagtcagcagttgctgctggaggagaatctgatacacagcagagaataaaatacctaggaatccaacttacaagggatgtgaaggacctcttcaaggagaactacaaaccactgctcaaggaaataaaagaggatacaaacaaacggaagaacattccatgctcatgggtaggaagaatcaatatcgtgaaaatggccatactgcccaaggtaatttacagattcaatgccatccccatcaagctaccaatgactttcttcacagaattggaaaaaactactttaaagttcatatggaaccaaaaaagagcccgcatcgccaagtcaatcctaagccaaaagaacaaagctggaggcatcacactacctgacttcaaactatactacaaggctacagtaaccaaaacagcatggtactggtaccaaaacagagatatagatcaatggaacagaacagagccctcagaaataacgccgcatatctacaactatctgatctttgacaaacctgagaaaaacaagcaatggggaaaggattccctatttaataaatggacatgggaaaactggctagccatatgtagaaagctgaaactggatcccttccttacaccttatacaaaaatcaattcaagatggattaaagacttaaacgttagacctaaaaccacaaaaaccctagaagaaaacctaggcattaccattcaggacataggcatgggcaaggactccatgtctaaaacaccaaaagcaatggcaacaaaagacaaaattgacaaatgggatctaattaaactaaagagcttctgcacagcaaaagacactaccatcagagtgaacaggcaacctacaaaatgggagaaaattttcgcaacctactcatctgacaaagggctaatatccagaatctacaatgaactcaaacagatttacaagaaaaaaacaaacaaccccatcaaaaagtgggtgagggacatgaacagacacttctcaaaagaagacatttatgcagccaaaaaacacatgaaaaaaatgctcaccatcactggccatcagagaaacgcaaatcaaaaccacaatgagataccatctcacaccagttagaatggcaatcattaaaaagtcaggaaacaacagggacatagatgaaggtgtaaaccatcattctcagcaaactatcacaaggacagaaaaccagtcactgcatgttctcactcatacgtgggagttcaacaatgagaacacatggacacagggtggggaacatcacacgctggggcctgtcatgggatatgtctttatcagcagtgtgaaaatggaccaatacactaaattggtatcagaagagtggggtgttgctgaaaatcaagctaccaatgcctttcttcacagaattggaaaaaactactttaaagttcatatggaaccaaaaaagagcccgcattgccaagtcaatcctaagccaaaagaataaagctggaggcatcacactacctgacttcaaactatactacaaggctacagtaaccaaaacagcatggtattggtaccaaaacagagatatagatcaatggaacagaacagagccctcagaaataacgccgcatatctacaactatctgatctttgacaaacctgagaaaaacaagcaatggggaaaggattccctatttaataaatggtgctgggaaaactggctagccatatgtagaaagctgaaactggatcccttccttacaccttatacaaaaatcaattcaagatggattaaagacttaaacgttagacctaaaaccataaaaaccctagaagaaaacctaggcaataccattcaggacataggcatgggcaaggacttcatgtctaaaacaccaaaagcaatggcaacagaagacaaaattgacaaattggatctaattaaactaaagagcttctgtacagcaaaagaaactaccatcagagtgaacaggcaacctacaaaatgggagaaaatttttgcaacctactcatctgacaaagggctaatatccagaatctacaatgaactcaaagaaatttacaagaaaaaaacaaacaaccccatcaaaaagtgggcaaaggacatgaacagacacttctcaaaagaagacatttatgcagccaaaaaacacatgaaaaaatgctcatcatcactggccatcagagaaatgcaaatcaaaaccacaatgagataccatctcacaccagttagaatggcaatcattaaaaactcaggaaacaacagctgcctgagaaacacattcagatctgtgcccagcgactcggcagtcattgcacaaggcacaggaacacaccctcggggagacacacctagtcacaaagcaggggtcctggttgtggggatgtccttccctgaagagccggtcctacaagacagaagtgatgacttttctttagctcatggcagtaaacaggggaactctgtcctttgtgttggacagtggaagacacagggcccttgttccaggaacgagcagtatcggcccatcacaggccccggttcacactga

SEQ ID NO: 813 - DNA, 6092 bp, Homo sapiens
  SIMILAR (4314)..(5507): 961254mologous to Homo sapiens putative p150,accession number U93574,Smith-Waterman Score=2024.
atgattatctcagtagatgcagagaaggcctttgacaaaattcaacaacccttcatgctaaaaactctcaataaattaggtattgatgggatgtatttcaaaataataagagctatctatgacaaacccacagccaatatcatactgaatgggcaaaaactggaagcattccctttgaaaactggcacaagacaaggatgccctctctcaccactccttttcaacatagtgttggaagttctggccagggcaattaggcaggagaaggaaataaagggtattcacttaggaaaagaggaaatcaaattgtccctgtttgcagacgacatgattgtatatctagaaaaccccattgtctcagcccaaaatctccttaagctgataagcaacttcagcaaagtctcaggatacaaaatcaatgcacaaaaatcacaagcatttctatacaccaataacagacaaacagagagccaaatcatgagtgaactcccattcacaattgcttcaaagagaataaaatacctaggaatccaacttacaagggatgtgaaggacctcttcaaggagaactacaatccactgctcaatgaaataaaagaggatacaaacaaatggaagaacattccatgctcatgggtaggaagaatcaatatcgtgaaaatgggccatactgcccaagaattggaaaaaaactactttaaagttcatatggaaccaaaaaagagcctgcatcgccaagtcaatcctaagccaaaagaacaaagctggaggcatcacactacctgacttcaaactatactacaaggctacagtaaccaaaacagcatggtactggtaccaaaacagagatatagatcaatggaacagaacagagccctcagaaataatgccacctatctacaactatctgatctttgacaaacctgagaaaaacaagcaatggggaaaggattccctatttaataaatggtgctgggaaaactggctagccatatgtagaaagctgaaactggatcccttccttacaccttatacaaaaatcaattcaagatggattaaagacttaaatgttagacctaaaaccataaaaaccctagaagaaaacctaggcattaccattcaggacataggcttgggcaaggacttcatgtctaaaacaccaaaagcaatggcaacaaaagccaaaattgacaaatgggatctaattaaactaaagagcttctgtgcagaaaaagaaactaccatcagagtgaacaggcaacctacaaaatgggagaaaatttttgcaacttactcatctgacaaagggctaatatccagaatctacaatgaactcaaacagatttacaagaaaaaaacaaacaaccccatcaaaaagtgggtgaaggacatgaacagacacttctcaaaagaagacatttatgcagccaaaaaacacatgaagaaatgctcatcatcactggccatcagagaaatgcaaatcaaaaccactatgagatatcatttcacaccagttagaatggcaatcattaaaaagtcaggaaacaacagggacatggatgaaattggaaaccatcattctcagcaaactatcgcaatgacaaaaaaccaaacaccgcatgttctcactcataggtgggaactgaacaatgagaacacatggacacaggaaggggaacatcacacactggggcctgttgtgggaaacttgaaactgctgagaaagcccaaaatctccttaagctgataggcaacttcagcaaagtctcaggatacaaaatcaatgtacaaaaatcacaagctttcttatacaccaacaacagacaaacagagagccaaatcatgagtgaactcccattcacaattgcttccaagagaataaaatacctaggaatccaacttacaagggatgtgaaggacctcttcaaggagaactacaaaccactgctcaaggaaataaaagaggatacaaacaaatggaagaacattccatgctcatgggtaggaagaatcaatatcgtgaaaatggccatactccccaaggtgatttacagattcaacgccatccccatcaagctaccaatgactttcttcacagaattggaaaaaactactttaaagttcatatggaaccaaaaaagagcccgcatcaccaagtcaatcctaagccaaaagaacaaagctggaggcatcacgctacctgacttcaaactatactacaaggctacagtaaccaaaacagcatggtactggtaccaaaacagagatatagaccaatggaacagaacagagccctcagaaataatgccacatatctacaactatctgatctttgacaaacctgacaaaaacaagcaatggggaaaggattccctatttaataaatggtgctgggaaaactggctagccatatgtagaaagctgaaacttgatcccttccttacaccttatacaaaaattaattcaagatggattaaagacttacctgttagacctaaaaccattaaaaccctagaagaaaacctaggcattaccattcaggacataggcatgggcaaggacttcatgtctaaaacaccaaaagcaatggcaacaaaagccaacattgacaaatgggatctaattaaactaaagagcttctgcacagcaaaagaaactatcatcagagtgagcaggcaacctacaaaatgggagaaaattttcacaacctactcatctgacaaagggctaatatccagaatctacaatgaactcaaacaaatttacaagaaaaaaacaaacaaccccatcaaaaagtgggtgaaggacatgaacagacacttctcaaaagaagacacttatgcagccaaaaaacacatgaaaaaatgctcaccatcactggccatcagagaaatgcaaatcaaaaccacaatgagataccatctcacatcagttagaatggcgatcattaaaaagtcaggaaacaacagcaaaaaggtgcaaagtgaagcagcaagtgctaatgtagaagcagaagcaagttatcaggaagatctagctaagatcattgatgaaggtggctacactggaaaaccaattcttaatgtagacgaaacagccttatattggaagaagatgccatctaggacttccatagctaaagtgctataactgagtcttcaaaaggacattccactgttccatcaggccagctgcttcagaatggtggagaacatgtgttggaagttctggccagggcaattaggcaggagaaggaaataaagggtattcaattaggaaaagaagaagtcaaattatccctgtttgcagatgacatgattgtatatctagaaaaccccattgtctcagcccaaaatctccttaagctgataagcaacttcaccaaagtctcaggatacaaaatcaatgtacaaaaatcacaagcattcttatacaccaacaacagacaaacagagagccaaatcatgagtgacctcccattcacaattgcttcaaagagaataaaatacctaggaatccaacttacaagggatgtgaaggacctcttcaaggagaactacaaaccactgctcaaggaaataaaagaggagacaaacaaatggaagaacattccatgctcatgggtaggaagaatcaatatcgtgaaaatggccatactgcccaaggtaatttacagattcaatgccatccccatcaagctaccaatgactttcttcacagaattggaaaaaactaatttaaagttcatatggaaccaaaaaacagcctgcatcgccaagtcaatcctaagccaaaagaacaaagctggaggcatcacactacctgacttcaaactatactacaaggctacagtaaccaaaacagcatggtactggtaccaaaacagagatatagatcaatggaacagaacagagccctcagaaataacgccgcatatctacaactatctgatctttgacaaacctgagaaaaacaagcaatggggaaaggattccctatttaataaatggtgctgggaaaactggctagccatatgtagaaagctgaaactggatcccttccttacaccttatacaaaaatcaattcaagatggattaaagacttaaacattagatctaaaaccataaaaaccctagaagaaaacctaggcattaccattcaggacataggcatgggcaaggacttcatgtctaaaacacaaaaagcaatggcaacaaaagccaaaattgacaaatgggatctaattaaactcaagagcttctgcacagcaaaagaaactaccatcagagtgaacaggcaacctacaaaatgaaaaataataagagctatctatgacaaacccacagccaatatcatactgaatgggcaaaaactggaagcattccctttgaaaactggcacaagacagggatgccctctctcaccgctcctattcaacatagtgttggaagttctggccagggcaatcaggcaggagaaggaaataaagggtattcaattaggaaaagaggaagtcaaattgtccctgtttgcagacgacatgattgtttatctagaaaaccccatcgtctcagcccaaaatctccttaagctgataagcaacttcagcaaagtctcaggatacaaaatcaatgtacaaaaatcacaagcattcttatacaccagcaacagacaaacagagagccaaatcatgggtgaactcccattcacaattgcttcaaagagaataaaatacctaggaatccaacttacaagggatgtgaaggacctcttcaaggagaactacaaaccactgctcaaggaaataaaagaggagacaaacaaatggaagaacattccatgctcatgggtaggaagaatcaatatcgtgaaaatggccatactgcccaaggtaatttacagattcaatgccatccccatcaagctaccaatgactttcttcacagaattggaaaaaactactttaaagttcatatggaaccaaaaaagagcccgcattgccaagtcaatcctaagccaaaagaacaaagctggaggcatcacactacctgacttcaaactatactacaaggctacagtaaccaaaacagcatggtactggtaccaaaacagagatatagatcaatggaacagaacagagccctcaaaaataatgccacatatctacaactatctgatctttgacaaacctgacaaaaacaggaaatggggaaaggattcgctatttaataaatggtgctgggaaaactggctagccatatatagaaagctgaaactggatcccttccttacaccttatacaaaaattaattcaagatggattaaagacttaaatattagatctaaaaccataaaaaccctagaagaaaacctaggcaatactattcaggacataggcatggggaaggacttcatgtctaaaacaccaaaaccaatggcaacaaaagccaaaattgacaaatgggatctaattaaactaaagagcttctgcacagcaaaagaaactcacagctcatggaggcctgcctgcctctgtaggctccacctctgggggcagcgcacaggcaaacaaaaggacagcagtaacctctgcagacttaaatgtccctgtctgacagctttgaagagagcagtggttctcccagcatgcagctggagatctgagaaggggcagactgcctcctcaaaacaaagctggacggagaatgactttgacgagctgagagaagaaggcttcagacgatcaaattactccgagctacgggaggacattcaaaccaaaggcaaagaagttgaaaactttgaaaaaaatttagaagaatgtataactagaataaccaatacagagaagtgcttaaaggagctgatggagctgaaaaccaaggctcgagaactacgtgaagaatgcagaagcctcaggagccgatgcgatgaattggaagaaagggtatcagcgatggaagatgaaatgaatgaaatgaagcgagaagggaagtttagagaaaaaagaataaaaagaaacgagcaaagcctccaagaaatatgggactatgtgaaaagaccaaatctacgtctgattggtgtaccttaa

SEQ ID NO: 814 - DNA, 4192 bp, Homo sapiens
  SIMILAR (715)..(1875): 961254mologous to Homo sapiens putative p150,accession number U93565,Smith-Waterman Score=1878.
atggacattgatgcaaaaatcctcaataaaatattggcaaagcgaatccagcagcacatcaaaaagcttatccaccgtgatcaagtgggtttcatccttgggatgcaagactggttcaacatacaaaaatcaataaacgtaatccatcatataaacagaaccaaagacaaaaaccacatgattatctcagtagatgcagaaaaggcctttgacaaaattcaacagcccttcatgctaaaaactctcaataaattaggtattgatggaacgtatctcaaagtaacaagagctatctatgacaaacccacagccaatatcatactgaatgggcaaaaactggaagcattccttttgaaaactggcacaagacagggacgccctctctcaccactcctattcaacatagtgttggaagttctggccagggcaatcaggcaggagaaaaaaataaagggtattcaattaggaaaagaggaagtcaaattgtccctgtttgcagatgacatgactgtatatttagaaaaccccatcatctcagaccaaaatctccttaggctgataaacaacttcagcaaagtctcaggatacaaaatcaatgtgcaaaaatcacaagcattcttaaacaccaataacagacaaacagagagccaaatcatgagtgaactcccactcacagttgcttcaaagagaataaaatacctaggaatccaaatgcttaaccaggaagaagttgaatctctgaatagaccaataacaggagctgaaattgtggcaataatcaatagtttaccaaccaaaaagagtccaggaccagatggattcacagccgaattctaccagaggaattcggtagaggaggaactggtaccattccttctgaaactattccaatcaatagaaaaagagggaatcctccctaactcattttatgaggccagcatcattctgataccaaagccgggcagagacacaaccaaaaaagagaattttagaccaatatccttgatgaacattgatgcaaaaatcctcaataaaatactggcaaaacgaatccagcagcacatcaaaaagcttatccaccatgatcaagtgggcttcatccctgggatgcaaggctggttcaatatacgcaaatcaataaatgtaatccagcatataaacagagccaaagacaaaaaccacatgattatctcaatagatgcagaaaaagtctttgacaaaattcaacaacccttcatgctaaaaactctcaataaattaggtattgatgggacgtatttcaaaataataagagctatctatgacaaacccacagccaatatcatactgaatgggcaaaaactggaagcattccctttgaaaactggcacaaaacagggatgccctctctcaccactcctattcaacatagtgttggaagttctggccagggcaattaggcaggagaaggaaataaagggtattcaattaggaaaagaggaagtcaaattgtccctgtttgcagacgacatgattgtatatctagaaaaccccattgtctcagcccaaaatctccttaagctgataagcaactttagcaaagtctcaggatacaaaaaaaaaatcaatgtacaaaaatcacaagcattcttatacaccaataacagacaaacagagagccaaatcatgagtaaactcccattcacaattgcttcaaagagaataaaatacctaggaatccaacttacaagggacgtgaaggacctcttcaaggagaactacaaaccactgctcaaggaaataaaagaggatacaaacaaatggaagaacattccatgctcatgggtaggaagaatcaatatcgtgaaaatggccatactgcccaagataggatattgtgtgcaagacacaacctctgccaatactacccttgttcatcagaccacaccttcacatgtaatgccaccaaatcaccaccaattagcatttaattatcaagaattagaacatttacagactgtgaaaaacatttcacctttacaaattctgcctccctcaggtgattctgaacagctctcagatggcataactgtgatgcatccatctggtgatagtgacacaacgatgttagaatctgaatgtcaagctcctgtacagaaggatataaagattaagaatgcagattcatggaaaagtttaggcaaaccagtgaaaccatcaggtgtaatgaaatcctcagatgagctcttcaaccaatttagaaaagcagccatagaaaaggaagtaaaagctcggacacaggaactcatacgtaagcatttggaacaaaatacaaaggaactaaaagcatctcaagaaacccacagggatcttgggaatggattgactgtagaatctttttcaaataaaatacaaaacaagtgctctggagaagagcagaaagaacatcagcagtcatcagaagctcaagataaatccaaactctggcttctcaaagaccgtgatttagcaaggcagaaagaacaagagaggaggaggagagaagcagaagggcagtgggccccgccgccgcctcccaatggcgaggctgcgggattgcctgccccgcctgatgctcacgctccggtccctgctcttctggtccctggtctactgctactgcgggctctgcgcctccatccacctgctcaaacttttgtggagcctcggcaaggggccggcgcagaccttccggcggcccgccccgggagcaccctccccgcgtgcctgagcgacccctccttgggcacccactgctacgtgcggatcaaggattcagggttaagatttcactatgttgatggcgctggcatctgcttggcttctggggaggcttcgggaagcttctaatcatggcagaaggcaaaggacttcaaattgcacaatatttttagggctgctggaggctaaaaggagaaaggacaaatttatcccaccagttaatgataattttgattaccttgatctcctacattatgtgctgtgcatgctaaatagttttgttattgctgaagttaatgcactcttgcttaaggggttgaatgagtttggggatgcctatggctctaaattccctaaattctcatcaccggggaagggatctgcagttgaaaggctgagtgcccaggaccaaggaagcttcttctaccagagcagtggcctttcaaacaggatcctgtccattcactttgcagctactcatccatataccatgtggctttttgttggtttagccacagaagaagatggtgatttaacttccgtttcctctgagagttcttccactttggatgcttcagcaaccaaagtgttggaagttctggccagggcaattaggcaggagaaagaaataaagggtattcaattaggaaaagaggaagtcaaattgtccctgtttgcagatgacatgattgtatatctagaaaaccccattgtctcagcccaaaatctccttaagctgataagcaacttcagcaaagtctcaggttacaaaatcaatgtacaaaaatcacaagcattcttatacaccaataacagacaagcagagagccaaattatgagtgaactcccattcataattgcttcaaagagaataaaatacctaggaatccaacttacaagggatgtgaaggacctcttcaaggagaactacaaaccactgcttaaggaaataaaagaggatacaaagaaatggaagaacattccatgctcatgggtaggaagaatcaatatcgtgaaaatggccatactgcccaagccataccaccattgccaatgtgaatgcatgcatatagaggtcagcagcccttctcaccctctgtgctgccactgctgtgaatgcctgcatagaggccagcaaccctgtgcccaccagtgccccaccccagcctatgagcaagcaccccaccatgctgctgctactggcacaaacaaacaagcacagatcctagtgccactgcctgatgcaatgctttggctggccctactcgttacagtgttgtggccagcagtcctggaacacatcagcccctccaatgcacagtttcctaaccttgagggaccagagaacaaagctcgacatccaataccagtcccccagaggtacagcatgcaacttaggggtgccaacctgtgccttggcctcctaaaatcctccacaaatgaagccagttga

SEQ ID NO: 815 - DNA, 4582 bp, Homo sapiens
  SIMILAR (1229)..(1747): 921254mologous to Homo sapiens Human secreted protein encoded by gene 3 clone HNHCT15,accession number AAB38012,Smith-Waterman Score=808.
atgttggaagttctggcctgggcagttaggcaggagaaggaaataaagggtattcaactaggaaaagaggaagtcaaattgtccctgtttgcagacaacatgactgtatatctggaaaaccccatcgtctcagcccaaaatctccttaagctgataagcaacttcagcaaagtctcaggatacaaagtcagtggacaaaaatcacaagcattattatacaccaataacagacaaacagagagccaaatcatgagtgaactcccattcacaattgcttcaaagagaataaaatacctaggaatccaccttacaagggatgtgaaggacctcttcaaggagaactacaaaccactgctcaaggaaataaaaaaggatacaaacaaatggaagaacattccatgctcatgggtaggaagaatcaatatcgtgaaaatggccatactgcccaaggacatcatccaggagaacttccccaatctagcaaggcaggccaacattcagattcaggaaatacggaaaacaccacaaagatattcctcgagaagagcaactccaagacacataattgtcagattcaccaaagttgaaatgaaggaaaaaatgttaagggccgccagagagaaagcatcacaccacacctattccaaaattgaccccatacttggaagtaaacctctcctcagcaaatgtaaaagaacagaaattataacaaactatctctcagaccacagtgcaatcaaactagaattcaggattaagaatctcactcaaaactgctcaactacgtggaaaccaaacaacctgctcctgaacgactactgggtacataacgaaatgaaggcagaaataaagatgttctttgaaaccaacgagaacaaagacacaacataccagaatctctgggacacattcaaagcagtgtgtagagggaaatttatagcaacaaatgcccataagaggaagcaggaaagatccaaagttgacaccctaacatcacagttaaaagaactagaaaagcaagagcaaacacattcaaaagctagcagaaggcaagaaataactaaaatcagagcagaactgaaggaaatagagacacagaaaacccttcaaaaaattaatgaatccaggagctggttttttgaaaggatcaacaaacttgacagacctctagcaagactagtaaagaaaaaaagagagaagaatcaaatagatgcaataaaaaatgataaaggggatatcaccaaccgatcccacagaaatacacactaccatcagagaatactataaaaacctctacgcaaagaaactagaaaatctagaagaaatggataaattcctggagacatacaccctcccaagaccaaaccaggaagaagttgaatctctgaatagaccaataacaggatctgaaattgtggcaataatcaatagcttaccaaccaaaaagagtccaggaccagatggattcacagccgaattctaccagaggtacaaggaggaactggtaccattccttctgaaactattccaatcaatagaaaaagaaggaatcctccctaactcatttgatgaggccagcatcatcctgataccaaagctgggcagagacacaaccaaaaaagagaattttagaccaatacccttgatgaacactgatgcaaaaatcctcaataaaatactggcaaaccgaatccagcagcacatcaaaaagcttatccaccatgatcaagtgggcttcatccctgggaatgcaaggctggttcaatatatgcaaatcaataaatgtaatccagcatataaacagaaccaaaggcaaaaaccacatgattatctcaatagatgcagaaaaggcctttgacaaaattcaacaacccttcctgctaaaaactctcaataaattaggtattgatgggacgtatctcaaaataataagagctatctatgacaaacccatagccaatatcatactgaatgggcaaaaactggaagcattccctttgaaaactggcacaagacagggatgccctctctcaccactcctattcaacatagtgttggaagttctggctagggcaattaggcaggagaaggaaataaagggtattcagttacaaaaagaggaagtcaaattgtccctgtttgcagacgacatgattgtatatctagaaaaccccactgtctcagcccaaaatctccttaagctgataagcaacttcagcaaagtctcaggatacaaaatcagtgtgcaaaaatcacaagcattcttctacaccaacaacagacaaacagagagccaaatcatgagtgaactcccattcacaattgcttcaaagagaataaaatacctaggaatccaacttacaagggatgtgaaggacctcttcaaggagaactacaaaccactgctcaaggaaataaaagaggatacaaacaaatggaagaatattccatgctcatgggtaggaagaatcaatattgtgaaaatggccatactgcccaagcctccgctgctgatacccaggcaaacagggtcgggagtggacctccagcaaactccaacagacctgcagctgagcgtcctgactgttagaaggaaaattaacaaacagaaaggacatccacaccaatacctcatctggacgtcaccatcatcaaagaccaaaggaaggcagctcctcgccagcaacagaactatactacaaggctacagtaaccaaaacagcatggtacgggtaccaaaacagagatatagatcaatggaacagaacagagccttcagaaataatgccgcttacctacaactatctgatctttgacaaacctgagaaaaacaagcaatggggaaaggattccctatttaataaatggtgctgggaaaactggctagccatatgtagaaagctgaaactggatcccttccttacaccttatacaaaaatcaattcaagatggattaaagatttaaacgttagacctaaaaccataaaaaccctagaagaaaacctaggcattaccattcaggacataggcgtgggcaaggacttcatgtccaaaacaccaaaagcaatggcaacaaaagccaaaattgacaaatgggatctaattaaactaaagagcttctgcacagcaaaagaaactaccatcagagtgaacaagcaacctacaacaggggagaaaattttcacaacctactcatctgacaaagggctgaatatccagaatctacaatgaactcaaacaaatttaaaaatacctaggaatccaacttacaagggatgtgaaggacctcttcaaggagaactacaaaccactgctcaaggaaataaaagaggatacaaacaaatggaagaacattccatgcccatgggtaggaagaatcaatatcgtgaaaatggccatactgcccaaggtggctaccattaccgtgctcactttacaggtgaggttcagagatttatgtaacatgccaaaggtcacacagctggacacagcagaaccaagattcaaatctgcacagaatcccatccagaataacagtatatttagttatcaagcctctttaggctccttgtggctacgacagtttctcagactttctattgtgatgccctggacagttttgaagggtattggtcagctgagtgttctacatgtttatgtcgtatggcccctgaaagaattcgtatttgaagctctgggtaagtggttaggaaaggaccagctgcaggcaacaatgcgagtgtgccttatttcctcaactgtaagaaattccagcatgtctagagagcaatcagggactctggcttctcaagagactctcagcatggaagccttcctgaaagccctgtgtggaggtggacccaatttatgcacctctatagatccactcaatctcttctttcctgtggtagtaaattcccagatcctcctgtctcatcctcagataccagcaattgcagaaacctactcagaggagaagtgcttaaaggagctgaaaaccaaggctcgagaactacgcgaagaatgcagaagcctcaggagccgatgcgatcaactggaagaaagggtatcagcaatggaagatgaaatgaatgaaatgaagcgagaagggaagtttagagaaaaaagaataaaaagaaacgaacaaagcctccaagaaatatgggactatgtgaaaagaccaaatctacgtctcattggtgtacctgaaagtgacggggagaatggaaccaagttggaaaacactctgcaggatattatccaggagaacttccccaatctagcaaggcaggccaacattcggattcagaaaatacagagaatgccacaaagatactcctcgagaagagcaactccaagacacataattgtcagattcaccaaagttgaaatgaaggaaaaaatgttaagggcagccagagagaaaggtcgggttaccctcaaagggaagcccatcagactaacagcagatctctctgcaaaaactctacaagccagaagagagagggggccaatattcaacactcttaaagaattttcaacccagaatttcatatccagccaaactaagcttcataagtga

SEQ ID NO: 816 - DNA, 681 bp, Homo sapiens
gcccccatcagcctccttgtgcaaactgggcccccatgccacagtctggctttccctccatctgccccaggacaagagcaagaaggacatcagttgcccagtcatgtgatcccctgccatcttgccttaggaacagccttcccccagccagcagccatggctggctggggcgttagccaagccacctactgccaggaattggagcctcagttccctcctgtgtcaagtagctaactgcagcagctggactgagggcagagtctgtgggtgcagagaccctgcatgtaggccctaggcaggaagctggcttctgggagaggagtgagaacgtgcagggcctgcctagcttgcgtgcttgaggaaggtggcattccgtgcttgcctccttgaggagggtggcattctgtgtcttctgcttatgaagcgcctttcttaagcagaagacacagaatgccaccctcctcaagtgaccaaatgctattaatttccatcctttagcaggctgggccctaggcaggaagctggcttctgggagaggagtgagaacgtgcagggcctgcctagcttgcgtgcttgaggaaggtggcattccgtgcttgcctccttgaggagggtggcattctgtgtcttctgcttatgaagcgcctttcttaaagtttggcaataaatccatttttatgg

SEQ ID NO: 817 - DNA, 711 bp, Homo sapiens
  SIMILAR (303)..(653): 531254mologous to Homo sapiens mariner transposase,accession number U49974,Smith-Waterman Score=263.
ctagtttgaggcactaagaatgataggacatctgtttgcaaagagtccctatcatggcaaaatcaattctgctaaaattgtagcaaggacaaacatcaaattgatggtgaaagttgtgatgtggaagaatggtgaaatcattgatactttacaaatagtttatggggacaatgccccaaagaaatcagtagcagtttacaaatgcataactagtttaagacgaagcaaagttttagatgaagcctgcagcagcagaccagtcacatcgatttgcaagggtaaaagttaatcttgtttatgccaacatctcaattggttcagcttacacaattttgatggaaaattaaatttgagcaaactttccactcattggatgccacaactgtacacccagatcagctgaagacaagagcaaagctttcaatggaaatttaaacaagtgtgatcaagaccctaaaggatttctttgaaaaattgtaacaagagatagaacatggctttactagtacacttttgaagacaaagcacagtcaaagcaatggctaccaagaggtggaagtggtccagtcaaagcaaaagcaggctggtcaagagcaaaggtcaaggcaaaacaggtttttggaatgctcaaatcgttttgcttgttgactttctggagggccaaagaacgataacatctgcttatgagagtattttgttgaaaaaaaaaaa

SEQ ID NO: 818 - DNA, 2141 bp, Homo sapiens
  SIMILAR (1317)..(892): 591254mologous to Homo sapiens unknown,accession number AF217986,Smith-Waterman Score=360.
  misc_feature (1)...(2141): n = a,t,c or g
ttttttttccataaaaatggatttattgccaaactttaagaaaggcgcttcataagcagaagacacagaatgccaccctcctcaaggaggcaagcacggaatgccaccttcctcaagcacgcaagctaggcaggccctgcaacgttctcactccctctcccnaagaagcccagcttccctccctaagggcccagcctgtctaaaggatggtaaattaatagcatttggtcacttgaggtggccccaaagctacttgcctacccaccaggggcccaggggagagtggctggggcctcaacctgtgaccttacatgcagggtctctgcacccacagactctgccctcagtccagctgctgcagttagctacttgacacaggagggaacttgaggcttccaattccctggcagtaggtggcttggctaacgccccagccagccatggctggctggtgggggaaggctgttcctaaggcaagatggcaggggatcacatgactgggcaactgatgtccttcttgctcttgtcctggggcagatggagggaaagccagactgtggccatgggggccccaagtttgcaaaaaggaaggctgaatgggggctcccggaaccaagtgcattgctgctcacctctgctccggcccccacgcagcccagagaagacatctgccccctcctgatccttgactactacctcaagaacaaagtgacagtacaataacgataacgaaggcattgacctgtgcaagcaggcctcagtggggttggggaacagggcagaaaggccagggcatgttgcttgtgaccccccccctttctcctctttcaattaaacaaaagtgcaacatgcaagaaatctgggcaagggtcctatcggaagctgctctcaccccagaggcccccagggagagtggctggacctcgggaacccagggcctctgcaccctaacaagctctgcccctcaagtcccagctgctgccagccacgatggaaaactggatgtgccccctaaaatccagggacaatgtgggggaagaggctgggaagaggacccagggtgccagggatggacccaggaaagggaaagaagaaaatgtctcttctcctagaaagttacaggagagccagcccatctggggcttgaaggcggggaagtggcttcggattccaacatacccctatcagcatttgaagaaatgactgggatacgggacctgtttcggctgagaaggacccacagagatccagataaatccccatctgaggaggcacagaagttggtggggattctcttttgaaggctgacatgatcattccaagtaagtttttctaatgtggacatcagagccactctgggatccacctcttcagaaatatccaaggctggtcactatccaggggcagagacatagaatagggggccccttaaattcctcttccactcttgaatcctccagacctaagccctccaatcatagctcactgagaggaaggggctgcagaaaatgtccttgttttgcaaaaaaaggaaacagggcccaaagagagagaggccacacagcttaatgtcctcctcacaaagaggcctctcatctccctcaagaggctccagttgggtctttcgttcccttccttttttaggtatgatcttagagcctggacccaaggcctctgcagctactcaaaataagtgggaggaggggctggctttgaggctgcccttagccatgaaggctctttgtcctaggaatagctggagatgggagctgcagggggctcagctgtgctgtattcagaagtcaggaatgtaagctactggggatggggaacagagatgatgtcattcccagaaaccccaagtgccgcccccaaagccctggggcagtttggaacgaccacacaaacacataggtcccagcgtgtgtgctcccagccccagccccagcccagaggccaggccagatagccaggcagtagccctgggtggcacctggcacctctggccagagcagagtaggaaggacgccaggagtctcttcgggtcatggccaaaccctgacatgcccaatggccctcctgcagccattgctgtagaagcagaagcacatttctcagcagggctgggccggacgcgtggg

SEQ ID NO: 819 - DNA, 342 bp, Homo sapiens
  misc_feature (1)...(342): n = a,t,c or g
ggcacgagttaatttattgtgattcacagattttgatggggaaatacaggatcccaggtcatgactactgtcttaaacactgccctgctacctcccaaaccgagccccatgctccccatcaagcattatgccatcccgccaccaagctactcccacacccgtagccacccatccccagcccaacagcaaaccttgagtcagcgccaccagcctctgcacctctcctcctctgcctccactctgcccagctgggggaagctcatgcaccacctgaataatataccccagagnnnnnnnnnnnnnnnnnnnnnnnactctcatggtcgctgcccaggccagccg

SEQ ID NO: 820 - DNA, 577 bp, Homo sapiens
ttgagaaaacagggtcacaatacctgccttgccaacgtggtgaggaccagcggagaagatgaaagggttatattccaaagcccacaaggttgaagatgcacacccgtgacacagcctcaggatgtcctgacgacatgtgccaaggtggtcatacgttttagggagacatgagacatcaatcaacacatgtaagatgaacattggttcagtctggaaaaggccgggcaacgccaagcaaacgtgggacaactcgcagccaggagaaagcttccaggtcacagatgaagagcatctgtatacatccagaatcctgtggagcaactcataacccatgaggaatggaagccgacagacagactcatccccaggacagatggttctcactacatctcataaagcttcttagaagatcttacaggattgagcaaccagccagccacagcaggggccaactggataacacgtctttgcacaggctctccctctgtccctgtcaccctccccttttcctaaccttgttccttgggattatgttttgaaataaattattcagagaaatgaaaaaaaaaaaaaaaaa

SEQ ID NO: 821 - DNA, 1161 bp, Homo sapiens
  misc_feature (1)...(1161): n = a,t,c or g
tgcacanccgtgacacagcctcaggatgtcctgacgacatgtgccaaggtggtcatacgttttagggagacatgagacatcaatcaacacatgtaagatgaacattggttcagtctggaaaaggccgggcaacgccaagcaaacgtgggacaactcgcagccaggagaaagcttccaggtcacagtatttttgacttaccacgtgtttattgggacgtaaccccttcctaagatgaagagcatctgtatacatccagaatcctgtggagcaactcataaacccatgaggaatgggagccgacagacagactcatccccaggacagatggttctcactacatctcataaagcttcttagaagatcttacaggattgagcaaccagccagccacagcaggggccgactggataacacgtctttgcacaggctctccctctgtccctgtcaccctccccttttcctaaccttgttccttgggattatgttttgaaataaattattcagagaaatgaagccaaagctgacccattagccaatagctaggttctgtgatgacagggcttctgggctataatcgtttactgagaagccagcgttcctgaggggataatggctcgttccattcagctgcagcataggagtgagggcagggcattagcagaagataacaccagaaacgtgctctgggggctgttgatgactttctgtgccaaaccttagacatttagcctttattctgtaggtgatgggaagccagtgccagtggtgggtttgagcagggaaccagcaaccagtggtgggtttgagcagggagccagcaatactcaagctctgcttggatggaggccagtcaggaaggagttagggcaggaggaccagtcagggaggagacttagggcaggaggaccactcagggaggagacttagggcaggaggaccggtcagggaggagacttagggcaggaggactggtcagggaggagacttagggcaggaggactggtcagggaggagttagggcaggaggactggtcagggaggagacttagggcaggaggactggtcagggaggagacttagggcaggaggactggtcagggaggagttagggctggagaacgggtcagggaggagttagggcagggggaccggtcagggag

SEQ ID NO: 822 - DNA, 1326 bp, Homo sapiens
catattttatcattcatcatagaaaaaaagctttaatattttttaatagaatacagaagaaaattgtgttgccagagagattgtttgcctgcctttgaacaaattaacaacacctgtttgcaaacaaaagaatttccagaatggagtcaaaccctttattctctgttcaggacccagcccattcatgtcttttgtatacagtatcaaacacatagtaggtgctgaataagtatctgctgactgaatggggtgcctcttttatccctatcctttatttcccaaccctaaactggatcttgatccattggggaaaatatccccacccatccattcctagagtagccctgtctctttcaacagtctttgatacataacattggtttagagacatatgcctgaagggaaaagagggagggtttcaggcaagagaaagaactctcaaaagcaggggcacagagactaggcagaaacaaaaagatctaagacagagagagagagtaactgaaacacaggtgcagagcgggaacaactgtgggagacagggacagaaaaaccaagtcagagaaacttaaaacgcacaccattggagataaagagataaaagggctgggccagaatgaacatcttgaagtttctactcagctttaatgttatctgatagaaaaaatggcagagagagaggaagacacggcctaagcaggaggataaagagacaaaggaagttagtagaggcagaggcagccagccaggcgtgcctagccgggaagcctggtcctaccccggcctcacacccacgggggatgggctcccatgcccactttcggctcctaccttaagtccagccaccctcttcccctacccgcccctaaagatctccaaaccactcggcaaatcaaatcctctctccccaacatcctccgtgaagcattctcggtgctccagcccgcactcagctcttcccctctcaactcctaaagccacacccccctcccctaaccacagggcagggctgttttcgagtttgcccttggctcctatgagcacatcttgactcctgcaaaagaactgtgtgcttgtcagggctccagcccctacctcctatattccagtattcttcatgacaccagcccaatgcccggtcttcctaagtgctcagtgaatactttagggcctgcccggccctatagtgctcgcgggggcctcagccgtcccctggagattttgccaggctggccacgctgagaccgtctcatggtctaagggcggcctctgccggccaggaggggacccgcacgcgggacagctcgcggccggaagggcgcgcct

SEQ ID NO: 823 - DNA, 1359 bp, Homo sapiens
  SIMILAR (1031)..(1204): 501254mologous to Homo sapiens carboxylesterase precursor,accession number D50579,Smith-Waterman Score=112.
atggggataaagaatagcaagcgaggatccctccccctggctgctcctgcgctgctgaagcctgacacactctggtcctgtatatttggtgaaggggatttgggagaagaggacatgcccccagaccctcaggcaccatctccagctatccttcctcctaatcatgcctttggactctggcccttccgttacacccaaacccatccacaggaggccgccgccgaccccgccgccgcctaccatccggaaccaccaccgctgatcctagcaggcgtgcgcttccgctccaaccccgcacttccggagaacgggaagggggcgtggcgtggcgacggagtcgcggagggacacgccgcgttgtgggttctcggcctgaggtgcgagagaagcgtgaccgcggccctggctgctcggacccgggaacatgatggtcgctggagagaaggcgctgagaagggaccacggcggcgctgggtcgtgcgagccatccaaactccaaggctgggcaaggcactgatccactgctggacgacccggggcagcctctgggtgaacagcagcgtgtccgccggcagcgaacgagaccagcgagccgaccatgcggctgcacagacttcgtgcgcggctggcgcggtggcctgtgggcttctgctgcttcttgtccggggccaggcctgggtgaaaaagcaaaatctgtctccagaaacaagaaccaaagagctcgtggtgtccctcatgccattacctcatcctgggcaagggcacaacttggcttccagggcaaaggccaggactcagccagtcccatccggacccacacacggggcaggtgctggggagtcttgtccatgtgaagggcgccaagccggggtccaaaccttcctgggaattccatttgccaagccacctctagtccgctgcgatttgcaccccctgagccccctgaatcttggagtggtgtggggatggaaccacccatccggccatatctacacgccggcccatagccatgaaggctctaacctgccgcactggagacaagcacgcaaccggcaactgggctacctggaccaagtggctgcactacgctgggtccagcagaatatccccactttggaggcaaccctgaccgtgtcaccatttttggcgagtctgcggtggcacgagtgtgtcttcgcttgttgtgtcccccatatcccaaggaccttccacggagccatcatggagagtggcgtggccctcctgcccggcctcttgccagctcagctgatgtcatctccacggttcccgggcccctgtgtcttctacgagttccagcatcagcccagctggctcaagaacatcaggccacgcacatga

SEQ ID NO: 824 - DNA, 697 bp, Homo sapiens
  SIMILAR (534)..(593): 1001254mologous to Homo sapiens carboxylesterase precursor,accession number D50579,Smith-Waterman Score=102.
tcgctggcttatcccaaaggtcatgaggatttatgatacccagaagaaaatggacagagaggcctcccaggctgctctgcagaaaatgttaacgctgctgatgttgcctcctacatttggtgacctgctgagggaggagtacattggggacaatggggatccccagaccctccaagcgcagttccaggagatgatggcggactccatgtttgtgatccctgcactccaagtagcacattttcagtgttcccgggcccctgtgtacttctacgagttccagcatcagcccagctggctcaagaacatcaggccaccgcacatgaaggcagaccatgttaaattcactgaggaagaggagcagctaagcaggaagatgatgaagtactgggccaactttgcgagaaatgggaaccccaatggcgagggtctgccacactggccgctgttcgaccaggaggagcaatacctgcagctgaacctacagcctgcggtgggccgggctctgaaggcccacaggctccagttatggaacgaaggcgctgccccaaaagatccaggagctcgaggagcctgaagagagacacacagagctgtagctccctgtgccggggaggagggggtgggttcgctgacaggcgagggtcagcctgctgtgcccacacacacccactaaggagaaagaagttgattccttcaa

SEQ ID NO: 825 - DNA, 2310 bp, Homo sapiens
  SIMILAR (169)..(1203): 661254mologous to Homo sapiens carboxylesterase precursor,accession number D50579,Smith-Waterman Score=966.
gtatccacccgtccgctccaaggctgggcaaggcactgatccactgctgttcttttccggggcagcctctgggtgaacagcagcgtgtgcgccggcagcgaaccgagaccagcgagccgaccatgcggctgcacagacttcgtgcgcggctgagcgcgggggcctgtgggcttctgctgcttcttgtccggggccagggcccaggactcagccagtcccatccggaccacacacacggggcaggtgctggggagtcttgtccatgtgaagggcgccaatgccggggtccaaaccttcctgggaattccatttgccaagccacctctaaggtccgcttgcgatttgcacccccttgaagcccccttgaatcttggagtggtgtgagggatggaaccacccatccggccattgtgtctacaggacctcaccgcagtggaagtcagagtttcttagccagttcaacatgaccttcccttccgactccatgtctgaggactgcctgtacctcagcatctacacgccggcccatagccatgaaggctctaacctgccggtgatggtgtggatccacggtggtgcgcttgtttttggcatggcttccttgtatgatggttccatgctggcttgccttgggagaacgtggtggtggtcatcatccagttaccgcctgggggtgtcctgggcttcttcagcactggagacaagcacgcaaccggcaactggggctacctggaccaagtggctgcactacgctgggtccagcagaatatcgcccactttggaggcaaccctgaccgtgtcaccatttttggcgagtctgcgggtggcacgagtgtgtcttcgcttgttgtgtcccccatatcccaaggactcttccacggagccatcatggagagtggcgttgcccttccttgcccggcctcattgccagctcagctgattgtcatctccacggtggtggccaacctgtctgcctgtgaccaagttgactctgaggccctggtgggctgcctgcggggcaagagtaaagaggagattctttgcaattaaacaagccttttcaagatgatccccggagttggtgggatgggggtcttccttgcccaggggacccccagggagttgttggcctctgccgactttcagcctgtccctagcattgttggtgtcaacaacaatgaattcggctggcttcatccccaaggtcattgaggatcttattgataacccagaagggaaattgggacaagagagggcctcccagggttgttctgcagaaaatgttaacgctgctgatgttgcctcctacatttggtgacctgctgagggaggtgtacattggggacaatggggatccccagacccttccaaagcgaaagttcccagaagatgatggcggactcccatgtttgtgatccctgcactccaagtagcacattttcaagtgttccccgggcccctgtgtaccttcctacgagttcccagcattcagcccagctggctcaagaacatcaggccacccgcacatgaaggcagaccatggtgaatgagcttccttttgttttcagaagtttctttcgggggcaactacattaaattcactgaggaagaggagcagctaagcaggaagatgatgaagtactgggccaactttgcgagaaaatgggaacccccaatggcgagggtctgcccacactggccgcctgttcgaccagggaggagcaattaccttgcagctgaaccttacagcctgcggtggggccggggctctgaaaggcccaccaggctcccagttctggaaagaaagcgctgccccaaaagatccagggagctcgaggagcctgaagagagacacacagagctgtagctccctgtgccggggaggagggggtgggttcgctgacaggcgaagggtcagcctgctgtgccccacacaacacccactaaggaggaaagaagtttgatttcctttcatttcattttggcctttcatttcatacttccgtccagaagttgattccttcattcacttcgccattcattcatacttccgtccatccattcagaaaccggyatttattaagaatttactcaggcatgatggcccatacttgtaatcccagctattgggaaggatgagatgggaggatggcttgaggccagaggtttgagaccgaccagccagggcaacacagtgagaccccttctcaaaaaaaaaaaaaaaaaaagagagagtgtgtgattagaagctaaataggaaagttttgagcttcaagtcagtgaggagtaaaaaagatttttaaaaagcaa

SEQ ID NO: 826 - DNA, 824 bp, Homo sapiens
  SIMILAR (389)..(99): 1001254mologous to Homo sapiens dJ1119A7.5 (novel protein (isoform 2)),accession number AL022313,Smith-Waterman Score=534.
gtgtccaaacagttctccaggaagcgcctcagaggtaggatgtgcccgatcggggcagtccagtctgttaagaagtcttccacgatgtgatggatggccgtgggccgaggcaggggccagtgtgcagggcggaacctcacctcctgttcggtggggaggtatctatagtagtagatgacaggatgaagaaagttagactgccaggcatcttctgtgtgccccacagaccggtcatcaaagaagacgtccttgtcggggccagagaaatttctgccatattccatgttgatgacgaagagcccgtgctttgccttcctccctgtgagtgtctccagctgggccagcatctgtatggggaactcctccaggtactcaaaggccgtggaattcctgggagaacagcaacgcgggggaggccctcagtgctgtgggtagagcccagaagcctcattcacgcgccgcacgatggagctggtcagctgtgtgatggggagctcagtggcggtccaggtgacgctgtggtgccggtgctccaggagccggtgaacagcacgcactgtgtatcggaatccgtggatgaagcccccagcacttaccccggtagtccaccgagtggctggcagtacccaggataaacagaccccggcttcctttggattcgtagctagctcgaatcagcgggtacttcttgccgaatgcatttcccgagttaagtctgagggacttattgaaaatggagaagtcaaagttccagcccaggcagcggattacccggtcatagggcacgcgcatggcaaagttgtcattctcgtccggaatacatc

SEQ ID NO: 827 - DNA, 1619 bp, Homo sapiens
  SIMILAR (1619)..(1005): 591254mologous to Homo sapiens dJ1119A7.5 (novel protein (isoform 1)),accession number AL022313,Smith-Waterman Score=519.
tttaggaaccaaattcatcatcattatcacacaaaggcatttggaaatgtcaccttacacatggtgagcacatatgggtgccagcccgagacagcaggataagtttcacaaaacttgaccaggcaggttagaagcaaggcatggttcaggatggcagagggcagggagacagaagggagtaggatgggagagaagagccagctggaagatgagtcagggggtgcaactggggagagcagctctgaatcctgcttctcagtgagaaagttgctaagatggctttgcagggagctgtcctatcgctgctcgagatcagcctgctgggcctattgatgataagcagggctgaccctcttgggctctgtagctaagcccaaaccctgctgaaaatggggcggggaggttgaggcagtgtgtggcaagtgacacagacggggactcccagctgggggtccctggaattacttgacatcccacagctggtgtcttcagcagtcatctggggcaacaatcccacctgcccgttgtggttgttgaggatatcagagcttttgttttaaagcgcttgccacaaactcttaagatgcggatgggtttcccctgtgaagcactccacaggcgggatgcaggcccatctgaggaggggcttggaaggaagaggagcacttgagacggtgcagaactgggctggcctggggctcagcgacactcccatttgcagacaaactgggctggggaaggcagctcccacctggcagaggatgcccttctgccccctgacaggagggaggagaccaccgcatccccgacttttcagccctcacgttgccatctggtggctttgctgcagacactgccatgatctgagtggtctttggcaatcacgcattggcgggagtgtgaggttgcggggaaagagggactgaccatgggcctaggtggggaggcctggccactgtgcccacagcttaggaagggacagtcagagctcctctttgttgctatcgacggactgacccagaggcccttggagccagggggaacctaagtggctcttggctcgccaagctgctggctgctgtcctccaggcgcctgcctgtgggggcatagtcccgcaggagcctgctctccactctgtgctgccaaaggctctcggtactcacgagtccctgcatcctcaggtacccctgctggcaaaagggtggcaacttctggcgcgtgagggcgaacaggaagcaggactctgcatagaagcttcgcaaatcggtgtcccaaacagttctcccaggaagcgccctcagaggtaggatgtgcccgatcggggcagtccagtctgttaagaagtcttcccacgatgtgatggatggccgtgggccgaggcaggggccagtgtgcagggcggaacctcacctcctgtttccttcaacaggatgacatcggccagcacaccgaacatctggtagagcccagaagcctcattcacgcgccgcacgatggagctggtcagctgtgtgatggggagctcagtggcgggccaggtgacgctgtggtggcggtgctccaggagccggtgaacagcacgcactggaacagccagagggaggaacggcacgctgca

SEQ ID NO: 828 - DNA, 407 bp, Homo sapiens
  misc_feature (1)...(407): n = a,t,c or g
ccgggcgccatggcggttctactggagaccactttaagcgacgtcgtcatcgacttgtacaccgaagaacggccgcgtggtgaggcttgagccccactcacctgtcgccggggcccccgagcttgtctccctactttcccttctctgcgcagnccagggcagagattggctaaagctcgagcttctgggctgctggtgcccgcgactgggctattttattaaccggccttggctagaaaagtttttgtgacgggaattcgtttgagccttggcagcccttctcccgtattttgtgttggccacgccggtggacggtgcttgcggacattaattgcctttggnnnnnnnnnnnnnnnnnnnnnnnnnnnnnnattcaagctgcacatacaatacccatagcttgtgtg

SEQ ID NO: 829 - DNA, 2247 bp, Homo sapiens
  SIMILAR (904)..(1659): 991254mologous to Escherichia coli 100 pct identical to sp:YI5B_ECOLI,accession number AP002527,Smith-Waterman Score=1309.
atggctgcctacaaattggtgttgatccagcatggcgagagcatgtggaatccggagaaccgcttcagcagctggtacaacaccgacctgagcccagcgggccataaggaggcgaagtgtggcaggcagcactctgggggtctgatcggtctcaataaagcagaaactgctgcaaagcatggtgaggcccaggtgaagatctggaggcactcctatgatgtcccaccacctctaatggagcccgaccatcctttctacaacatcagtaaggatcgcaggtttgcaaacctcactgaagatcagctaccctcctgtgagagtctgaaggacactattgccaaggctctgcccttttggaatgaagaaatagttccccagatcaaggaggggaagcagccaaaatacccttttgaaaagcgccttgaagtcgtgaatcactacttcacaactgatgatggttacaggatcatctcggcacgttttggtgtcccccgaacccaggtcaggacatgggttgccctctatgaaaaacatggagaaaaaggtttaattcccaaacctaaaggcgttagtgctgatccagagttgcgtattaaggtcgtgaaagctgtgatcgagcagcacatgtcccttaatcaggctgctgctcactttatgcttgctggtagtggttctgtagccaggtggctgaaggtctatgaagagcgcggagaagctggtttacgcgcgctcaagattggcaccaaaagaaacattgcaatatcagttgatccagaaaaagcggcatcagcattggagctgtcaaaagaccgacgcattgaggatcttgaaaggcaagttcgatttcttgaaacgcggcttatgtatctaaaaaagctgaaagccttagctcatcccacgaaaaaggctgcggagataccgcgcagtacgttttattatcatctaaaggctctcagcaagcctgacaagtatgcggacgttaaaaagcgtattagtgagatttatcacgagaatagaggccgatacggataccgtagggtaacgctgtctcttcatcgagaagggaaacagattaaccataaagctgttcagcgcctgatgggaaccctctcacttaaagcagcgattaaggtcaagcgataccgctcttacagaggagaggtagggcaaaccgcccctaatgttctccaaagagatttcaaggctacgcggccaaacgagaagtgggttaccgatgttactgaatttgcagtcaatgggcgcaagctgtatttgtctccagtaatagatctcttcaacaacgaagttatttcttacagcctttcggaaagaccagtgatgaacatggttgagaatatgctcgatcaggcattcaaaaagcttaatcctcacgagcatcctgttctgcactctgaccagggatggcagtatcgtatgagaagatatcaaaatatccttaaagaacatggtattaaacaaagcatgtccagaaaaggcaattgtctggataatgctgtggtggagtgtttctttggaaccttaaagtcggagtgtttttatcttgatgagttcagtaatataagcgaactgaaggatgctgttacggaatatattgaatactacaacagcagaagaattagcctgaaattaaaagacctatatgcctcgtgtttaactgtccaactttttggggtcagtacactggagggcctctctgaagaggctatcatggagctgaacctgcccactggtattcccgttgtctatgaattggacaagaacttgaaacccatacagttcctgggggatgaagagaccatgcgtaaagccatggaagctgtggctgcccaggtggaagatgaatataacctctatggtgatgtgacaactgtttcttccctgaccccagagaagctggctccagaagtcaaagaaaatgttcctgaaaggctaaatatccttttgcaagttggtggaagatctaggaccaatcttaatcgcgttagagttccaattcacaagcatccctcaataagggatcccaattcacaagcatccctcaataagttaacagacaaaatggattctctgtggctcaaaagtaaaaacagacccaaggggccatggaagggtgagggagcagtcaagctcttcgtgtccttagagaatgctgcaaaacctgtttttctgcaaccaagtcaaagaagagttcctggaaacaacggcagctgggaattccccagttga

SEQ ID NO: 830 - DNA, 551 bp, Homo sapiens
  SIMILAR (551)..(297): 731254mologous to Mus musculus phosphoglycerate mutase 1,accession number AF283667,Smith-Waterman Score=310.
acaatgggaataccagtcggcaggttcaagctccatgatagcctcttcagagagaccctccagatgcttgacaatgccccggaggctgttgccatgggctgcaatcagtacacgtttcccctccttgatctggggaactatttcttcattccagaagggcagagctctggcaatagtatccttcagactctcacaggagggtagctgatcttctgtgaggtctgcatacctgcgaaccttactgatgttgctgtagaaaggatggtcgggctccatcggaggtggtgggacaatccataggagcgcctccagatcttcacctgggcctcaccatgctttgcagcagtttctgctttattgagaccggttagacccccatagtgccgctcattgaggcgccaagtcctcaccactggcagccacatctgatcaatggcatctagcactgtccagagggtccggatcgctatataaatgcactgaggtgaagcagatgtcaaactcatagccagcatctcgtagcgcctgcccgccgccttcgcctcctcgtg

SEQ ID NO: 831 - DNA, 3200 bp, Homo sapiens
  SIMILAR (106)..(594): 851254mologous to Mus musculus putative,accession number AK009905,Smith-Waterman Score=730.
atggctgcctacaaattggtgttgatccagcatggcgagagcatgtggaatccggagaaccgcttcagcagctggtacaacaccgacctgagcccagcgggccataaggaggcgaagtgtggcaggcagcactctgggggtctgatcggtctcaataaagcagaaactgctgcaaagcatggtgaggcccaggtgaagatctggaggcactcctatgatgtcccaccacctctaatggagcccgaccatcctttctacaacatcagtaaggatcgcaggtttgcaaacctcactgaagatcagctaccctcctgtgagagtctgaaggacactattgccaaggctctgcccttttggaatgaagaaatagttccccagatcaaggaggggaagcaggtactaattgcagcccatggcaacagccccccgggcattgtcaagcatctggagggcctctctgaagaggctatcatggagctgaacctgcccactggtattcccgttgtctatgaattggacaagaacttgaaacccatacagttcctgggggatgaagagaccatgcgtaaagccatggaagctgtggctgcccaggtggaagatgaatataacctctatggtgatgtgacaactgtttcttccctgaccccagagaagctggctccagaagtcaaagaaaatgttcctgaaaggctaaatatccttttgcaagttggtggaagatctaggaccaatcttaatcgcgttagagttccaattcacaagcatccctcaataagggatcccaattcacaagcatccctcaataagaccagggaagatagaaaggtagaagccatcatgcatgcttttgaaaacttagagaaaagaaagaagcggcgggatcagcccttggaacagagcaactctgatgtagagattactacaaccacctcagagactcctgttggtgaagagacaaaaactgaagcccctgaatctgaagttagcaactctgtttcaaatgttaccatcccaagcaccccacagagtgttggtgtgaatacccggaggtcttcccaagcaggggatattgctgcagaaaaactagtccccaagccacctccagcaaagccttctaggccccggccgaagagtcgaatttctcggtacaggaccagttcagcccaaagactaaagcgtcagaagcaggccaatgcacagcaggcagaattgtcacaagctgccttggaagagggaggaagtaacagtttagtaactcctactgaagctggaagtctagacagttcaggagaaaacaggccattaacagggtctgacccaactgtggtgtcaattactggatcccatgtcaaccgtgctgcatctaaataccccaaaaccaaaaagtatctagttacagaatggttgaatgacaaagcagagaagcaagagtgccctgttgagtgccctttacgtatcacaacggatccaactgtactggcaacgaccctaaacatgttaccaggtcttatccattccccggttaatttgcaccacccccaaacactacattcgctttggctcaccctttatccctgagagacgtcgaaggccccttctgcctgatggcacattcagctcctgtaagaagcgctggataaaacaagccttagaagaagggatgactcaaacatcatctgtaccccaagagactagaactcagcacctataccaaagcaatgagaatagtagctcttctagtatctgcaaagacaatgcagacttgttgagcccattaaagaaatggaagtctcgctatctgatggagcagaatgtcaccaagttacttcggcctctgtctccagtcacaccaccccctcccaaattcaggctcaaagagtccccagctggccacacctggctcatctcacccaggaggaagaggagtgtcgaaatggatacaggcctcatgttttcaccagtcaacatctcttactactgctagtcgctgcaacactcctctacagtttgagctttgtcaccgaaaagacctggatttggcaaaagtaggataccttgactccaacactaacagctgtgctgatagaccttccctactcaactcaggtcattctgacctggctcctcatccctccctcggacccacttctgagactggtttcccaagcagaagtggagatggacatcagaccctcgtgagaaactcagaccaggcatttcggacagagttcaacttgatgtatgcctactcccctttgaatgctatgcctcgagcagatggactgtatcgaggatctcctctagtgggggatagtttatgcctttacatttggatgggggatattgttcccctgcagaaggattttccagcagatatgaacatggcttaatgaaagacctctctcgtggatccttgtcacctggcggtgaaagggcctgtgaaggagtcccatctgccccccagaacccaccacagaggaaaaaagtatccctgctggagtaccgaaaacggaaacaagaagctaaggaaaattctgctggtgggggaggtgactctgcacagagcaaaagcaagtctgcaggagctgggcaaggcagcagtaactccgtttccgacactggtgcccatggtgtgcagggatcctcagcccgaactccatcttcccctcacacaaaattcttcccatctcattcctctatgtcccatttggaggcggtaagcccatcagattccagaggcacttcttcatctcactgcagacctcaagagaatatcagcagtaggtggatgggttcccacatcagtagaacgactccgagaaggagggagcatccccaaggtcctccgaagcagcgtgagggtggcccaaaagggagagccctctcccacatgggagagtaacatcacagagaaagactcagaccctgcagatggagaaggcccagagacattaagctcagcactctcttaaaggagcaacagttttacagccctttccagatacagctaccagactcgttggccccatttacggggacaccagggtattttagcagccagccacattctggaaacagcactggcagcaatcttccaaggaggagctgcccttctagtgctgctagccctaccctgcagggaccctcagactcgccaacctcagattcagtttctcagtccagcacaggaactctga

SEQ ID NO: 832 - DNA, 1412 bp, Homo sapiens
  SIMILAR (429)..(986): 651254mologous to Homo sapiens unnamed protein product,accession number AK001569,Smith-Waterman Score=533.
  misc_feature (1)...(1412): n = a,t,c or g
gatgtgcgggnggnnnngggccctaatacctccgaaactgaaacgtccgcanggcacgaggcatttggaggcggtaagcccatcagattccagaggcacttttttatctcactgcagacctcaagagaatatcagcagtaggtggatggttcccacatcagtagaacgactccgagaaggagggagcatccccaaggtcctccgaagcagcgtgagggtggcccaaaagggagagccctctcccacatgggagagtaacatcacagagaaagactcagaccctgcagatggagaaggcccagagacattaagctcagcactctctaaaggagcaacagtttacagcccttccagatacagctaccagctcctgcagtgtgatagtcctcggacagaatcacaaagcctccttcagcagagttcctcccccttcagaggacattcctacacagtctccaggatacagttatcgaactactgcactgagacctggaaaccccccctctcacgggtcttcagaatcatccctctcttccacgtcctattccagccccgcccaccctgtgtccacagactcgttggccccatttacggggacaccagggtattttagcagccagccacattctggaaacagcactggcagcaatcttccaaggaggagctgcccttctagtgctgctagccctaccctgcagggaccctcagactcgccaacctcagtattcagtttctcagttccagcacaggaactctgagnttccacctcctttcctcagaaattctaggtcgtcattggccatcagacttacggactaatcagtctgcccagtgctggggcagtcagctggttaccagggcctccagggtatctgcggtttccaattcacagcactaccccacaccgtgggagtggggttttccacccagtaccgaattcccagcccacttcaagggtcaaggagtcaagactcaagacggggacttttcctagggcttctgggatttgggggcaaacagaactgaatgagcccatagctggctttccttccagctgcctctgggaacccctaggcccgagcatattgcctgaggaacgggggggtacaagggtgcccagaggattgggtcctggtggacaagaaaacaagaacttgtggtcacacattgggcctctggccttggagaaagcctgtaaattctttgtcttgaagcagaagactataaagaagtttctccctgctgtcaagggtacattgttgacaagcaaatggggtttcggctagtaccggttctaagtgctatgagttgtggtgataacctccgtctcccatccttgcctgtagcccgtagatcacttgtgcagtgaggacatccttttaaatttaaaaaaaaaaaaaaaaaagtcgagc

SEQ ID NO: 833 - DNA, 414 bp, Homo sapiens
gctgaaaacacaattctgagtttaatgttttctggaaagagctgggggagcttaagcagcgagtgtggcgctctgcttccgggcacgcccacagcaactcggcttcagagtctgacccgcagaagttctttaaagagagggacttagggaccccagatcccggcagccaggcccagagagggaagcaggattgggacgtgtacttcctcttgactctggtctcaggactgaggctcacaggagcctgagaaacagacaagcgggagtttctagccccttccagctctcccctgctctgaagcctagaaaaagcccctctcaggctactggtcagaggcctggatgagggcagtgggggcagaaggggtctggatcagccttgctgccaaccaacacaacacacgtggaagcggt

SEQ ID NO: 834 - DNA, 502 bp, Homo sapiens
  misc_feature (1)...(502): n = a,t,c or g
gaaaacacaattctgagtttaatgttttctggaaagagctgggggagcttaagcagcgagtgtggcgctctgcttccgggcacgcccacagcaactcggcttcagagtctgacccgcagaagttctttaaagagagggacttagggaccccagatcccggcagccaggcccagagagggaagcaggattagtcaaaaccaggtgggggatggggggaaggaaganaggcancgggggtttgggggcccancgggtancaagagtgaccctgggcatcaacatggggtgaggtggagaggggctatggggttcctggagatcaaagtctggtcctgcaattgccacaggggctattgcctctcctgccacccagctcctgagagtgaatcctgacacgggtgattgggacgtgtacttcctcttgactctggtctcaggactgaggctcacaggagcctgagaaacagacaagcgggagctttctagccccttccagctctcc

SEQ ID NO: 835 - DNA, 1387 bp, Homo sapiens
cattctatgggatggaaggagcatgtagaccgtggaggacacacaaaaggaatggtatttgtgtctttacagccagcctgctggctcccaagagagaggccttttcagttgagactctgcttaatagaagatccactgttaaggctctgtggccaggggaggggccgggggcaggaaactacctctggcttaattcttttaagccacgtaggaactttcttgagggataggtggaccctgacatccctgtggccttgcccaagggctctgctggtctttctgagtcacagctgcgaggtgatgggggctggggccccaggcgtcagcctcccagagggacagctgagccccctgccttggctccaggttggtagaagcagccgaagggctcctgacagtggccagggacccctgggtcccccaggccttgcagatgtttctatgaggggcagagctcctggtacatccatgtgtggctctgctccacccctgtgccaccccagagccctggggggtaggtctccatgcctgccacccctggcatcggctttctgtgccgcctcccacacaaatcagccccagaaggccccggggctttggctttctgttttttataaaacacctcaagcagcactgcagtctcccatctcctcgtgggctaagcatcaccgcttccacgtgtgttgtgttggttggcagcaaggctgatccagaccccttctgcccccactgccctcatccagggcctctgaccagtagcctgagaggggctttttctaggcttcagagcaggggagagctggaagggggctagaaagctcccgcttgtctgtttctcaaggctcctgtgaagcctcagtcctgagaccagagtcaagaggaagtacacatcccaatcacccgtgtcaggattcactctcaggagctgggtggcaggagaggcaatagcccctgtggcaattgcaggaccagctggagcagggttgcgggtgtctccgcggtgctcttcgccctgcccatggccaccccagactctgatctccagggaaccccattagcccctcttcaacctcacccccatgtttgatgccccagggtcactcttgcttacccgctgggcccccaaacccccgctgcctctcttccttccccccatcccccaccctggttttgactaatcctgcttccctctctgggcctggctgccgggatctggggtccctaaagtccctctctttaaagaacttctgcgggtcagactctgaagccgagttgcttgtgggcgtgcccggaagcagagcgccacactcgctgcttaagctcccccagctctttccagaaaacattaaactcagaattgtgttttcagcaaaaaaaaaaaaaaaaa

SEQ ID NO: 836 - DNA, 636 bp, Homo sapiens
  SIMILAR (123)..(1): 921254mologous to Homo sapiens Human secreted protein sequence encoded by gene 9 SEQ ID NO:69,accession number AAB52020,Smith-Waterman Score=202.
ttttttttttttttttctgggtgcaaggaacattttattccataactgtctccaccgaagccgcagaagcaaagccaggagcagaatccattctgccagcgctgggctctggggaaacaattggggcccccacaaggggggcaagaaggaaggggcctcccgactccttggtcctgcctggggtgctcctgtccctctttttgtgggggggaacctaccccaccctccccctcccacctcagccacagaggaacaaggggagacaaactgagggctcttgcagtcccccgttcaagggccaacataatagtcgtgtgggccccagcccagctaggcgcatcctctgcggcatggcagcggtgaccaagcacagccaacgtcagctccgctccctgccgtctgagagctgaccacaggcagatgagatgcccactccctgttgccataacacaggaaaggcgttggcggccaccctcccaagaaggcatggagcctgggggcccccagccaggcccctcaaggtcaacacagagctcagtggctcacctaacatctgggacggctgtgaggccagggctgggtagccctccctgactctggagagggaagaattgcaggaaggaggcccctcgtgcc

SEQ ID NO: 837 - DNA, 1980 bp, Homo sapiens
  SIMILAR (272)..(733): 591254mologous to Homo sapiens unnamed protein product,accession number AK025033,Smith-Waterman Score=404.
  misc_feature (1)...(1980): n = a,t,c or g
ggaaattgaatctgaagagtgctgcccgaaatctgtaggaagttggtggcaagggacagcactcacactcttctggtcatgatctctgatctccacctgaaatgacaataaaaaaactggtccaacgaagatctgtgctcagcacttcagccatcaggactaatccatcgatgactggaaaagaggctagctttgaggaaaacagcctgggctcttgggagcagagtccagcgggtgtgagtgaggctgacttgccgacggtcggcaggtaatggctctcagccggcgaggcggntcccacagctctcctcccagggcagcctgaggaggaggaggccgggtgccctgtttggtggcagctttcaaacctagggatacctgaaagctgtttgagcaacacctttatgaaatgttgccagagcagcaacacttcccatgtgggcacagccccgggaaaaccgggtaccaagtgagcaaggtggcaggacccacccaagcctgatacgcatctgggcccgccgggctcagccaggggaggctgctacggctgcccacttcccagcaccgtctgtcaggcttgaacccctctgtgctgttcccttcctgggctaatagggagaccctttcgcagggcacccactgtttcaacttgaccctcccaccccctgctactctcctccacacacccctccgttccgctagcctaccctgtcagcctttcaataaaagttatggcacaaatgtgaacacctgagatggagctgaacatttcttcactttgttctttttctgaagtcaaactcttatcaaatgccctaaaattattaccacccaagaggaaacagggaaaaaggttacatgtttttgtttactgagagtaagatcacctggcatctgggaaggacggggctgggtaaattgggtttgggctacaggaacaggaaaggaaaacaaaaacaaacctcgtaagggaagtatcgcactcagacaccaccacttcctagagccaaatgagcaatcccaaactgcaagtgccgtaagtgggcctgtgacgtcacaccgcccggcccgaggtatcgcattgtgcggggggaggtccacactacagctgtcctctcgtctaggaaggcaccaccttcgcttttcatgtcccgtgtgttttgggaaaaggcagtatgggtgtgttcatgttttaggcgggcgaacacttccctccctctgtccttgaggttgtaatataaaaactgtggtttctgtacgtgtggggttgggaattctctgacgggttgctcgttcatatgcacaagcttaacgcttgagttgctgaactgtcgttcacagctgcgtgtctgcatggtgtcgcatctgttgtacctttggggaaaatttgtatgtaaatgtacagaaataaaaacgttgccccattaacagatttcctctggaatgtcttcccttacctcacctgatgggtatcccacccgaagggcattttcacctacccattaatgggtgagtaataaaatcctccgtgttcaattcaagaccctcactgcgtcacctactttgaaacgccccctgtaaacctgtgtccttccactcggccccccgaggtggggtgggagggaggcccctcctcacctcctgccttcgaagcccctggtcttaaagggtagtcagaggcaagagcctggattaaacacacactgtttacccaagtgcccactcctcagacccacctgagagacggggggcccatcagtaaaattaagaggaattttttttcccttgttcgtgtatgttctgctgatccgtggcctgaaggttcctagagacgtcaagaaatgaatatcttacactgtgattcttgtgaggaaagactggtaacccaaaacttctcttctctaatgtatttttctaccgcaaatgacaatatttctttaataaacgtattctataccaaactcttctctccataaaaaa

SEQ ID NO: 838 - DNA, 1098 bp, Homo sapiens
  SIMILAR (1095)..(976): 701254mologous to Homo sapiens Human secreted protein, SEQ ID NO: 6913,accession number AAG02832,Smith-Waterman Score=164.
cagatctgattacagactagtgtaaaaacagctacatgtatgtagctggttggggatgatatgcctgtatgttggactttgcttttgaatatatgtatgcaggatatcatcaagtttcaacatcttgacttgtgacccccaatgtcaacagcttttttaaaaaacaaattcctgcagtaatgaccaaaacccattttaaaaattgcttgacaactgcactcaactgcagctcttacattaacttcaccatggaaaccagttccaactccaggaagtcaccattcaaagaattagatcaactagcccaaccacttcattgtacagatgaagactgaaagccaaagatgtgaagtggtttccacagtatgatacagcctataagggtaaagctgggttaaaaatgcaggtttcctggatttggggccccatggccttgccagtgaaaaggttatttttggactcagagggctttaaaataaattttaagatgtatcagatacacaaacatttaatgggcacctatgggttggacactttgagaattcttaaaagtataagtgggagcaaaatgtatgcaaatttatcacaaactatttaaagcaacttcttggaggcttacaaaccacaatttaacagaaactgtagatggttgaactactagtgacttttttccccttttcccagttacaattatactttcagctaacatatgccagtttcacagaactattaaaggtcccccttatggtacttttttatggcatgcccatgaaaaagcactttcttaagcctacagtatcagatcaatgggaaaacaacagaaaacttaagaggagaattttcccgttaattttcttgcagaaaagtataagtctaaattgcccattgccataaattttgccttgtactcagagaagcaacatgcactggctcattttatgtgcaaagaaaagatttcaccattaaaaaaattaacttggctaggtatggtgtctcacacctgtaatcccagcactttgggtggctaaggcagatagactgcttgaacccaggagttcaagaccagcctggacaacatggtgaaaccccatctcttta

SEQ ID NO: 839 - DNA, 2088 bp, Homo sapiens
  SIMILAR (1166)..(1246): 921254mologous to Homo sapiens dJ12G14.1 (novel cyclophilin type peptidyl-prolyl cis-trans isomerase),accession number AL078581,Smith-Waterman Score=119.
atgcccactggggacataagtgtcttcctaagaataaaggtaatagacagctggtttaaaatacgtctgagcgaaatatacagttatgcatacaagaaactggcatcagaagcacctgcaggactctccaacccggactgctgggccccgcccccagaggccgggctgagtccccaggggatgcggacaccgccgatcgcgccccgccgtgagaacttctcctccaacatccgacaaaaacattacgtcgcgcgagggccaggccgagcaggcacaagtggcctggaaatgcgcgaagtgggcaacttccacacttcccgagcacacaaacattccttgcccaagcgctggctctaccccgggaaggcgccattacgaaggcctgatcaccggcaaccgcgcgcttcgacggcaaagccccgtcaggtcgcgcgccggcttgggccgccggagagtcggtgtggagtggctcgaggctcactcacagcgacgcagccccagtgggtccctttcctcttacctcggcctcccacgccgcccccatttcctggggtgcttctccccacacctccttcgggggcccggacccccgcccctgcccgccggtgggatgtgggaagcgtcactgtggacagcccgggcctcccggagagtcggagtcgtaaagcggccagccaggcccgccctgccctacctgtggggctccggacagcggcggcggctcgggggcgcccgtcgtcagccagccggaggcgggtagcgccacgaacagcaggagccggagggcgagcgaccccggtggagcgccctccatcttggacaacccgggcagagggcagccgcggccgggagtgtgggaaggctccatcagaggaattaaacctcagtactcccctacagaagcagaatgggccacttcttgagggtatacatttcggccctcaggatggtgacagtcggaggatggcaagctccacttgccagcctctagccaatggaaaaataggaggttatccaggagaagactgccaaatagacttcacccacatgccgaagacaaagggcatccaatacctgctggtatggtcagacaccttcactaactgggtagaggcattcccatgccgtacagaaaaagcctctgagcggaggaggagcgggcgccatggcggttctactggagaccactttaggcgacgtcgtcatcgacttgtacaccgaagaacggccgcgtgccaactgtatggtgatcaagcaagcttttttgaggcagaaaaagtcccaagaattaagcacaagaagaaaggcacagtgtccatggtgaataatggcagtgatcaacatggatctcagtttcttatcaccacaggagaaaatctagattatcttgatggtgtccatacggtgtttggtgaggtgacagaaggcatggacataattaagaaaattaatgagacctttgttgacaaggactttgtaccatatcaggatatcaggataaatcatacggtgattttagatgatccatttgatgaccctcctgatttattaatccctgatcgatcaccagaacctacaagggaacaattagatagtggtcgaataggagcagatgaagaaattgatgatttcaaaggaagatcagctgaggaagtagaagaaataaaggcagaaaaagaggctaaaactcaggctatacttttggagatggtgggagacctacctgatgcagatattaaacctccagaaaatgtactgtttgtgtgtaaattgaacccagtgaccacagatgaggatctggaaataatattctctagatttgggccaataagaagttgtgaagttatccgagactggaagacaggagagtccctctgttacgcttttattgaatttgaaaaggggggcggagcctatggaaaaacgccagcaacgcggcctttttacggttcctggccttttgctggccttttgctcacatgttctttcctgcgttatcccctgattctgtggataaccgtattaccgcctttgagtgagctgataccgctcgccgcagccgaacgaccgagcgcagcgagtcagtga

SEQ ID NO: 840 - DNA, 1561 bp, Homo sapiens
  misc_feature (1)...(1561): n = a,t,c or g
aatnaaaatccaaggccctctcaaccccngcaacttcctgtccttggaaaccttgtcccctccctcagctgggcnaagcttctccctggtttaacttgaacctttangtgggcaaaactggggaaagggcctgcaaaaagaaaccgactgcacctttcttgcaggggattctgtgccaaaaaacagatagaccctttgtgcccaatgtgggccttggtaagcccgcctagcgggatttgcctagcagatcacctgatcttcctccctggcaggggagtggtggggatcttactactgggccttccgggcctgctcctgcccaggacccagtcggggaggtgaggatgctggtttagacccaatcacttggacgaatctgtcggcggcccctgtaacttgccggatggcggggtggagagacgaagctggagggagcagagcgcacaaacatttatttacaaaagtcccagttacatatgatacaggctttttacacacagtagttgaaacggaattattttatctatttttactaccagaagggaaagaaaaagtttaatgaactaatcgtttcttgtttttatacaaagtgacagatcatgcacatttttttcagtttttaaatattttgctaagtgcaaatactaggattcccctctccagttttaagggcaagtaaggagggggctgtggctggggagcctcacgcccttgcggcaaagccctgcagggcagagagagggaaccagctgcctcagggttgcctggtgtctgacctgctctctgggcactgggcacgggccctttgctggctggtctggaagacccccagtgcttctctccccaatgctgtcactggtccaggcaggagcccgaggttcaggccctgcctctggacagaggggcctggagaaccagggtgggtgctcacggcagccctgtggtcccccgtgcctggctcggggaggatcctcaggaatcagggaccctccaaggaaagaggccgccgctccttccccaccagcccagtgtggccagaacagctggaactcctctcaaatgacccacccctgggggtttggccttaaggagaaacatcactctgggctccccctccccactgccagggttgaggccagcacctgtctagggctgtttctgcagctgctgcctgctccctttgtcctgcctggggctcttgctggagccacgtgcctagggtacagggcagagggagctgaggctcccagggcctgaggtcacctcttcagctgtgatgtctacagccgccctctgctcccagagatcctccctggggaagcacagggagcatatttaaggtaccgaagacaatcctgttgctgccgcatggagcctgcctttccaaggcactgtcgttcaggctagtagcaaagttcaggcagtccaacaggtatgggcgccagcaaggacatagcagcagactgcccccaagcccggcctccctgcgcacccttaccccaggtccaggtgaccacctgtcttcaaagcctccatcctgggcaggggcagtaacaataac

SEQ ID NO: 841 - DNA, 440 bp, Homo sapiens
  SIMILAR (340)..(14): 831254mologous to Sus scrofa glucosephosphate isomerase,accession number Z28396,Smith-Waterman Score=454.
  misc_feature (1)...(440): n = a,t,c or g
tagaccttatgtgcagcagcctctcaaggncctctggactcttgcccgcagcctggagctcctttcgggcctcctccgtcgattttcccctcatcagggcctctgtctgggccaagaagttggccaggaggatcttgtgatgcagacccttccgtatggggtgctgggtctggaccgggatgaggaagtcacagggtatcaatcttgntgccttggtggatgagctggtaaaaagcatgctggccattggtcnctggctccccccacacaatggggcctgtctggtggtccacacgggttccagatttggtgatgtatttcccattggacttggccaagtccaccanatccgcatcacgtcctccgtcaccaggttcttggagtaatccaccaggatatgcccatggttggtgttgagggtcaagctgaagtggttgaag

SEQ ID NO: 842 - DNA, 1558 bp, Homo sapiens
  SIMILAR (563)..(1321): 941254mologous to Homo sapiens sperm antigen-36,accession number AF187554,Smith-Waterman Score=1286.
gaaacacagcagtggagagcaagacaccagcacgctgccctcaccacctctcctcaccacggtggaggatgtgaaccaggataacaaaaccaaaacgtggccacccaaagcaccctggcagcacccttccccgcttcccagcacgctgcccagccccagcgcaccactctatgcagtcaccagccctggcagccagtggaacgacaccatgcagatgctgcagtccccagtgtgggccgcaaccaacgactgcagtgccgctgccttctcctatgtgcagaccccaccccagcccccacccccaccagcacacaaggcagcacccaagggcttcaaggccttccctgggaaggctatgtacaatggggaaaatgtttttaagcatctagcaaaggattcacggggctctggtaatgaagccccgaaacgacaagactggatcgcgcagggtagggccaacaccagggacaaacccccggcctcttgggggcgcgctgtttctagggttcctggtggtcgggagaggacactggacaagactgtggcagtggaaagtcccgccatggccgctctcacccgggacccccagttccagaagctgcagcaatggtaccgcgagcaccgctccgagctgaacctgcgccgcctcttcgatgccaacaaggaccgcttcaaccacttcagcttgaccctcaacaccaaccatgggcatatcctggtggattactccaagaacctggtgacggaggacgtgatgcggatgctggtggacttggccaagtccaggggcgtggaggccgcccgggagcggatgttcaatggtgagaagatcaactacaccgagggtcgagccgtgctgcacgtggctctgcggaaccggtcaaacacacccatcctggtagacggcaaggatgtgatgccagaggtcaacaaggttctggacaagatgaagtctttctgccagcgtgtccggagcggtgactggaaggggtacacaggcaagaccatcacggacgtcatcaacattggcattggcggctccgacctgggacccctcatggtgactgaagcccttaagccatactcttcaggaggtccccgcgtctggtatgtctccaacattgatggaactcacattgccaaaaccctggcccagctgaaccccgagtcctccctgttcatcattgcctccaagacctttactacccaggagaccatcacgaatgcagagacggcgaaggagtggtttctccaggcggccaaggataccaaagtgaaggagtttggaattgaccctcaaaacatgttcgagttctgggatgtaagtacaagcacttctgcactgggtgaattaagtgtcctttgccaagtcatggctgttgagaggcccatgaggtcaggcttagcacctcagttcatggcgcccttcacagaaactcaggcagaaaacttgcgtgtcatccttgactcttcctacctcacccacaccccactgccgattccccaccagttgctgccgcactttgttcagctctctgctcatcagaagcctcattga

SEQ ID NO: 843 - DNA, 2659 bp, Homo sapiens
  SIMILAR (89)..(1213): 351254mologous to Sus scrofa glucosephosphate isomerase,accession number Z28396,Smith-Waterman Score=359.
ggcacgaggcgcgcctcgcttgctgcgcgctgccggcgctccttcctcctcggctcgcgtctcactcagtgtaccttctagtcccgccatggccgctctcacccgggacccccagttccagaagctgcagcaatggtaccgcgagcaccgctccgagctgaacctgcgccgcctcttcgatgccaacaaggaccgcttcaaccacttcagcttgaccctcaacaccaaccatgggcatatcctggtggattactccaagaacccttggtgacggaggacgtgatgcggatgctggttggactttggccaaagtcaaggggcgtggaggccgcccgggagcgaatgttcaatgggtgagaagatcaactacaccgagggttcgagccgtgctggcacgtggcttctgcgggaaaccgggttcaaaacacaccccatccttggttagaacggcaaggatgttgatgccagaggtcaacaaggttctggacaagatgaagtctttcttgccagcgtgttcggagcggttaacttgaaggggtacacagggcaaagaccattcacggaccgtaatcaacatttggattggcggctccgacctgggacccctcatggtgactgaagcccttaagccatactcttcaggaggtccccgcgtctggtatgtctccaacattgatggaactcacattgccaaaaaccctggcccagctggaaccccgagtcctccctgttcatcattgcctccaagacctttactacccagggagaccatcacgaatgcagagacggcgaaggagtggttttctccagggcggccaaggatccttctggcagtgggcgaagactttttgtttgccctgtctactaacacaaccaaagtgaaggagtttggaattgaccctcaaaacatgttcgagttctgggattgggtgggaggacgctactcgctgtggtcggccatcggactcacttccattgccctgcacgtgggttttgacaacttcgagcagctgctctgcgctggctcactgtatggaccagctcttccgcacggacgcccctgggagaaagaacgcccccgtcttgctggccctgctgggtatctggtacatcaactgctttgggtgtgagacacacgccatgctgccctatgaccagtacctgcaccgctttgctgcgtacttccagcagggcgaacatggagtccaatgggaaatacatcaccaaatctggaacccgtgtggaccaccagacaggccccattgtgtggggggagcgcagggaccaatggccagcatgctttttaaccagctgcatccaccaaggcaccaagatgataccctgttgacttcctcatcccggtccagacccagcaccccatacggaagggtctgcatcacaagatcctcctgggccaacttcttggcccaggacagagggccctgatgagggggaaaatcgacggaggagggcccgaaaggagcttccagggttgcgggcaagagtccagaggacctttgagaggctgctgccacataaaggtctttgaaagggaaatcgccccaaccaacttctatgtgttcaccaaagctcacacccattcagcttggagcctggtcgcccatgtatgagcacaagattcttcgtttcagggtcatcatctggggacatcaacagcttttgacccagtggggaattggagctgggaaaagcagcctggcttaagaaaattggagcctgagcttgatggcaagtgctcaagtgaccttttcaggacgtttctaccaatgggctcatcaacttcatcaaagcagcagcgcgagggcccagagtcccaataaactcggtgctcatctgcagcctcctctgtgactcccactttttcttctcgtcccttttctccccgaagccggaattgattgttccttgaacacaaccacaaacacctctttgtttgtgggcttgaacccacgagcccttagcagggaaggctggtctcccccagcctaacccccagcccctccatgtctatgctccctctgtgttagaattggctgaagtgtttttgtgcagctgactttttctgaaaccatgttcacgttgttcacatcccatgtagaaaaataaagatgccacggaggaggttgtaggctcagcctctgattttttttttcctgtgatggtgctttatgtagcagagggcaggagcgctcagcaggacgcaggctgtgcctctgcggacacttaacactaagtggtgagcgggtctagagtggagcaaggtgccctgagaagacaatagtggggtgggggcacaatcagtcaggacggcaacttggcctgtgtcaccaaatcccaagactgttttccactcctcacctctgtgactggagaaattggatactctgttcactcgatggttctaaaaactgcattgagattatgtttgtttcgggtgaattccttgacaagaccccgaggatgactgccatctccctggcaagacgctcaggtagttcttttgctttaaaaaggcagatattgaaaactggaatttttttttttttgagtctcgctctggtcaccccagactggaagttcagtggtgcaatctcggctcactgcaacctccgcctcccgggagggctgaggcaggaga

SEQ ID NO: 844 - DNA, 582 bp, Homo sapiens; identical to SEQ ID NO: 329
  SIMILAR (384)..(548): 921254mologous to Homo sapiens PNAS-101,accession number AF274958,Smith-Waterman Score=256.
  misc_feature (1)...(582): n = a,t,c or g

SEQ ID NO: 845 - DNA, 1250 bp, Homo sapiens
  SIMILAR (686)..(1159): 441254mologous to Homo sapiens ribosomal protein, large, P0,accession number BC001127,Smith-Waterman Score=194.
cgagattcggcacgagggggaccgcgggatgggtgtcggcgtgaccaggcctgagctccctgtctctcctcagtgacatcgtctttaaaccccctcgtggcaatcccatgacgcaccgccgtgatgcccagggaagacagggcgacctggaagtccaactacttccttaagatcatccaactattggatgattatccgaaatgtttcattgtgggagcagacaatgtgggctccaagcagatgcagcagatccgcatgtcccttcgcgggaaggctgtggtgctgatgggcaagaacaccatgcatgcgcaagccccattcgagggcaccctgtaaaacaaccccagcctctggagaaaactgctgccttcatatccggggagaatttgggcttttgtttcacccagggaggaccctcactgagatcaagggacatgttgctggcccaataagggtgcccagctgctgccccgtcctggtgccatttgcccccatgtgaaagtcactgtggccagccccagaacactgggtctcggggcccgagaagacttctttttttccagggctttaggtatcacccactaaaaatctccagggggcacccattgaaaatcctgaagtgaatgtgccagctgaatcaagaactggagaccaaagtggggagcccagcgaaagccacggctggctgaacatgctcaaacatctcccccttcttcctttggggctgggtcatcccagccaggtgttcgacaaatggccagcattctaccaaacccctgaaagtgcttggattattcaccggaggaaaacttctgcaattctcggctttcctgggaggggtgtcccgcaaatgtttgccaagtgtctgtctgccagaattggcttacccaaactgttgcaatcagtaccccgattctatcatcaacggggtacaaacggagtcctggccttgtcttgtggagacgggattacacctttcccacttgctgaaaaggtcaagggcctttttggctgatccatctgcctttgtgtgctgctgcaacctgtgggttgctgccaccacagcttgcttcgctctgctgctgcagccccagctaaggttgaagccaaggaagagtcggaggagtcggacgaggatatgggatttggtctctttgactaatcaccaaaaaagcaaccaaccttagccagttttattttgcaaaaacaagggaaataaaggcttacttttttaaaaaaaaaaaaaaaaa

SEQ ID NO: 846 - DNA, 401 bp, Homo sapiens
  SIMILAR (35)..(169): 1001254mologous to Homo sapiens Kringle1 protein sequence,accession number AAY05219,Smith-Waterman Score=246.
tcgttcaatcacctgcaagacgaaggaggcaaggatgctgttggcctgggtacaagcattcctcgtcagcaacatgctcctagcagaagcctatggatctggaggctgtttctgggacaacggccacctgtaccgggaggaccagacctcccccgcgccgggcctccggctgcctcaactggctggacgcgcagagcgggctggcctcggcccccgtgtcgggggccggcaatcacagttactgccgaaacccggacgaggacccgcgcgggccctggtgctacgtcagtggcgaggccggcgtccctgagaaacggccttgcgaggacctgcgctgtccagggggaaggatttgaaagaacagcatgatcagaaagtatgtgagagggagatgcagcgaa

SEQ ID NO: 847 - DNA, 774 bp, Homo sapiens
  SIMILAR (1)..(771): 891254mologous to Homo sapiens Kringle1 protein sequence,accession number AAY05219,Smith-Waterman Score=1198.
atgctgttggcctgggtacaagcattcctcgtcagcaacatgctcctagcagaagcctatggatctggaggctgtttctgggacaacggccacctgtaccgggaggaccagacctcccccgcgccgggcctccgctgcctcaactggctggacgcgcagagcgggctggcctcggccccgtgtcggttactgccgaaacccggacgaggacccgcgcgggccctggtgctacgtcagtggcgaggcggcgtccctgagaaacggccttgcgaggacctgcgctgtccagagaccacctcccaggccctgccagccttcacgacagaaatccaggaagcgtctgaagggccaggtgcagatgaggtgcaggtgttcgctcctgccaacgccctgcccgctcggagtgaggcggcagctgtgcagccagtgattgggatcagccagcgggtgcggatgaactccaaggagaaaaaggacctgggaactctgggctacgtgctgggcattaccatgatggtgatcatcattgccatcggagctggcatcatcttgggctactcctacaagagggggaaggatttgaaagaacagcatgatcagaaagtatgtgagagggagatgcagcgaatcactctgcccttgtctgccttcaccaaccccacctgtgagattgtggatgagaagactgtcgtggtccacaccagccagactccagttgaccctcaggagggcaccaccccccttatgggccaggccgggactcctggggcctga

SEQ ID NO: 848 - DNA, 424 bp, Homo sapiens
  misc_feature (1)...(424): n = a,t,c or g
gctagggtcacagcccctaactcataaagcaatcaaagaaccattagaaagggctcattaagccttttggacacaggaccccagagaggaaaaagtgacttgcccaaggtcgtaagcaagctactggcatggcaagagcccagcttcctgacggagcgcaacatttctccactgcactgtgctagcagctcagcagggcctctaacctgtgatgtcacactcaagaggccttggcagctcctagccataaagcttccttttcagaacccttccacttgccaatggggagacgggttaatggggctttctatggagccatttggtttggggacctaaacctcaagtggtcttcttgtggtaatgatgctggagnnnnnnnnnntaccggttctaactttctataaaggatttctctatatacatg

SEQ ID NO: 849 - DNA, 2445 bp, Homo sapiens
  SIMILAR (99)..(899): 621254mologous to Homo sapiens Kringle1 protein sequence,accession number AAY05219,Smith-Waterman Score=769.
tctgactgcaaggctgggactgggaggcagagccgccgccaagggggcctcggttaaacactggtcgttcaatcacctgcaagacgaaggaggcaaggatgctgttggcctgggtacaagcattcctcgtcagcaacatgctcctagcagaagcctatggatctggaggctgtttctgggacaacggccacctgtaccgggaggaccagacctcccccgcgccgggcctccgctgcctcaactggctggacgcgcacagcgggcttggcctcggcccccgtgtcgggggccggcaatcacagttactgccgaaacccggacgaggacccgcgcgggccctggtgctacgtcagtggcgaaggcggccgttcctgagaaacggcctttgcgaggaccttgcgctgtccaagagaccaccttccaaggccctgccagcctttcacgacagaaattcagggaaacgttttgaaagggccaagtgcagatgaaggtgcaagtgttcgctcctgccaacgccctgcccgctcggagtgaggcggcagctgtgcagccagtgattgggatcagccagcgggtgcggatgaactccaaggagaaaaaggacctggggaactctgggctacgtgctgggcattaccatgatggtgatcatcattgccatcggagatggcatcatcttgggctactcctacaagagggggaaggatttgaaagaacagcatgatcagaaagtatgtgagagggagatgcagcgaatcactctgccctagtctgccttcaccagccccacctgtgagattgtgaatgagaagactgtcgtggtccacaccagccagactccagttgaccctcaggagggcagcaccccccttatggggcaggccgggactcctggggcatgagcccccccagtgggcaggagcccatgcagactctggtgcaggacagcccaccctcctacagataggaggaactaccactttgtgttcatggttagaaccctaccactcccccgcttttttggcgaaatcctagtaagagtgacagaaagcaaggttgccctgtgggctgagggtaaaggctgggtagggtccttaacagtgctccttgtccatcccttggagcagattttgtctgtggatggagacagtggcagctcccacagtgatgctgctgctaagggcttccaaacattgcctgcacccctggaactgaaccagggatagacggggagctcccccaggctcctgtgtgctttactaagatggcctcagtctccactgtgggcttgagtggcatacactgttattcatggttaaggtaaagcaggtcaagggatggcattgaaaaaatatatttagtttttaaaatatttcgggatggaactccctactgacctctgagaactggaaacgagtttgtacagaagtcagaactttgggttgggaatgagatctaggttgtggctgctggtatgcttcagcttgctggcaatgatgtgccttgacaaccgtgggccaggcctgggcccagggactcttcctgtttcataaggaaaggaagaattgcactgagcattccacttaggaagaggatagagaaggatctgctccgcctttggccacaggagcagaggcagacctgggatgccccagtttctcttcagggatggatagtgacctgtcttcattttgcacaggtaagagagtaagttagctaacctatgggaattatactggggggccttgtgagctgcttctaagaggctaacctggaaactaagctcagaggcaaggtaataaagcacttcagggcttgctccccaagtgggcctgatttagcaggtggtcctgcgggcggtcagggtagcaactttcttgaagggcactggggcctagggtcacagccccttaacttcataaagcaatcaaaggaaccattagaaagggcctcattaaaccttttggaacacaggacccccagagaggaaaaaagtgacttgcccaaggtccgtaagcaagcttactggcaatggcaaggagccccagcttcctggacggagcgcaacattttcttccacttgcactgtgctagcagctcaaccagggccttctaaccttgtgatgtcacactcaagaggcccttggcaggctcctagccatagagcttcctttccagaacccttccactggcccaatgtgggagacagggggttagttggggctttctatgggagccatctgctttggggacctagacctcaggtggtctcttggtgttagtgatgctggagaagagaatattactggtttctacttttctataaaggcatttctctatatacatgttttatatacctccattcctgacaccctgcatatagtgtgggaaattgctctgcatttgacttaattaaaaaaaaaaaaaagactccaaaaaaaaaac

SEQ ID NO: 850 - DNA, 492 bp, Homo sapiens
  SIMILAR (67)..(492): 951254mologous to Homo sapiens dJ12G14.1 (novel cyclophilin type peptidyl-prolyl cis-trans isomerase),accession number AL078581,Smith-Waterman Score=712.
gcggaggaggagcgggcgccatggcggttctactggagaccactttattttacgtcgccatcttttttgtacaccgaaaaacggccgcgtgcctgcgggaatttcttgaaactgtgcagaataaaatattacaattattgccttattcacaatgtacagagggattttatcatacaaactgtcgatactacagggactggccgtggatgagagtctatctttggccaactgtatggtgatcaagcaagcttttttgaggcagaaaaagtcccaagaattaagcacaagaagaaaggcacagtgtccatggtgaataatggcagtgatcaacatggatctcagtttcttatcaccacaggagaaaatctagattatcttgatggtgtccatacggtgtttggtgaggtgacagaaggcatggacataattaagaatattaatgagacctttgttgacaaggactttgtaccatatcaggatatcaggataaat

SEQ ID NO: 851 - DNA, 3960 bp, Homo sapiens
  SIMILAR (1120)..(1344): 971254mologous to Mus musculus ATP-binding cassette, sub- family E (OABP), member 1,accession number BC005422,Smith-Waterman Score=360.
  misc_feature (1)...(3960): n = a,t,c or g
ctgggtagacccacgcgtccggcaccgacattttgggcggtggccgtgagaacacgttgtttggctgaaaagcgaaggcaagagctgatgggggctctgtgctaccctccgcaaggggatcgttttctccaaaagagctggatattctttcgcccagttatggcagacaagttaacgagaattgctattggcaaccatgacaaatgtaaacctaagaaacgtcgacaggaatgcaaaaagagctgtcctgtagttcgaatggggaaaattatgcatagaggttacaccccagagcaaaatagcatggatttccgaaactctttgtattggttgtggtatctgtattaagaaatgcccctttggcgccttatcaattgtcaatctaccaagcaacttggaaaaagaaaccacacatcgatattgtgccaatgccttcaaacttcacaggttgcctatccctcgtccaggtgaagttttgggattagttggaactaatggtattggaaagtcaactgctttaaaaattttagcaggaaaacaaaagccaaaccttggaaagtacgatgatcctcctgactggcaggagattttgacttatttccgtggatctgaattacaaaattactttacaaagattctagaagatgacctagaagccatcatcaaacctcaatatgtagaccagattcctaaggctggcaaaggggacagtgggatctattttggaccgaaaagatgaaacaaagacacaggcaattgtatgtcagcagcttgatttaacccacctaaaagaacgaaatgttgaagatctttcaggaggagagttgcagagatttgcttgtgctgtcgtttgcatacagaaagctgatattttcatgtttgatgagccttctagttacctagatgtcaagcagcgtttaaaggctgctattactatacgatctctaataaatccagatagatatatcattgtggtggaacatgatctaagtgtattagactatctctccgacttcatctgctgtttatatggtgtaccaagcgcctatggagttgtcactatgccttttagtgtaagagaaggcataaacatttttttggatggctatgttccaacacgaaaacttgagattcagagatgcatcacttgtttttaaagtggctgagacagcaaatgaagaagaagttaaaaagatgtgtatgtataaatatccaggaatgaagaaaaaaatgggagaatttgagctagcaattgtagctggagagtttacagattctgaaattatggtgatgatgctaggggaaaatggaatgggtaaaacgacatttatcagaatgcttgcttggaagccttaaacctgatgaaggaggagaagtaccagttctaaatgtcagttataagccacagaaaattagtcccaaatcaactggaagtgttcgccagttactacatgaaaagataagagatgcttatactcacccacaatttgtgacccgantgtaatgaaagcctctgcaaattgaaaacatcattgatcaagaggtgcagacattatctggtggtgaactacagcgagtaacttttagccctttgacttgggcaaaacctacctgatgtctatttaattggatgaaccacctgccatatttggattcctgagcaaagactgatggcagctcgagttgtcaaacgtttcataccccatgcaaaaaagacagccctttgttgtgggaacatggactttcatcatgggccacctatctaggcggatcgcgtcatcgtttttgattggtgttccatctactaagaacacagttgcaaacagtcctcaaacccttttgggctgggcttgaataaatttttggtcttcagcttggaaatttacatttcaggaggagctccaaaccaactattgggccacggattaaacaaacttatttcattagaggatgtagaccaaaagaagagtggaaacctactttttcttggatgattagactgactctgagaatattgataagccatttattaaaaggagtatttactagaattttttgtcatataaaacttgaatcaggatttttatgcccccacatacctctgggaacttgaagtataatatacttaatataacataaaaagccagttgggttctaaattgtagttgaaacacagaaaatgccacttttctgttcctgaagaggctcttttgtgcataatattctaaaatgaagacatttcaagctatacaaattacttccaagttttcatgatgtatgggaagattttcagtaggtgtattatattcacggtaccaaatgctgaccagtgttgctccattttttaaatcttgaaaagggtttctgtacttacctggtttgccaagtatgccagtgtaatgaaactgcccttattttaaaagccagtcaaagattccactgattgacatttgataaataaacatcaggattatgtttattgtttgttttcagtctttgcactatattaccagtatatggtttccgaggaagattatctactgcaaaacaccactgttggaaaaataggtatttttaaattgtttttaatccttttttggtgcttttaaacatgtttaagcaaaaaccaattcagttccattccccgcaaaaaacccctaactttactctgaactttttttgtttttgcattccatgaggttctgtattcagtcattctctaggtaatgtcatttttgtacacatatatttatataatcactgattgagatttaggaaaaagcatttgtaaagaatatttgcttcccttagaactacagactcgaaatctttaaagatggggcctaagcatctatgtattttttttaagttccacagatttttctgttgggcaggccaaggattataaaccacttccctaaaggcaacattaatgcaaaagtccccagatggcaatacaaagtatcccctggtaccacatatattcatttgtgagtttggatatagagcacattatctaaaccattttgtagttccaaaaacccatctaaatttcttgagttcctgaattttgaacaggattacctggagcctggagccactttaagttgtacttctgactaaactggaattatgagtgaggaagagtgtttactaaaataaatgactgcggcaagcaaaattgagtaggaaattagaaactgtttgacaacctttaagaggctccttgaaataacagaagtcttgattaatatgcaaataatggctaagaaagtatggtttaactggaccctattatgccttttaaaaataatttcagtaacccataaatacatgttgtaaaaaattcaaatatacagaatggaataaaaaaaatgatctccctttattaccctcccaaaggttaccagcgtttgaatttaataatgtatattctttcatgctttttttctgtgcacttacctaagtgtgaatatgtaaagggtttggttttgtatacaaatgggattatactaaaataagtaatgcctatttttaaggataggttaaatttgtgaatgatcatttcaaatatattgaataaaataagccaaaagctattgttatttactgatcctggattgtcttaaagaaagtacttgtgatataagagcacagttctacttactgctaatgacagaatatgtattaaacgtattttcatgtaaatgaaatctttaaaatatgtatcttaaaattttacatagcaacagaaaggcctacaattgctaacacaagaaaaatacttataaaatcagtataaaatcaatgcagatgttagcaaaagaatgagactacttcatatgtcctaattggaaaaagtctcaaatacttaaaaaaacaaaaaactggaacagtttattatactaccatttttgtgaaaatatacaaaatattgaaataaaggaatactcaagaaac

SEQ ID NO: 852 - DNA, 2832 bp, Homo sapiens
  SIMILAR (2072)..(2677): 691254mologous to Homo sapiens Similar to butyrate response factor 2 (EGF-response factor 2),accession number BC005010,Smith- Waterman Score=660.
atggagtgcatctgccccaagtggaggcagcagcagcagcaggagggaggtgtcggggcagtggggccgcaggccagtcctcagggcactggttcctctgtgaaccctgtggcctcttctgtagccccacaggctgggcacaacaacaatcacctggcgatcgcaggccgtcttcaaaggaaaaagaaaaaaacaaaaccacgaaacccaaaaaacctcaccattgatgtcatgccgatcaccccgtgggctgataaacaagtcctggagcagatagcatccctgggcaggggcatcttattggccctctcatctgagtttgccttctgccaggtggatgcctccatcgctctggccctggccctggccgtcctgtgtgatctgctccagcagtgggaccagttggcccctggactgcccatcctgctgggatggctgttgggagagagtgatgacctcgtggcctgtgtggagagcatgcatcagcaggccaagggttcaaaacgcattgtccctctttatgagaaatttggagacatggccccggcgctcaagccctgtttactgagcctgggcggggagggggcggagaaacgagcccgggctccaccggcaagactgccgcggcggccgcccgcgtggccacccccacccccaccgcgactccacgtgcagtcgggctggagccgccaccgactggacgcaggccccgagcccccgcctcctggccggggcaccctttgcaaacccgccgggccgcggggatggttgcgatattctggcattttgcaattcccgcgcccagtacaaaaccgaaggtgggagcttaaagctccacaggtccgcctcggagaacagggcagggaaagacacgtccagggctgcagaatcccggccacgctaaacgtaccggggctctccgaccgcgcagccccggaggagaacagccgtgccttcccgccgccacccggcggcatccactggggccgagagctacacgccacaccggccgcccgggccgccggccccgcccggaggcctccagcaccctcccccggaggaaaaaaattggcggcggccaatgggaggccgggaaggcgcctgacgtccgcgagcgggcgggcggcgttgcctggagaccccggcgggggccgagttctgtcccctcccccggcgcgcccgccccgccgcagccgcactcccgggctctatatagggcgcgcgctcggaggccgccgagttccagcagtccgcgagctgccgtcggctccgcggggggggcgggccgggcaccccggggcgcggaggagcgctcctcgcttctctccttcccccctgccgcactccgccggaccctcccgacggctcgtgtcgctgcactcgccctctcctctcgcccctcggcaaactttcggcccctccccgccctcgcccgttattcgtcgtggctcaagccggccacgccccccaagggctcctcccgacctcccggcctgccgctccggccactgcgggatccagaaacatgtcgaccacacttctgtccgccttctacgatgtcgacttcttgtgcaagacagagaaatccctggccaacctcaacctgaacaacatgctggacaagaaggcggtggggacgcctgtgccgccgcccccagctcgggcttcgcgccgggattcctccgacggcactcggccagcaacctgcatgcactcgcccaccccgcgcccagccccggcagctgctcgcccaagttcccgggcgccgctaacggcagcagctgcggcagcgcggcggccggcggagccgtcggggggcggcgcacagccctgctcaacaaggagaacaaattccgggaccgctcgtttagcgagaacggcgatcgcagccagcacctcctgcacctgcagcagcagcagaaggggggcggcggctcccagatcaactccacgcgctacaagaccgagctgtgccggcccttcgaggagagcggcacgtgcaagtacggcgaaaagtgccagttcgcgcatggcttccacgagctgcgcagcctgactcgccatccgaagtacaagaccgagctgtgccgcacctttcataccatcggcttctgcccctatgggccgcgctgccacttcatccacaacgcggacgagcggcggcccgcgccgtcggggggccctccggggacctgcccccacgtcgcgcacgccgccgccgccctcctgctcttcggcctcgtcctgctcctcctccgcctcctcctgttcctcggcctccgcggcctccacgccctcgggcgccccgacatgctgcgcctccgcgccggccgcggctgcggccgctctgctgtacggcaccgggggcgccgaggacctgctggcgccgggggccccgtgcgcggcctgctcgtcggcctcgtgcgccaacaacgccttcgccttcggtccggagctcagcagcctcatcacgccgctcgccatccagacccacaactttgccgccgtggccgccgccgcctactaccgcagtcagcagcagcagcagcagcagggcctggcgcccccgcgagcgccgggccgcccagcgcgaccctccccgccggggccgccgcacctccctcgccgcccttcagcttccagctgccgcgccgcctgtccgactcgcccgtgttcgacgcgccccccagccccccggactcgctgtcggaccgcgacagctacctaagcggctccctgagctccggcagcctcagcggctctgagtctcccagcctcgaccctggccgccgcctgccaatcttcagccgcctctccatctccgacgactga

SEQ ID NO: 853 - DNA, 3386 bp, Homo sapiens
  SIMILAR (1043)..(2551): 581254mologous to Homo sapiens Similar to butyrate response factor 2 (EGF-response factor 2),accession number BC005010,Smith- Waterman Score=1206.
caggccaagggttcaaaacgcattgtccctctttatgagaaatttggagacatggccccggcgctcaagccctgtttactgagcctgggcggggagggggcggagaaacgagcccgggctccaccggcaagactgccgcggcggccgcccgcgtggccacccccacccccaccgcgactccacgtgcagtcgggctggagccgccaccgactggacgcaggccccgagcccccgcctcctggccggggcaccctttgcaaacccgccgggccgcggggatggttgcgatattctggcattttgcaattcccgcgcccagtacaaaaccgaaggtgggagcttaaagctccacaggtccgcctcggagaacagggcagggaaagacacgtccagggctgcagaatcccggccacgctaaacgtaccggggctctccgaccgcgcagccccggaggagaacagccgtgccttcccgccgccacccggcggcatccactggggccgagagctacacgccacaccggccgcccgggccgccggccccgcccggaggcctccagcaccctcccccggaggaaaaaaattggcggcggccaatgggaggccgggaaggcgcctgacgtccgcgagcgggcgggcggcgttgcctggagaccccggcgggggccgagttctgtcccctcccccggcgcgcccgccccgccgcagccgcactcccgggctctatatagggcgcgcgctcggaggccgccgagttccagcagtccgcgagctgccgtcggctccgcggggggggcgggccgggcaccccggggcgcggaggagcgctcctcgcttctctccttcccccctgccgcactccgccggaccctcccgacggctcgtgtcgctgcactcgccctctcctctcgcccctcggcaaactttcggaccctccccgcccctcgcccgttattcgtggaggatcaagcccggccacgccgccccaagggctcctcccgacctcccggcctgccgctccggccactgcgggatccagaaacatgtggaccacacttgtgtccgccttctacgatgtcgacttcttgtgcaagacagagaaatacctggccaacctcaacctgaacaacatgctgggacaagaaggcggtggggacgcctgtgggcggccggcccccagctcgggcttcgcgccgggattcctccgacggcactcggccagcaacctgcatgcactcgcccaccccgcgcccagccccggcagctgctcgcccaagttcccgggcgccgctaacggcagcagctgcggcagcgcggcggccggcggtccgacctcctacggcacccttaaggagccgtcggggggcggcggcacagccctgctcaacaaggagaacaaattccgggaccgctcgtttagcgagaacgggcgatcgcagccagcacctcctgcacctgcagcagcagcagaaggggggcggcggctccccagatcaaatccccacgcgctacaagaccgagctgtgccggcccttcgaagaagagcgggcacgtgcccagtacggcgaaaaagtgccagttcggcgcatggcttcccacgagctgcgcagcctgactcgcccatccggaggtccaagaccgaagctgtgccgcaccttttcataccatcggcttctgcccctatgggccgcgctgccacttcatccacaacgcggacgagcggcggcccgcgccgtcggggggcgcctccggggacctgcgtgcctttggcacgcgcgatgcgttgcacctgggcttcccgcgggagccgcggcccaagttgcaccacagcctcagcttctcgggcttcccgtcgggccaccatcagcccccgggcggcctcgagttcgccgctgctgctcgacagccccacgtcgcgcacgccgccgccgccctcctgctcttcggcctcgtcctgctcctcctccgcctcctcctgttcctcggcctccgcggcctccacagccctcgggcgccccgacatgctgcggcttccgcggcggccgcgctgcgtctgctgtacggcaccgggggcgctttaggacctgctggcgccgggggccccgtgcgcggcctgctcgtcggcctcgtgcgccaacaacgccttcgccttcggtccggagctcagcagcctcatcacgccgctcgccatccagacccacaactttgccgccgtggccgccgccgcctactaccgcagtcagcagcagcagcagcagcagcagcagggcctggcgccccccgcgcagccgccggcggccgcccagcgcgaccctccccgccgggggccgccggcacctccctcgccggcctttcagcttccagctgccgcgccgcctgtccgactcgcccgtgttcgacgcgccccccagccccccggactcgctgtcggaccgcgacagctacctaagcggctccctgagctccggcagcctcaagcggttctgagtcttccaagctttgaccctggccgccgcctgccaatcttcagccgcctctccatctccgacgactgaggcaagagggcgccagtgaggaggaagggaaggcggttcagagatgttggaggacacccctcgccatctcgcccttgctgggggcacgaggagtggggggggtgacatgggccctaggcagactgcaagcccgaccgagcacttggactcgaactctgtgccgggaggggcccccacccctcctttttcggtttcctcttgtctttttttttttttttttattacgaagtttcattctttttgagcaaaaaagtcgaactttttctgttgaacaaaatattcacaacagggcagttgtgatacgaatagaacaaaaaaaaaaaaaaaaacacttaaactttgttaggactccgatgagtttgggacttcaggaaaaatcaacccagcaccagcagctaccaaccaccattccatctcttcacttgaacagcattagttaagtccagatgtgggaacccttctcttggaagaagttcctaattgtgtctcagaccggtgtaaacaaaccagccagccgccaccttgctaaacctataagctttttaaaatccaatatattctgccaagaatatgccttgatagttagccctcagcccataggtgttttttgttttttaacagaattatatatgtctgggggtgaaaaaacccttgcattccaaaggtccatactggttacttggtttcattgccaccactttagtggatgttcagtttagaaccattttgtctgctccctctggaagccttgcgcagagcttactttgtaattgttggagaataactgctgaatttttaagctgttttgagttgattcgcaccactgcaccac

SEQ ID NO: 854 - DNA, 403 bp, Homo sapiens
  SIMILAR (309)..(401): 961254mologous to Homo sapiens Human HSly1 protein SEQ ID NO:6,accession number AAB12455,Smith-Waterman Score=152.
  misc_feature (1)...(403): n = a,t,c or g
nnnnnnnnnnnnnnnnnnnnnnnnnnnnnnnnnnnnnnnnnnnnnnnnnnnnnnnnnnnnnnnnnnnnnnnnnnnnnnnnnnnnnnnnnnnnnnnnnnnnnnnnnnnnnnnnnnnnnnnnnnnnnnnnnnnnnnnnnnnnnnncaagaaaattggatgtatattttgaatatgaagaaaaaataatgagcaaaactactctggataaatctcttctagatataatatcagaccctgatgcaggaactccagaagataaaatgagggtgtttcttatctattatataagcacacagcaagcaccttctgagggcttttaccaagatggcctcagctccggccagctatggcagcactaccactaaaccaatgggtcttttatcacgagtcatgaatacaggatc

SEQ ID NO: 855 - DNA, 710 bp, Homo sapiens
  SIMILAR (1)..(24): 1001254mologous to Homo sapiens vesicle transport-related protein,accession number AF319958,Smith-Waterman Score=43.
  misc_feature (1)...(710): n = a,t,c or g
aaggtttttgaccaatatctcaatttntatnactttggaagatgatatgtntgtantatgtaatcaaataaagnagcttgtttcatatcgtgccattaacaggccagatatcacagacacggaaatggaaactgttatggacactatagttgacagcctcttctgcttttttgttactctgggggctgttcctataatcagatgttcaagagggaacagcagcaaaaaatggtagcaagtgaaactagcccagaaactttcgagaaaaatctaagagattgcaagaacagtccttttaccaggtgatacacttggagctggccaattcagcttccagaggcccttattagtccttgttgacagaaacatagatttggcaactcctttacatcatacttggacatatcaagcattggtgcacgatgtactggagaggtggatttgattgttcagctgcagagctgtggacttcagtcaaagggatggacattattttatctctgtttttttacttggcctttattttttcaaatcttaggttctctttttgtacctttcaccctctgctactgactcttattatttgaaacattaaatcggaagttatactaatagacatagggactttaattaaagtttacctttttttccagtcaagaataaaaaaaaaatggtttccaaataaatatgaattatattaaaaggtaaaa

SEQ ID NO: 856 - DNA, 730 bp, Homo sapiens
  SIMILAR (728)..(381): 981254mologous to Homo sapiens Neuron-associated protein,accession number AAB01395,Smith-Waterman Score=620.
ggaggagaggaagcatcactgaaggtatgtgtgttcaaaagggaatctggctagatgatcaagtcactgttctccaaggaccggaaacttgctttaaattagatttggggaggcccatcaatctaaatggtttctgtaaaagacacactcacataaaaaggaaaaacacagaagacaaatgggtccttaatttgggggaggatatattccaacttgggggaagggtgaaggcattttagctctgaagctcaatcatgacatttctagagagttctgcagtgcccccgcattggacaggacaggatggaagagtgtgctggactggctggattccccagtgtcaagctggcagcgctcctgaggttcttgagtgtttatcaactcagcaggtcaaaagtctgcagacactgggtggagcagcagtaagccacaaaactaacagttgtcttccactggtgcagccctgccattggcgtctctctcaagggaaagagcttggggtagacgatggtaaacataggctcactacaccgatgacagtgccccagagggcagtgcagcagctctaggaaacttctgggtaatgagattggagacagaaagttcaaatctttcagcaagctgtggtaggtatgatacagccctctcatagccaattcctgcagagggaggacgtgatcatgctccgtccctttggccttcacctcagctgggaggaaaacggttcgct

SEQ ID NO: 857 - DNA, 1050 bp, Homo sapiens
  SIMILAR (225)..(1037): 341254mologous to Podocoryne carnea Pod-EPPT,accession number X74358,Smith-Waterman Score=312.
atggggtttcgccatgttggccaggctggtctcgaactcctgacctcaggtgatctgcccgcttcagcctaccaaagtgctggcattacagatgtgagccactgcgcccagcctgcaagccctctttcttatttcctccaagcactgaagcatgaatttgtggtaagacacctgacacctggacacttggacacccagacacctgacaccaagaaacctggacacccagacacccaaacactagatacccagacacccagccacctgacatccagacacccagacacccagacagctgacacccagacacctgacacccagacacctgacacctggacccccagacacctgacacccagacacctggcacctgacaccagacacccagacacctggacacccaacactcagacacccagacactcagatacccagacacccagaaacctgacacccagacacccggatacccagacacccagaaacctgacacccagacacccagatacccagacacccgacacccagacacccagaaacctgacagccagacacccggatacccagacacccgacacccagacacccggacactcagacacccagacactcagacacccagacatccagacacctgatacccagaaacctgacaccccaccacccggacacccagacatcctgccacctgaacaccctgccactcagtcacttggacacctggatactcagccaccccaccatccagataccctgccactccaatacccagacaccccaacccccagacacccagacactccactacctggacacctggacaacccaccacctggacacctggacacccaaacacccagaccctctgccacccagacaccctgccactcagacacccagacaccccaccacctggacacctggacacccggacacccagacacccggacactcagacacctcaccacccagacaccgagaaacctgacacccagaaacctggacacccggacacccagacacctgacaccaagacacacagacacttga

SEQ ID NO: 858 - DNA, 2303 bp, Homo sapiens
  SIMILAR (1190)..(2098): 601254mologous to Homo sapiens vesicle transport-related protein,accession number AF319958,Smith-Waterman Score=705.
gataaaaactcttagtattcgcctaacattacgggccactgaattaacctgcaccgggtctcccagttctaccgagagtggaggtcttcctggaggagccgggcagtggctcgtgggagccaagatggcggcggcggcggcagcgacagcagcagcagtcagccttcattcaggaaagacagccagttgctctcatgcgtttattgtctttcaatgtgcctcatattaaaaacagcacaggagcacccatatggaaggtactcacttatgcacagatttggccaagatatattctctcctctgctatctgtaagggagctaagagacatgggaatcactctgcatctgcttttacactctgatcgagatcctattccagatgttcctgcagtatactttgtaatgccaacttgaagaaaatattgacagaatgtgccaggatcttcgaaatcaactatatgaatcatattatttaaattttatttctgctatttcaagaagtaaactggaagatattgcaaatgccagcgttcggggcctaagtgcaagtaacacaagtagccaaggtttggggaccaatatctcaattttattactttggaagatgatatgtttgtattatgtaatcaaaataaggagcttgtttcatatcgtgccattaacaggccagatatcacagacacggaaatggaaactgttatggacactatagttgacagcctcttctgcttttttgttactctgggtgctgttcctataatcagatgttcaagaggaacagcagcagaaatggtagcagtgaaactagacaagaaacttctagaaaatcttatgagatgcaagaaacagtcttttctacagggtggatacacttggagctggccatttccagcttccagaggcccctattagtccttgttgacagaaacatagatttggcaactcctttacatcatacttggacatattaagcattggtgcacgatgtactggatttccatttaaacagggttaatttggaagaatcttcaggagtggaaaactctccagctggtgctagaccaaagagaaaaaacaagaagtcttatgatttaactccggttgataaattttggcaaaaacataaaggaagtccattcccagaagttgcagaatcagttcagcaagaactaggaatcttacagagcacaggaagaatgaggtcaaacgacttaaaagcattatggggactagaaggggaagatgaaggagccataagtatggctttctggacaataccgctaagctaacatcagctgttagttctttgccagaactccttgagaaaaaaagacttattgatctccatacaaatgttgccactgctgttttagaacatataaaggcaagaaaattggatgtatattttgaatatgaagaaaaaataatgagcaaaactactctggataaatctcttctagatataatatcagaccctgatgcaggaactccagaagataaaatgaggttgtttcttatctattatataagcacacagcaagcacgttctcgaggctgatttgcagcaatataaaaaagctttaactgatgcaggatgcaaccttaatcgttcacgatatatcaaacagtgaagggcttttacccaagatggcatcagctctgagcaggctatggcagacactaccactaaaacaatgggtcttttatcacgagtcctgaattacaggatcacagtttgtgatgggaaggagtgaagaacctggttttgaaacagcaaaatctacctgttactccgtattttggacaaatcttatggagaaggaagtcaaacccccgaaaactgatggactatagatattttgatcccaaaaatgcctgcgggggcaatgacagctccagttccccagaaattaaaaatcccattcccaagaggccattcgtttttcgtcggtggcgaggagggcaactacatttgaatatcagaatctttggtgactacataaaggggaaacaaggcaaacacattttataatggctgcaggtgagctttttaatggctacacagttcataaaacagttgtcacaacttggacaaaagtaaccccaaagacccctttctatgataatctccttggaatgtggataaatgtaaaaagaagaaaagttagaagagcaatatgtttccttctctgtaacagtgtcctaacagtgaaaatcagagttatttgttaatttttaaggaaattatatacttaatatgtattgattaaaagaaacctttcagaaataaaatttcaacattg

SEQ ID NO: 859 - DNA, 394 bp, Homo sapiens
  SIMILAR (208)..(393): 1001254mologous to Homo sapiens Human secreted protein, SEQ ID NO: 4387,accession number AAG00306,Smith-Waterman Score=328.
gcgggtggtcgggctgcatcctgccttcagagtcttactgcgcggggccccagtctccagtcccgcccaggcgcctttgcaggctgcggtgggatttcgttttgcctccggttggggctgctgtttctcttcgccgacgtggatcctctatccttcagagactctggaacccctgtggtcttctcttcatctaatgaccctgaggggatggagttttcaagtccttccagagaggaatgtcccaagcctttgagtagggtaagcatcatggctggcagcctcacaggattgcttctacttcaggcagtgtcgtgggcatcaggtgcccgcccctgcatccctaaaagcttcggctacagctcggtggtgtgtgtctgcaatgccacatactgtg

SEQ ID NO: 860 - DNA, 536 bp, Homo sapiens
  SIMILAR (12)..(425): 901254mologous to Homo sapiens glucocerebrosidase precursor (5' end put.); putative,accession number M16328,Smith-Waterman Score=670.
atcgaatatacatattccgggtaccatggccagctgtgactctccatccgcaccacactaatgcagacacccctgatgatttccagttgcacaacttcagcctcccagaggaagataccaagctcaagatacccctgattcaccgagccctgcagttggcccagcgtcccgtttcactccttgccagcccctggacatcacccacttggctcaagaccaatggagcggtgaatgggaaggggtcactcaagggacagcccggagacatctaccaccagacctgggccagatactttgtgaagttcctggatgcctatgctgagcacaagttacagttctgggcagtgacagctgaaaatgagccttctgctgggctgttgagtggataccccttccagtgcctgggcttcacccctgaacatcagggcggaagccttaaagcagcagcgggtgtgcccaggcacccagatgattcctatggcaccagccaggaaaaatggcagctcttaaaggagaaaatgtttgagcccaaaaaa

SEQ ID NO: 861 - DNA, 2474 bp, Homo sapiens
  SIMILAR (291)..(575): 801254mologous to Homo sapiens glucocerebrosidase,accession number M19285,Smith-Waterman Score=373.
acccatacatgccctccagagttttatagggcatataatctgtaacagatgagaggaagccaattgccctttagaaatatggctgtgattgcctcacttcctgtgtcatgtgacgctcctagtcatcacatgacccatccacatcgggaagtcggaattacttgcagggctaacctagtgcctatagctaaggcaggtacctgcatccttgtttttgtttagtggatcctctatccttcagagactctggaacccctgtggtcttctcttcatctaatgaccctgaggggatggagttttcaagtccttccagagaggaatgtcccaagcctttgagtagggtaagcatcatggctggcagcctcacaggattgcttctacttcaggcagtgtcgtgggcatcaggtgcccgcccctgcatccctaaaagcttcggctacagctcggtggtgtgtgtctgcaatgccacatactgtgactcctttgaaccccccgacctttcctgcccttggtaccttcagccgctatggagagttacacgcagtgggcgaacgggatggagcttgagtatgggggcccatccaggctaatcacacgggcacaggcctgctactgaccctgcagccagaacagaagttccagaaagtgaagggatttggaggggccatgacagatgctgctgctctcaacatccttgccctgtcaccccctgcccaaaatttgctacttaaatcgtacttctctgaagaaggaatcggatataacatcatccgggtacccatggccagctgtgacttctccatccgcacctacacctatgcagacacccctgatgatttccagttgcacaacttcagcctcccagaggaagataccaagcttcaagatacccctggatttcaccgagccctgcagttggcccagcgtcccgtttcactccttgccagcccctggacatcacccacttggctcaagaccaatggagcggtgaatgggaaggggtcactcaagggacagcccggagacatctaccaccagacctgggccagatactttgtgaagttcctggatgcctatgctgagcacaagttacagttctgggcagcgacagctaaaaatgagccttctgctgggctgttgagtggataccccttccagtgcctgggcttcacccctgaacatcagcgagacttcattgcccgtgacctaagtcctaccctcgccaacagtactcaccacaatgtccgcctactcatgctggatgaccaacgcttgctgctgccccactgggcaaaggtggtactgacagacccagaagcagctaaatatgttcatggcattgctgtacattggtacctggactttctggctccagccaaagccaccctaggggagacacaccgcctgttccccaacaccatgctctttgcctcagaggcctgtgtgggctccaagttctgggagcagagtgtgcggctaggctcctgggatcgaggggatgcagtacagccacagcattcatcaacaaacctcctggtaccatgtggttggcttggacggctgggaaccttgccctgaaccccgaaggaaggacccaattgggtgcgtaactttgtcgacagtcccatcattgtagacatcaccaaggacacgttttacaaacagcccatgttctaccaccttggccacttcaagcaaagttcaattcctgaggggctcccagagagtggggctggttgccaagtcagaagaacgacctggacgcagtgggcactgatgcatcccgatggctctgctgttgtggtcgtgctaaaccgctcctctaaggatgtgcctcttaccatcaaggatcctgctgtgggcttcctggagacaatctcacctggctactccatttcacacctacctgtgggcgtcgccagttggatggagcagattactcaaggaggcactggggctcagctggggcatttaaagggacagagtcagctcacacgctgtctgtgactaaagagggcacagcagggccagtgtgagcttacagcgacgtaagcccaggggcaatggtttgggtgactcactttcccctctaggtggtgcccaggggctggaggcccctagaaaaagatcagtaagccccagtgtccccccagcccccatgcttatgtgaacatgcgctgtgtgctgcttgctttggaaactgggcctgggtccaggcctagggtgagctcactgtccgtacaaacacaagatcagggctgagggtaaggaaaagaagagactaggaaagctgggcccaaaactggagactgtttgtctttcctggagatgcagaactgggcccgtggagcagcagtgtcagcatcagggcggaagccttaaagcagcagcgggtgtgcccaggcacccagatgattcctatggcaccagccaggaaaaatggcagctcttaaaggagaaaatgtttgagccca

SEQ ID NO: 862 - DNA, 2385 bp, Homo sapiens
  SIMILAR (1479)..(1796): 651254mologous to Pan troglodytes glucocerebrosidase,accession number AF285236,Smith-Waterman Score= 297.
aattgccctttagaaatatggctgcaattgcctcacttcctgtgtcatgtgactctcctagtcatcacatgacccatccacattgggaagccagaattacttgcaggagtaacctagtgcctatagctatggcaggtacctgcatccttgtttttgtttagtggatcctctatccttcagagactctggaacccctgtgctcttctcctcatctagtgaccctgaggtgatggagttttcaagtccttccagagaggaatgtcccaagccttcgggtagggtaagcatcatggctggcagcctcacaggattgcttctacttcaggcagtgtcgtgggcatcaggtggtgcccctgcatccctaaaagcttcagtacagctcggtggtctgtgtctgcaatgccacatactgtgactcttgaccccccgacctttcctgccctaggtgccttcagccgctacaagagcagaagcagtgggcattggatggagctgagtacaggaccatacaggctaattgcaccggcacaggcctgctactgatcctgcagccagaagttccagaaagtgaagggatttggaggggccgtgacagatgcaggtgccctcaacatccttgccctgtcaccccctgcccagaatttgctacttaaatggtacttctctgaagaaggaatcggatataacatcatctgggtacccatggccagctgagacttctccatccgcacctacacctatgcagacaccccgtgatgatttccagttgcacaacttcagcctcccagaggaagataccaagctcaagatacccctgattcaccgagccctgcagttgggcccagcgtcccgtttcactccttgccagcccctgggacatcacccactcggctcaagaccaggggagcggggaatgggaaggggccactcaagggacagcccagagacatctaccaccagacctgggccagatacattgtgaagttcctggatgcctatgctgagcacaagttacagttctgggcagtgacagctgaaaatgagccttctgctgggctgttgagtggataccccttccagtgcctgggcttcacccctgaacatcagcgagacttcattgcccgtgacctaggtcctacccttgccaacggtactcaccacaatgtccgcctactcatgctggatgaccaacgcttgctgctgccccactgggcaaaggtggtactgacagacccagaagcagctaagtatgttcatggtattgctgtacattggtacctggactttctggctccagccaaagccaccctaagggagacacaccacctgttccccaacaccatgctctttgcctcagaggcctgtgtgggttccaagttctgggagcagagtgtgcggctaggctcctgggatcgagggatgcagtacagccaaaagcatcatcaaaaaacttcctgtacccatgtgggtcggctgggaaccgaactggaaaccccatcattgtaaaacatcacccaagcaacacgttttaacaaacagccccatgttcctaccacccttggccaacttcagcaagttcattccctgagggctccccagagagtggggctggttgcccagtcagaagaacgaccctggacgcagtggcactgatgcatcccgatggctctcctgttgtggtcgtcctaaaccgctcctctaaggatgtgcctcttaccatcaaggatcctgctgtgggcttcctggagacaatctcacctggctactccattcacacctacctgtggcgtcgccagtgatggagcagatactcaaggaggcactgggcttcagctggggcattaaaaggacagagtcagctcacacgctgttctgtgactaaagaggggcacagcagggccagtgtgagcttacagcgacgttaagcccaggggcaatggtttgggtgactcacctttcccctctaggtggtgccaggggctggaggccccctagaaaaagatccagtaagccccaagtgtcccccccagccccccatgccttatgtgaaacatgccgcctgtgtgcctgccttgcctttggaaacttgcgcctgggtcccaggccctagggtgagctcactgtccgtacaaaccacaagatcagggctgagggtaaggaaaagaagagactaggaaagctgggcccaaaactggagactgtttgtctttcctggaaatgcagaactgggcccgtggagcagcagtgtcagcatcagggcggaagccttaaagcagcagcgggtgtgcccaggcacccaaatgattcctatggccccagccaggaaaaatggcagcttttaaaggagaaaatgtttgagcccagtcaaaaaaaaaaaaaaaaaaa

SEQ ID NO: 863 - DNA, 1415 bp, Homo sapiens
  SIMILAR (88)..(138): 701254mologous to Homo sapiens Human secreted protein, SEQ ID NO: 6953,accession number AAG02872,Smith-Waterman Score=68.
  misc_feature (1)...(1415): n = a,t,c or g
actagtgccatgcttttgtgagctcttggtatggcccatattactttgttttttttttttttattgttgttttgtgatagtcttgctctgtcgcccaggctgcagtgcagtggcacaatctcagctcactgcaacctcgtgcctcctgggttcaagcaattctcctgtctcagcctcctgggtagctgggactacaggtgcatgccaccatgccttggctaacttttgtatttttagtagagacagggtttcaccacgttggtcaggctggtctcgaactcctaacctcaggtgatccacctgccttggcctcccaaagtgctgagattacaggcgtgagcccccgcgcctgggccctgtttgtttttttaacatgatttttctctaagcttaaataccacaaggccaaagagaaatggtcataatttaaaccattattatattgttgagggatccctagctattattatagcaaagtgggaaaaaacgtgtttattcctattgaagttatgtaatgatcccgacattaatggggaatatagaggagtcctaattaattgggtataatttcacaaagcgggaatgggtattccttgggaggagttaaaggacattctctttacgtaagtgtaaacccaaggggcatttttctttattcctgccttctaattccttcctagcccaggtgaattaatttcctctttttccnctgggtaaatgtgatgaatggggaattgttttattacatttgaagttgacttgaagtgaccttttgtgctttaggtgcaggttgacactgaaaaaaaaacaaaacactgaatttttcacacctatgtctgcattaaaggctgtttaactaaccggaagttaccataggacttccctgtcagtcagctgctgtgccccccagtgccttactggtcccttggtagatttgccttaatgatttgtacaaatgactgggaggcggggatgctgcctggtgtcctggtgaaccttaatggaagggggccggtcttaggcaccagtgccaaaacaagccatttgtcctgtactggttagagccgaaaattgtgatgagcaatactgataattggccccagtttaatggccatcctttcccccagattttaaaaatctgttctaagatattcttagcttgaacccacttttggattgtgaaatgtattagggtngttgtccccattattactgtaaaaatggaagttttgaatcttcttgttaataaactgtgggatttcccctctcaatttcttaaacaacaacaaaaaaatgcttgaaggattgtctttgagtgtaagatctgccttttcagaaaggggagtgttagtttgtaatgttaaaaaataaagacctcattcaataaaagttgaagtcatcttttaaaaaaaaaa

SEQ ID NO: 864 - DNA, 684 bp, Homo sapiens
ttagtttctttgacttataccatgtggtccccaactctttaactgtctgtccttatagccaggattctgggcgatggtaaagttcgcctgggtgcagtatgtcagatcctgcttatcttcctctgggtgtttgaaagaatcaagatcttcgtgttcagaatcaggtggtgaccaccatcccttatcctccacatccttgcccctctccttattcatgctttgtaaagaggttttggagctttctggccgataacttctaaatacgtgccgctgcagctcggcagagccgccaagctttggggtacgttggttcttcattctccgcggggatgtccccacactcgggtcggctgggggccgggctggtggcacagctgggacgctcctctgtcctgcaccggggacctggggtggcgggaagagctggagtggcttttccatcagcaacgtggaaagggcatcgccgctgttggcgcggtttggaagtgtcttgctggggcttcggcggagcacacgacaggacagcgcccagcgaatcttatgtaatttatcaaatactatactggaagtgaaaaccagaatggcgtatgggtactcagagtagttgtgctgaatgcatatcactttcacacctggctgcttgagtacagcataaactgagcacagaaagggagtccttgccat

SEQ ID NO: 865 - DNA, 522 bp, Homo sapiens
  SIMILAR (294)..(4): 351254mologous to Escherichia coli O157:H7 putative antitermination protein,accession number AP002562,Smith-Waterman Score=166.
tcatctcgttacttttgagagaatggaatcagccatagactcctgtttatggcattcggcgaccaactcctcaaatagcggctgaagttgctcatatgccgccgttttctttatctccgcaacagtcttaacgccctcatttaccgttgagaacttaagcctggcgtaacctctaccaccgcagcggtcgcaggctttcattactggaacgccctggcgatcgctttctgccttgtccagcgcctttcctttgcctgggttccagctcttcccagtcccttgggcgcagcggcacccgtaaattttcgaccccgtaagggggtctccccctgggggttgagaccctggcgggtgaacacttgcgtccgtgttcatctcccgccacaagtctccccggggcgtcactgtcacaggaatggtggtcaccacctgattctgaaacacgaagatcttgattctttcaaacacccagaggaagataagcaggatgctgacatactgcacccaggcgaactttaccat

SEQ ID NO: 866 - DNA, 2182 bp, Homo sapiens
  SIMILAR (2178)..(2002): 541254mologous to Homo sapiens Human secreted protein, SEQ ID NO: 7871,accession number AAG03790,Smith-Waterman Score=151.
cccaaccccatctggctggtgggcagggccgcaaatgctccatttgtgattaatgctatcatccgataccctgtggaagtcatttcttatcagccaggattctgggagatggtaaagttcgccatgcttgcagtatgtcagcatcctgcttatcttcctctgggtgtttgaaagaatcaagatcttcgtgtttcaagaatcaggtggtgaccaccatttcctgtgacagtgacgccccggggagacttgtgtaaggagcacttatcctagaaagggcatttctgaagactcaagcaggaccgtggctgcctcattgtcatcttctgggaacatcttaggaccttttgaaagagcccagcgggacacctgcgggcttgtgtgcttttccctcagagacaacggttctttccgggttttgctctacacagttccgtatctttcagagctcctgcagaattgttcaggggattagtttgtgggaaaggtctgaggagttccggggagctataattagctttttggggttttccttctttgccttagcgttgaatttcaggagaaaattgcagtcagttcagacatcttgggaaagagtcccatctctggtcaagcagagacttttcctctgtttgaactgagggaacacactgtggcatttctaccttctgttgtgagccactctttactcttttcaggggctctcttgttgacaaacatgccaatcactaggcactttgcacccctgggcttctccatttcccattcacagctttgatttccagagctgaggcctttaactgggagacctgggaggggcagggcccaagggcaaggggccgcatttagcacagggcaatcagggagggccgctgaaggacacttggaccgtccacctgccccagcccaacagtcagtcatctgttcatcagctcagctgagcagccctggatctttgccgtactgtgactgggctctttgccctatttttccctctgtctgtgcccctggatggcaggctgaagtcagaggggctgtttcattctcagccccctcagcagcactgggggaagaaagcattgtcacaacaggttctttctggccctcacccaacagcctgggcacttggccctcctcctccttgacagccctcccccttcctgcaaaggacaggggcgacaggggttggtgttgggattggctcccgctgcctgacaaccacaagtttatttggaaggctagcgggaagcccagcggctggcgtttcccttgactaaggaacagggtgcccatcagagtggggcgggcagctttgggaaggacacaagaagcagtaagagtgtaaagaggatgctggcctgggcaggccagtccagcctggccactagcagaataccaagcagtccagtggattaccctcgtggctaagcaagtgtctgcaggagcagagatggctggaaggggcctctgcacacggaagatggcttgttcagcccattcacctcctgaggatgtgggcagtctcctccaagaacacatggagctgcttcctgatcccaagcaggtcattgccactggaaaggccatggcccccggtgatccatgcttcaatgcccaccccagaaacacacccctcagtgtgtgcctccagtttactttggagatcagttgtcggtttttagtgctcctttaggcttacgtaaaacagttttggaaacaaagctattttgaagtattcaagcagaggaattcccctaacactgacccccttgtcctttttttaatattccaggctgttttatatgccctaaatttttttcttaagatctaaacgaaaaatagtttcttgtttaaattcacataaggcaatgagatatggaaagatgaacaagatacgtataaacattggtttgcattttattaaattattctaatgcaaatcttgtataaagaaccccatgatgttttgtaactttctaatctaaaatgttcaaaatgaggccgagcatggtggttcattcctgtaatctcaacactttgggaggccaaggtgggaggatcgcttgagcccaggagcttgaggctgcagtgtgctatgattgcaccactgtactgtagcctgggtgacagagtgagaccctatctgttaaaataaataaataaataaataaaaaagtcaaaatgg

SEQ ID NO: 867 - DNA, 2863 bp, Homo sapiens
  SIMILAR (1008)..(1208): 971254mologous to Homo sapiens 9G8 splicing factor,accession number L22253,Smith-Waterman Score=315.
gggggtagtgccgccgggactcttggcgggtgaaggtgtgtgtcagcttttgcgtcactcgagccctgggcgctgcttgctaaagagccgagcacgcgggtctgtcatcatgtcgcgttacgggcggtacggaggagaaaccaaggtgtatgttggtaacctgggaactggcgctggcaaaggagagttagaaagggctttcagttattatggtcctttaagaactgtatgtattgcgagaaatcctccaggatttgcctttgtggaattcgaagatcctagagatgcagaagatgcactacgaggactggatggaaaggtgatttgtggctcccgagtgagggttgaactatcgacaggcatgcctcggagatcacgttttgatagaccacctgcccgacgtccctttgatccaaatgatagatgctatgagtgtggcgaaaagggacattatgcttatgattgtcatcgttacagccggcgaagaagaagcagggcagaaaatttgagacggtgatcgccgtaacagtaaatttggcttacaattggggcccccctccggtttagaaagaggaacaccagattgaccacattcccaactagaaaaatcttcttgcgtcaatcaagcctcacctggctcatttggctgtcagtttgatcgtcgttagattgaagaaaacatctagatgcagcgatcggctatagatacttctagatcgtctagatctactagaccatgggccaaagagggtcgacctgcaaacttgcaaggtttatgttaaatacacattacagtgttttatattatgtaatgctaagttgtaattcagcttttaacaaatctttttttaggtagtaaaaaaaaaaatactcaacaactaataggcccagagtttatttccaaatgagacactaaatttaaatagttttgagatttgatttcagcagaggcacacaaactcttaaaaacgagttattgtctgacattttgttttttctctaacttgaaaaataggtcacggtctagatcacattctcgatccagaggaaggcgatactctcgctcacgcagcaggagcaggggacgaaggtcaaggtcagcatctcctcgacgatcaagatctatctctcttcgtagatcaagatcagcttcactcagaagatctaggtctggttctataaaaggatcgaggtatttccaatcccccgtcgaggtcaagatcaagatccaggtctatttcacgaccaagaagcagccgatcaaagtccagatctccatctccaaaaagaagtcgttccccatcaggaagtcctcgcagaagtgcaagtcctgaaagaatggactgaagctctcaagttcaccctttagggaaaagttattttgtttacattattataagggatttgtgatgtctgtaaagtgtaacctaggaaagataattcaaccatctaatcaaaatggatctggattactatgtaaattcacagcagtaaggataatataaattttgttgaatgtatgaacatcatatggtctgaaaatgtgggtttttatttggcacatttaaataacatgtttctaactagatttttgatttgtgttcaatattaacacttcttaatttgatatatttgagagtcagacattataattgttaatccttattcatacatacctacattcagaattgaaaggtgttggttaagtcttgaacatcactattctatgcataaaacttggccaggatcttaagggactttgaaaattccatcttacccttgtagctctgggtaagatgacctgagtcccttatgatacagcctgaatgcatcatgacagatccttagttagctaatccgtttgaagttggtgttagtaggtattgtatgatcagtggtgaagcaagtaggaccactgatgtgtctaaatgagcatgacaggaactaaacgaaactgattaaatgtatgagaaatagaaactgatttctggatgatctttatactaattgcagctttcaggctactaggtggcatagtgttaattaggactccccaagatatggggagttctactctcaatggtcttgtttctttgctttctacattagttaaccagttttataccaaaaaatgcatgtttgaggaattgtctgaaattgggacaaaacaccttcatgtaaaccagctttgcaaaattttccagcccagatactcttcatctattcaaatggattgtcttattctgagcaaagacctgttgttaatcttcaagctaggttttgcagttcccaaccacaacattcttctattttgccaggctggtgcaaagtaattaaagatgtcaatcagaaatgtcaatgagactaaagtggttttgtaaatctcagctatatttagcaacactccatgtagctaatattttttggtagcatctggtagaccttagaatgttacatagccagtaggttctttattcaaattttaagtatcttaagaatagtagggcagtaacagttacttttgagagttttctggtcaagcttttaccaggcattctctagccttggtacaaaaaaaaaaaaaacctgctggttgcgcagatacctaggcttgtccattttatgcatttcagcaaagtcattggagactattgcaacttgggaatactggtctgcatcaagtttaattcggtagtttgaccgctagtatgttggaagttatttggattgtttttggaattttgactggctgaattatggttggtataaagttatgtgtataactggcaggcttatttatctgttgcacttggttagctttaattgttctgtattatttaaagataagtttactcaacaataa

SEQ ID NO: 868 - DNA, 792 bp, Homo sapiens; identical to SEQ ID NO: 181

SEQ ID NO: 869 - DNA, 2432 bp, Homo sapiens
  SIMILAR (206)..(340): 1001254mologous to Homo sapiens 9G8 splicing factor,accession number L22253,Smith-Waterman Score=244.
gtagtgccgccgggactcttggcgggtgaaggtgtgtgtcagcttttgcgtcactcgagccctgggcgctgcttgctaaagagccgagcacgcgggtctgtcatcatgtcgcgttacgggcggtacggaggagaaaccaaggtgtatgttggtaacctgggaactggcgctggcaatggagagttatatatgggttatcagataatatggtcctttaagaactgtatggattgcgagaaatcctccaggatttgcctttgtggaattcgaagatcctagagatgcagaagatgcagtacgaggactggatggaaaggtgatttgtggctcccgagtgaggggttgaattatcgaccggcatgcctcggagatcacgttttgatagaccacctgcccgacgttcctttgatccaaatgatggatgctatgagtgtggcgaaaagggacattacgcttatgattgtcatcgttacagccggcagaagaagaagcaggtcacgttttagatcacatttctcgatccagaggaaggcgatactctcgctcacgcaggcaggagcaggggacgaaggtcaaggtcagcatctcctcgacgatccaggatcctatctctcttcgtagatcaaggatcagcttcactcagaagatctaggtctggttctataaaagggatcgaggtatttcccaatcccccgtcggaggtcaagatccaagatcccaggtctatttcacggaccaagaagcagccgatccaaagtccagatctccgatctccaaaaagaagtcgttccccatcaggaagtccctcgcagaagtgcaagtccctgaaagaatggactgaagctctcaagttcacccctttagggaaaagttattttgtttacattattataaaggattttgtgatgtctgtaaagtgtaacctaggaaagataattcaaccgatctaatcaaaatggatctggattactatgtaaattcacagcagtaaggataatataaattttgttgaatgtattaacatcatatggtctgaaaatgtgggtttttatttggcacatttaaataaaaaaaaatctaactagatttttgatttgtgttcaatattaacacttcttaatttgatatatttgagagtcagacattataattgttaatccttattcatacatacctacattcagaattgaaaggtgttggttaagtcttgaacatcactattctatgcataaaacttggccagggatcttaagggactttgaaaattccatcttacccttgtaggctctggggtaaggatgacctgagtcccttatggatacagcctggaatggcattcatggacagatcccttaagttagctaatccgtttggaagttgggtgttagtaggtattgtatgatcagtggtgaagcaagtaggaccactgatgtgtctaaatgagcatgacaggaactaaacgaaactgattaaatgtatgagaaatagaaactgatttctggatgatctttatactaattgcagctttcaggctactaggtggcatagtgttaattaggactccccaagatatggggagttctactctcaatggtcttgtttctttgctttctacattagttaaccagttttataccaaaaaatgcatgtttgtaggaattgtctgaaattgggacaaaacaccttcattgtaaaccagctttgcaaaattttccagcccagatactcttcatctattcaaatggattgtcttattctgagcaaagacctgttgttaatcttcaagctaggttttgcagttcccaaccacaacattcttctattttgccaggctgggtgcaaagtaattaaagatgtcaatcagaaatgtcaatgagactaaagtggttttgtaaatctcagctatatttaggcaacactccatgtaggctaatattttttgggtaggcatctgggtaggaccttaggaatgttaccataggccagtaggggtcctttattccaaatttttaaggtatcttaagaatagtagggcagtaacagttacttttgagagttttctggtcaagcttttaccaggcattctctagccttggtacaaaaaaaaaaaaaaaccctgcctggttgccccagataccctaggcttgtcccattttatgcatttcagcaaagtcattggatactattgcaacttgggaatactggtctgcatcaagttttattcgggtagtttgacccgctagtatgttggaagttatttggattgtttttggaattttgactggctgaattatggttggtataaagttatgtgtataactggcaggcttatttatctgttgcacttggttagctttaattgttctgtattatttaaagataagtttactcaacaataaatctgcagagattgaacaaataaaaaaaaaaaa

SEQ ID NO: 870 - DNA, 701 bp, Homo sapiens
  SIMILAR (510)..(677): 821254mologous to Homo sapiens nephropontin,accession number M83248,Smith-Waterman Score=227.
  misc_feature (1)...(701): n = a,t,c or g
accgncncgaannccggncgaccacgcgtccgggcagagcacagcatcgtcgggaccagactctgtctcaggccagttgcagccttctcagccaaacgccgaccaaggaaaactcactaccatgagaattgcagtgatttgcttttgcctcctaggcatcacctgtgccataccagttaaacaggctgattctggaagttctgaggaaaagcagctttacaacaaatacccagatgctgtggccacatggctaaaaccctgacccatctcagaagcagaatctcctagccccacagaatggctgtgtcctctgaagaaaccaatgactttaaacaagagacccttccaagtaagtccaaccgaaagccatgaccacatggatggatatggatgattgaaggtgattgacgaccatgtggacagccaggactccattgactccgaaccgactctgatgatgtagatgacactggatgattctcaccagtctgatgagtctcaccattctggatgaatctgatgaactggtcactggattttccacggacctgccagcaaccgaagttttcactccagttgtccccacagtagacacatatgatggccgaggtgatagtgtggtttatggactgaggtcaaaatctaaggaagtttcgcagacctgacatcaagtaccctgatgctacagacgaggacatcac

SEQ ID NO: 871 - DNA, 1762 bp, Homo sapiens
  SIMILAR (432)..(1166): 401254mologous to Homo sapiens osteopontin,accession number J04765,Smith-Waterman Score=274.
  misc_feature (1)...(1762): n = a,t,c or g
tgatctctagttgctctacattacagttcagcgtctcttttgaatatcattctgtcccttatgatttcgaattgctacggcgaaaggnganaacacattgaaacccttttttgaagncnactgattgccgggtcgacccacgcgtgcgcccacgcgtccggcagagcacagcatcgtcgggaccagactcgtctcaaggccagttgcagccttctcagccaaacgccgaccaaggaaaactcactacccagggaattgccagtgatttgcttttgcctcctaggcatcacctgtgccataccagttaaacaggctgattctggaagttctgaggaaaagcagctttacaacaaatacccagatgctgtggccacatggctaaaccctgacccatctcagaagcagaatctcctagccccacaagacccttccaagtaagtccaaccgaaagccatggaccacatgggatgatatgggatgatgaagatggatgatggaccatgtggggacagccagggactccattgactcgaacgactctggatgatgtagatgacacttgatggattctcaccagtcttgatggagtcttcaccattcttgatggaatctggatggaactggtcactggatttttccccacgggaccttgcccaggcaaccgaagtttttcaattccagtttgttcccccacagtagacacatatgatggccgaggtgatatgtgtggtttatggactgaggtcaaaatctaagacagtttcgcagacctgacatccagtaccctgatgctacagacgaggacatcacctcacacatggaaagcgaggagttgaatggtgcatacaaggccatcccccgttgcccaggacctgaacgcgccttctgattgggccaaccgtgggaaagacagttatggaacgagtaagacttgattgacagagtgctgaaacccacaggcaaccaacaggtccagattatataagcggaaagctaatgatgagagcaatgagcattccgattgtgattggtaggcaaggacttttccaaaagtcagccgtgaaattccacagcccatgaattttccagcccatggagattttgcctgtttgtagcccccaaaaagtaaggaagaagataacacacccctggaattccggtattccccaggaattaggatgtggcacttctgggggtccatttaaaggggggaaaaatcccaatttccccactttgccatttagtcaaaagacaaaaatgctttatagcaaaaatggaaagagaaccatggaaatgcttctttctccagtttattgggttgaaatgtgtatcttatttgagtcgggaaataacctaatgtgtttgataattagtttagtttgtggctttcatggaaactccctgtaaacgtaaaagcttcaggggttatgtctatgttcattctatagaagaaatgcaaactatcactgtattttaatatttgttattctctcgatgaataggaaatttatgtagaatgcaaacaaaatacttttacccacttaaaaagagaatataacattttatgtcactataatcttttgtttttttaagttagtgtatattattgttgtgattatctttttgtggtgtgaataaatcttttatcttgaatgtaataagaatttggtggtgtcaattgcttatttgttttcccacggttgtccagcaattaataaaacataaccttttttactgcctatataatgtttttaaaaaaaaa

SEQ ID NO: 872 - DNA, 459 bp, Homo sapiens
  SIMILAR (246)..(458): 981254mologous to Homo sapiens aldehyde reductase (EC 1.1.1.2),accession number J04794,Smith-Waterman Score=372.
  misc_feature (1)...(459): n = a,t,c or g
naaataagagcatcctagcagcggcggaattcaggagttctccaacccgcgctgcggagtccttcctcgggaggcggcgaaggcggtccaccctgcgcgtgatccttcatgcccggcccctgcccctccctccgggtggaacttccccctcaccgccagacttaagctgaggatcgttggatctctggcggggtgcagaactgagcccaggccacagtaccctattcacgctctgtgcttgtgccaaggtaaaagcagctgttaagtatgcccttagcgtaggctaccgccacattgattgtgctgctatctacggcaatgagcctgagattggggaggccctgaaggaggacgtgggaccaggcaaggcggtgcctcgggaggagctgtttgtgacatccaagctgtggaacaccaagcaccaccccgaggatgtggagcctgccctccggaagactc

SEQ ID NO: 873 - DNA, 454 bp, Homo sapiens
  SIMILAR (22)..(192): 871254mologous to Homo sapiens aldehyde reductase (EC 1.1.1.2),accession number J04794,Smith-Waterman Score=248.
gaggaagcgccgaggaattcgcggaaagtgatctccatccccaaaagtatcactccttctcgaatccttcagaacatcatggtgtttgacttcacctttagcccagaagagatgaagcagctaaatgccctgaacaaaaattggagatatattgtgcctatgcttacggtgaggatgtatcagcctcctagacttggggaatgtgagatttggggtgggattctggcccaggtgtgacctaaggcttgctggttgtgagaaggacacaatgttgtgggtgggattgctatgctggacatagcgccctcatttctctttattgagctcagggaagtagtatggctcagggataaggcatataacctgtgagtcccagtcctgcttcttgatatcttgtaacctagagcaagttattaaacttctccaagcctcaactttctatgtgtaaaatgag

SEQ ID NO: 874 - DNA, 1502 bp, Homo sapiens
  SIMILAR (356)..(1381): 361254mologous to Homo sapiens aldehyde reductase (EC 1.1.1.2),accession number J04794,Smith-Waterman Score=286.
agtgataacacttgaaggccgtgaattccggagttctccaaacccgcgctgcggagtgagtgaccaagttccggccagttcgacctcgaggatccagaggtggagacggtactacctcccagctctgttttccatccccttcaggtccttcctcgggaggcggcgaaggcggtccaccctgcgcgtgatccttcatgcccggcccctgcgccctcccttcgggtggaacttccccctcaccgccagacttaacctgaggatcgttggatctctggcggggtgcagaactgagcccaggccacaggaccctattcacgcatctgtgcttgtgccaagggggcaatggcggcttccctgtgttctactgcacactgggcagaaagatgcctcctgatttggtcctggggtacctggaaagagtgagcctggtcaggtaaaagcagctgttaaagtattgcccttagcgttaggttaccgccacatttgattgtggttgttatctacggcaatgagcttgagattgggggaggccctgaaaggaaggaccgtggggaccaggcaaggccgggtgcctccggggaaggaagcctggttttgtgacatccaagctgtggaaacaccaagcaccaccccgaaggaatgtggagcctgcccctccggaaagactctggcttgaccttccagctggaagtatctggacctgtacctgatgcactgggccttatgcctttgagcggggagacaaccccttccccaagaaatgtgattggaacatatggctcgactccccccacttacaaggaaacttgaagggctctgaaggcactggtggctaaggggctggtgcaggcggctggggcctgtccaatttcaacagtcggcagatttgatgacatactcagtgtggcctccgtgcgtccagctgtcgttgcagagtggaatgccaccccataactgggctcaaaatgaggctaattgccccactgccaaggcacgtgggcctggaggtaaactgcctttaatcccttggggctccctctgaatcgtgcatggccgtgatccctgatgagcctgtccctgctggagggaacccagtagtcctgggcattggcttgaaaaagtatggccgatctcccagctcagaatcttgcctcaggtggccaggtcccagcgggaaagtgatctggcatcccccaaaagtatcactcccttctcgaatcctttcagaacattcaaggtgtttgactttcacctttagcccagaagaagatgaaccagttaaatgcccctgaacaaaaattggagatatattgtgcctatgcttacgggtggatgggaagaagagtcccaaatggatgcagggcatcctctgtaccccttttaatgacccgtactgagaccacagcttctttggacttcctttcaactctgcagctaactgaggtcctgccacaaccggaaagagggagttaactaaagccattggagcatccaaaaaaaaa

SEQ ID NO: 875 - DNA, 416 bp, Homo sapiens
aaaactttcttttatttctggcccctttataaccagcatctttttgctttaaaaaatgacctggctttgtatttttttagtcttaaacataataaaaatatttttgttctaatttgctttcatgagtgttgattattgacatcgttggtaaattctagaattttgattttgtttattaactcgaagaaaatctttgctattatcatcttttccacgcgcggtggcattctaagaattaccgctgtcatctggacataatatatctgtcacccatggaaacggtgacatggctcttgcccaatattcaatgcctgttcctgcttaggccattggacgcagaatcctagtgatgctgtacccctcaaggactgaggctttcgagaaattcttaattagatgttgatttgtgacttaga

SEQ ID NO: 876 - DNA, 648 bp, Homo sapiens
tctctgtacctcatgtacacttggaagcttcagggacttagcactggtcatgccagcctctacagatcacatctctgtctataattgggtctcccatggtaatgagaagcagaaagtgctgaagtagcgcactatgtaaggactggcaagagaaaatactgtcgcggcctctaccaggcatagccatggaatcccccatggtgccccaagaagccccgagagaagcacgctgtggtgtagagcaggagactggaggaccacggacttggcagaatttattagcagcaatattcctaagatgaacccaaatttaagagttttgtaagtgctcttttcaattggaaaagacctttgaaatttttttttcttttcttttaggaggccagatgctccagtgcctgatggcgaaagtgagaaaactgtagaagaaagttcagatagcgaatcttcttttagtgattaagcttaattttgataagaattacgatatgcatgcatagggggtacatttacattctgtaagagattgagcctgaactctcttagtcataaaaacatcaaatggccacatgtccactaccaagcttcttctatgttaaaaaaataataataaagcgagttttaacctgccaaaaaaaaaaaaaaaaa

SEQ ID NO: 877 - DNA, 919 bp, Homo sapiens
  SIMILAR (108)..(674): 401254mologous to Homo sapiens protein x 0009,accession number AF155655,Smith-Waterman Score=197.
cggaggcgggcacttggggggaaagttgagacgtgattaccgggttgggcgggccccatctgggaggggtttgtgggtgaactcggggtccaccgcccgctgaggagatggatgaggacgggcttcctctcatggggtcaggcatagacctgaccaaaggtgccagctattcaacagaaaagaacgggtggcttttctaaaccaatttgtggtgcacactgatacagttcctcaaccgcttttctaacagtttgtgaggagaaactggcagaccttttcacttcgtatccaacaaatttgaaacaactctcaatattttaagatgccaagtttgtcatctatcccagggcctagatgatgtcacagtttgaagtatccccctttaaattgtcaccaagtgtcacaaatgggagcacatccttgaaggccactttcagaggcaaccacagccggaaccagtaccaccaggactcctggacttacaggaaagttgaagtattcaggcaggaaattttctttaactgtagcccaaggatcccaagatatgccagatatctcaaaatggttcaaagtgggtgtacccagtgatggccattaggaaccaaaatgatatcagaaggacttagacccagatcttcttgagaggccagatgctcccagtgcctgatggcgaaaagtgaggaaaactgtagaagaaagttcagatagcgaatcttcttttagtgattaagcttaattttgaataagaattacatatgcatgcgataggggtacatttacattctgtaagagattgagcctgaactcttttagtcataaaaacatcacaatggccacagtgtccccctaccaagcttcttctatgttaaaaaaataataataaagcagttttaacctgccaaaaaaaaaaaaaaaaaaa

SEQ ID NO: 878 - DNA, 1572 bp, Homo sapiens
  SIMILAR (126)..(365): 961254mologous to Homo sapiens Human secreted protein clone yk46_1 protein sequence SEQ ID NO:198,accession number AAY73488,Smith-Waterman Score=406.
tgtgtttagaaaaaagatgcattcctgaagatctctggtgctgaagggcctcgagttcctttcagagactgtatttgacacactttaggtacacacaaacgaatggtatcacatgcaatattttaatggagcaatgggagaggctctttgaaatggggtttgcatctttttgtaacattttgatttctctggggccttattcctacttgatgctggcactcacatacccacaagaagctgacacagaagtcagccttaggcgtggggacatatgggtgatgtttgagcatgcaggggccatggggagtttggtgtcagttggtggagaagggactagatggcatctcttagccgaggccaacagggaactgcacaagtccattataagtcaaagttagcaatttttgataccgtaaacacaatacttcattcttcctcatctgagctttccttccttcttccttttctatctctaccttctcataaaggtgctgctgctgctgctaaggtgcccggagtccagaatgtccattaatcactcaggcacgagcctggcactgccacgtcagcccccagcatgaccaaacccaggtttctcttgcttggggctgagaactgtcagatttttctcatcaaaaatgttttccaaggaatcagtggattacagtttttctgccttgaaaatgcactttaaaaaataaattaaagctccagactgtttaaaatatacagagggagcaggggaaagttaaggcatgtgctagtgtctggaacccagttcagtttatctccagttggaaacggatattacactatattatgtataaatgtatacacacttcctatatgtatccacatatatatagtgtatatattatacatgtataggtgtgtatatgtgcatatatacacacatgcacataacaaaatcagatgctcattacaaatccagatgctcattacaaaaccagatgctacacaaacagcagcagaggaaacaaggttggaccccttgcaacagatccacaaaaaataaaaacagcctacttgcagtgactttggtcatttcctgtatgttcataaagaatggattgtaacaaggaaaaaaaggaacagtgttagttgaaaaaggaaaaatgggcgaaaccatcttgatccgatgcgaatgcagtaatgttctatataccatttcatcagttatttcttttagtcatgttgatttgatttcagtttctggctatgaaaaacatttttaaactcgtcacccacaacaaactgaacaaaactactacagtgaaagcccttttcagtgaaagatgtcagaaacctcaaaacctttggcctgactcagaactaccatgtgaaaatcagtactctcttaatgtttgaaataaaaactgaaaaaaaaaacaaaaaaacaaaaaaccttttttgaagcaccttaacgtggccatccatttgagaagtgggtgccactttttttctttgagcaccttattgatgtgtttgctatctgctgtctttctgttacctgttggctgaatggctagctgttaacatatacatgtgcac

SEQ ID NO: 879 - DNA, 478 bp, Homo sapiens
  SIMILAR (251)..(93): 471254mologous to Homo sapiens PRO0657,accession number AF090942,Smith-Waterman Score=78.
ttttttttttttttttttatgtgacagagtcctgctctgattcccagggtggagtgcagtggtgccatcttggttcactacaacctccacttcccgggttcaagcgattctccctgcctcagcccttcctaagtagcctgggattacaggtgtgcgtcaccacgtctggctaatttttgtacttttaaatttttgtatttttagtagagacaggggtttcacccatgttggccaggctgggctcgaactcctggacctcaagtgatccacccacctcggcctcccaaactgctggaattacaggtgtgagccaccgtgcagggccactcacctgatgttagactttctccacgaagtcacttattaaccttaatctcctccacttgaccggcctctgttttgttccagcagccatttttcagatacctggtacgcacaagcagggcccagcttgggagacgctaggataactaagacc

SEQ ID NO: 880 - DNA, 1144 bp, Homo sapiens
  SIMILAR (1)..(969): 1001254mologous to Homo sapiens four and a half LIM domains 1 protein isoform B,accession number AF098518,Smith-Waterman Score= 1858.
  misc_feature (1)...(1144): n = a,t,c or g
atggcggagaagtttgactgccactactgcagggatcccttgcaggggaagaagtatgtgcaaaaggatggccaccactgctgcctgaaatgctttgacaagttctgtgccaacacctgtgtggaatgccgcaagcccatcggtgcggactccaaggaggtgcactataagaaccgcttctggcatgacacctgcttccgctgtgccaagtgccttcaccccttggccaatgagacctttgtggccaaggacaacaagatcctgtgcaacaagtgcaccactcgggaggactcccccaagtgcaaggggtgcttcaaggccattgtggcaggagatcaaaacgtggagtacaaggggaccgtctggcacaaagactgcttcacctgtagtaactgcaagcaagtcatcgggactggaagcttcttccctaaaggggaggacttctactgcgtgacttgccatgagaccaagtttgccaagcattgcgtgaagtgcaacaaggccatcacatctggaggaatcacttaccaggatcagccctggcatgccgattgctttgtgtgtgttacctgctctaagaagctggctgggcagcgtttcaccgctgtggaggaccagtattactgcgtggattgctacaagaactttgtggccaagaagtgtgctggatgcaagaaccccatcactgggaaaaggactgtgtcaagagtgagccgcccagtctctaaagctaggaagcccccagtgtgccacgggaaacgcttgcctctcaccctgtttcccagcgccaacctccggggcaggcatccgggtggagagaggacttgtccctcgtgggtggtggttctttatagaaaaaatcgaagcttagcagctcctcgtggcccgggtttggtaaaggctccagtgtggtggcctatgaaggacaatcctggcacgactactgcttccactgcaaaaaatgctccgtgaatctggccaccaagcgctttgttttcccccaggagcaagtgtattgtcccgtctgtgccaaaaagctgtaatctgacaggggctcctgtcctgtaaaatggcatttgaatctcgttctttgtgtccttactttttgccctataccattcaatnaggggaagagtggtccttc

SEQ ID NO: 881 - DNA, 2574 bp, Homo sapiens
  SIMILAR (217)..(714): 631254mologous to Sus scrofa four and a half LIM domains 1 protein, isoform C,accession number AJ275967,Smith-Waterman Score= 549.
gcattcctcctgtagctgcacgaaaggattcaggtttgacgcttcagttggattgaatcgaaagagaggtatatttggtgtcaggcgtttgtggtggcatgtgaaatcattatccacgtttgataacagtttgactttttgcctgctgtaataatagtagcaccttggaagttgttttcaaccatatccaagcctttgcccgaatacatcctatctgccacacatccagcgtgaggtccctccagctacaaggtgggcaccatggcggagaagtttgactgccactactgcagggatcccttgcaggggaagaagtatgtgcaaaaggatggccaccactgctgcctgaaatgctttgacaagttctgtgccaacacctgtgtggaatgccgcaagcccatcggtgcggactccaaggaggtgcactataagaaccgcttctggcatgacacctgcttccgctgtgccaaattgccttcaccccttgggccaatgagaccttttgtggcccaaggacaacaaagatcctgtgcaacaagttgcaccactccgggaaggactccccccaagtgcaaaggggtgcttcaaggccattgtggcaaggagatcaaaacgtggagtacaaggggaaccgtctgggcacaaagacttgcttcacctgtagtaacttgcaagcaagtcatcgggacttggaagcttcttcccctaaagggaaggacttctactgtgtgacttgccatgagaccaagtttgctaagcattgtgtgaagtgcaacaaggccatcgcatcttggggagtcacttactaggatgagccctggcatgccgagggctttgtatgtgttacctgctctaagaagctggctgtgcagcatttcaccactgtggaggaccagtaatactgtgtggattgctacaaagaactttgtggccaagaagtgtgctggatgcaagaaccccatcactgggtttggtaaaggctccagtgtggtggcctatgaaggacaatcctggcacgactactgcttccactgcaaaaaatgctccgtgaatctggccaacaagcgctttgttttccaccaggagcaagtgtattgtcccgactgtgccaaaaagctgtaaactgacaggggctcctgtcctgtaaaatggcatttgaaatccccgttcctttggtgtcccttactttcctgccccctaaacccatcaaatgggggaaagagtggtcccttccccttcctttaaaagttctcccttcccgtcttttctccccattttacagtattactcaaataaggggcacacagtgatcatattaggcattttggcaaaaaggcaaccctggcaggcaaagtggatttctgtccggctgcaatttaaaaatgaaaacttaggtagattgactcttctgcatgtttctcatagagcagaaaagtgctaatcatttagccacttagtgatgtaagcaaggaagcatagggagataaaacccccactgaggatgcctctccatgcctcagctggggacccaccgtgtaggacacacggacatggcaagagttgcagcgggctgcttcccaactcactgctcaccctcttctgtgagcaggaaaagaaccctactgacatgcatggtttaacttcctcatcagaacttctggcccttccttctgttcttttgtgcttttcaaattaactaacacggaacttccagaaaattaacatttgaactttagctgtaattctaaactgaccttttccccggtactaacgtttggtttccccgtgtggcatgttttctggagcgttcctactttaaagcatggaacatgcacggtgatttgggaagtgtagaaagacctgagaaaaccgagcctgtttcagaggaacatcagtcacaacgaactacttctggaagcttaacaaaactaaccctggctgtcctttttattgtttttaattaatatttttgttttaattgatagcaaaataggtttatgggtttgggaaacttgcatgaaaaatatttttagccccctcatgatgttccctgccagggcggaaattccatcctaccagaaagtaacccgccaaaactcctagaggggggaggttggaggccagggccccccagggcttgtcatccaaccatgggatatgaccatttcacaaccagtgacttagttgaatccccttgttaacgtagttagttgtcctgctcttttgtcccatgtgttaatgaggaactggcaaagtcccttcctgtttgtggatttcccaggactttttcctcaagagggaaatctgggatttcccaccctacccgcttaccctgaaatgcaggatcaccttacttacctgtattctacattatttatatgacatagtataaatgagacaatatcaaaaagttaaaccatgtaatggacaatacatactaacattcttgtaaggagtggttagagaagctgatgcctcatttctacattctgtcaattagcttattatcatctaacgtttcagtgtatccttacagaaaataaagcagcatatgaataaaaaaaaaaaaaaaaa

SEQ ID NO: 882 - DNA, 689 bp, Homo sapiens
  SIMILAR (237)..(332): 591254mologous to Homo sapiens Human secreted protein, SEQ ID NO: 7214,accession number AAG03133,Smith-Waterman Score=99.
tttttttttttttttttgagatttcgcctactcacctcaaaccctctgaagactgccaaaagctacgccacaatcaaattctgcaggttctttcaaatatcatttcacttagctcttctacaacaaagcctcactactcaaagtatgggccttagaagagcgtcagcataattgtttggaatgttattagaaaaataaaatgtttttcttctgataattgaaaatgttcctcttcaaagcattttaccaaagaagacagtcaaataaccaataaacatatagaaaagtgttcaagttaattacttgtcagggaaatgcaaattataaccacaaagagtgtctctgccatccaccagaatggctaaaatgaaaacacaaaacagacatgtcaagcatcgataatgatatgcagcaatgggagttcatgcgctaggaatgggcaaactggtaaaactagaaaactaattggcaatagctactaaggctggacaaatgtgtatctatacgacccagcaattcctttcctagatatttccccaacagaaaggcatatatatgcttaccacaagacatgtataagaatgttcaaagcaacactatttaaaatagctccaaacatataagactgagacaatatatgcagtttcatattttactttttcatagatagtaagcatttcccctcgtgc

SEQ ID NO: 883 - DNA, 2626 bp, Homo sapiens
  SIMILAR (333)..(866): 371254mologous to Homo sapiens heat shock protein hsp40- 3,accession number AF088982,Smith-Waterman Score=218.
  misc_feature (1)...(2626): n = a,t,c or g
tttgaagctgtacgcctgcacgatctggacctgttttcccggatcgacgatttcgagagattcgcatgcactaggtcaggcggcgtaccctgagctcgaggaggtggcatcggctgtctcacggaccacggtggctcccgcaggtactcaccgcatcacccccactgcaggcccgaggagctttccggagcttcccacactcctggggagaagacttcttagccagcttgatgtttaaaattcagctggagcccttaaaacttcgagcgtggacgctgaatgggtttgtaaagtttcgaaacaaggagaccagtgctggtccagtggctgtgatgggaaaagattattacaagattcttgggatcccatcgggggcgcaacgaggatttgatcgtttgtgcctaccggacgatggccttgaagtaccacccagacaagaataaagaacccaacgctgaggagaagtttaaggagattgcagaggcctatgatgtgctaagtgaccccaaagaaacggggcctgtatgaccagtatggggaggaaggcctgaagaccggcggtggcacatcaggtggcttccgtggctttctttcactacacctttttatggggacccccatgccacctttgcctccttctttggtggctccaaccccttcgatatcttctttgccagcagccgcttccacttcggcccttcagtggctttgacccagatgacatggatgtggatgaagatgaggacccatttgggcgcttttcggccgttttggctttcaatggggttgagtagggggtccaagggcgagccccaggaaccattgtaaccctcgggcggcaaggttgcagggaccccccagtggttgcacgagctgcgggtgtccctggaggagatctaccatggctccaccaagcgcatgaagatcacaaggcgtcgcctcaaccctgatgggcgaactgtgcgcaccgaggacaagatcctgcacatagtcatcaagcgtggctgggaaggaaggcaccaagatcaccttccccaaagaaggcgacgcaacaccttgacaacatccctgctgacatcgtctttgtgctcaaagacaagccccatgcacacttccgccgagatggcaccaacgtgctctacagtgccctgatccagcctcaaggaggcgctgtgtggctgcactgtgaacaattccactattcgaccggccgagggatccctttgccctgcaatgatgtcatcaagccaggcaccgtgaagagactccgtggggagggccttcccttccccaaagtgccaactcagcgaggagacctcattgttgagttcaaagttcgcttcccagacagattaacaccacagacaagacagatcctttaagcagcacctaccctgttcctaggctctgccccagccagtccagagcctaccacagcaatacccccaacactcactccactcaatgtgcacccagcttgatgtccactggacactgggcaactttttctaaaatgcaaaaaaaaagccactggttttcaggaaaatgttcctgtccctgaccccttttagagctgggctgcctggggggagtgggagggaggtggggagagctagcccaggcccaggggtcaatgttcatgtcacttagctttcaatccagtttccacttgcagtggctgggagagtgaccttgagtggctactttggaagatatgttaggagattcctttatcccatggcctgttacataggcatgttcctccttncccctcagctttgctaataccagtcccctcccttccctttggcttcctgctgttgggggtggaaaagactagaaaggacattgctttctaaagcccccacccccaggtccacagtgtccaaggtaatggcacacatattcatgcacaagaagcactcacctagagctgtctgtgcctctctgggagaaaggagagaggataagaagggaaagttcacaacctgtgaacagggacttgagcacgagacacttttcatctggagcaggggggtgagctcctcagcagcctccgtaacagctgccctgcctacacctgcagagctggaggttctgtcctccctgctgctctcaggagtgttcaagggtggagggcagggaatggggcctgaggtattaaggctaagaagtgggggacagggccccatctaccagcctttcattcaggaaggggaaagggctttggggtcaggtggccagctatttccccaccaagagatttcagggttcacaggtttttcccccacacctcttgaactcagggccttagccacccccaaacttccaaatcccactttttgttgatatgtgaagcttattcattttctttaccctttggagggctgtgtggggaatttccagcccttttatgcctgtgtgatcccaccccacccccatagttgtataaaggtcatagtgaagaagctgggggaagactgcttcagccagatcctggggtggggtctttaggttttctcactttgacaacccccgaatgtttttatagtagtttttttgtatttttttcgtaatgacagtattatgtaaaaaataaagtattttaaaaataaaaaaaaaaaaa

SEQ ID NO: 884 - DNA, 486 bp, Homo sapiens
  SIMILAR (278)..(430): 961254mologous to Sus scrofa UDP glucose pyrophosphorylase,accession number X99312,Smith-Waterman Score=241.
  misc_feature (1)...(486): n = a,t,c or g
gtgtccnnnaattgaacacttttgacncttatcacgccaagcttgtcacgagggaggtgtttaggagaaagtaggggctttnnnttttttagccggctgactggtggacaagggggggttagcagctgggctgcgaccgttagggaggggctcaaggtgtgcatgtgtgagggaagagagagagagagaagggcgcctcataggtgactttcagcctgcgagccttcttcccggggcgccataaacgcccccaatttcccagctgctaaaggaagaggaagatcttagcaaagcaatgtctcaagatggtgcttctcagttccaagaagtcattcggcaagagctagaattatctgtgaagaaggaactagaaaaaatactcaccacagcatcatcacatgaatttgagcacaccaaaaaagacctggatctgactgttcagcaaattgaacatttgaataaaacctacaatacagatgttcctct

SEQ ID NO: 885 - DNA, 2186 bp, Homo sapiens
  SIMILAR (261)..(938): 581254mologous to Homo sapiens UDP-glucose pyrophosphorylase 2,accession number BC002954,Smith-Waterman Score=559.
cccacgcgtccggcgaggtgtttaggagaaagtaggggctgtgggtgtcgggagccggctgacgggtggacaagggggggttagcagctgggctgcgaccgttagggaggggctcaaggtgtgcatgtgtgagggaagagagagagagagaagggcgcctcagaggtgactttcagcctgcgagccttctttcccggggcgccataaacgcccccaatttcccagcatgcctaaaggaagaggaagatcttagcaaagcaatgtctcaagatggtgcttctcagttccaagaagtcattcggcaagagctagaattatcctgtgaagaaggaactagaaaaaatactcaccacagcatcatcacatgaatttgagcacacccaaaaaaagacctggatggatttccggaagctatttcataggatttttgcaaagaaaaggggccttcctgtggaatttgggggaaaaattccagagacccccctaagattcgattcaaccctatgaaaagataaaggccaggggcttgcctgataatatatcttccgtgttgaacaaactagtgggtggtgaaactcaatggtggtttgggaaccagcatgggctgcaaaggccctaaaagtctgattggtgtgaggaatgagaatacctttctggatctgactgttcagcaaattgaacatttgaataaaacctacaatacagatgttcctcttgttttaatgaactcttttaacacggatgaagataccaaaaaaatactacagaagtacaatcattgtccgtgtgaaaatcctacactttcaatcaaagcaggtaccccgaggattaataaagaatcttttacttccctgtagcaaaggacgtgtcttactccaggggaaaattacagaagcttggtacccccccaggtcatgggtgatatttacggccagtttctacaactctggattgcttgatacctttataggagaaggcaaagagtatatttttgtgtctaacatagataatctgggtgccacagtggatctgtatattcttaatcatctaatgaacccacccaatggaaaacgctgtgaatttgtcatggaagtcacaaattaaaaccacgtgcagatgttaaagggggcggggacaattcacttcaatatggaagggcaaacttgaggacttggtgggaaattgctcaagtgccaaaaggcaccatgtagacgagttcaagtctgtatcaaagttcaaaatatttaataccaaacaacctatggatttctcttggcagcagttaaaagactgcaggagcaaaatgccattgacatggaaatcattgtgaatgcaaagactttggatggaggcctgaatgtcattcaattagaaacctgcagtaggggctgccatcaaaagttttgagaattctctaggtattaatgtgccaaggaccccgttttctgccctgtcaaaaccacatcagatctcttgctggtgatgtcaaacctctatagtcttaatgcaggatctctgacaatgagtgaaaagcgggaattttcctacagtgcccttggttaaaataaggccagttctttttagaaaggttcaagattaatctaaaaggatttgaaaagaatacaaaataggcttgaattggatcaccttcacagtttccgggagatgtgaccatttggaaaaaaatggtttcattaaaggggaaccggttatccatccattgcaaatccatggtgaccggaatggatatccccacctgggagccagtatttagagaaccaagattggtgtctggaaaccttccgcatcttggaccactgaaatgaaaaatactgtggacacttaaaataatgggcttagtttcttaccaatgaaatgttctctaggattcgtaaaataggcaggtactttacctatgttactgtaccctgcagtgttgaatttttaaaatagagttttctgcagtatgcttttagtctaagaaaagcacagatggagcgaatactttactttccttctttgaagagaatcccaaaagttatgttcatcttaaagtgcaatattgtttaatcttaaaactggggcaactttggaagaacttttaacagaagccctcaatgatgatcactttgaattgcttgtgatttcaaaaataaagcagtgaagcaaaaaaaaaaaaaaaaaaa

SEQ ID NO: 886 - DNA, 395 bp, Homo sapiens
  SIMILAR (98)..(298): 651254mologous to Homo sapiens troponin T,accession number X79855,Smith-Waterman Score=202.
gagactgagcagacgcctccaggatctgtcggcagctgctgttctgagggagagcagagaccatgtctgacatagaagaggtggtggaaggagtaccgaggaggaggggcaagaagaagcagctgttgaagaagaggaggactggagagaggacgaagacgagcaggaggaggcagccgaagaggattctgaagcagaggcttaggacccagggagaccagggcagaagaagatgaataatatgaggatgcatcggattgctgaagatggcccaatggaggagtccgaactaaagccctgtgtcgtagaggcccaatttggtgcttctcatgagtcctcatatgattcatagtggtctatgtagacctgcatcgattgtgcatggaataggactg

SEQ ID NO: 887 - DNA, 357 bp, Homo sapiens
  SIMILAR (123)..(356): 921254mologous to Homo sapiens Human secreted protein, SEQ ID NO: 5883,accession number AAG01802,Smith-Waterman Score=388.
  misc_feature (1)...(357): n = a,t,c or g
tgcacgggcatagccccccccagcaagactccgctcacaccccggtcacccagtcactggccaatggggtcctatgaagatcaaatgtcactataacacgagggtgtgagccgggcgccagtgcctgcagccggtgctgtccacagggagctccagcccttctcacactcgacccgcagaaaccacccaccttcaccatgtctgacgaggaagttgaacaggtggaggagcagtacgaagaagaagaggaagcccaggaggaagaggagaaaccgagacccaaactcactgctcctaagatcccagaaggggagaaagtggacttcgatgacatccagaagaagcgtcagaacaaan

SEQ ID NO: 888 - DNA, 457 bp, Homo sapiens
  SIMILAR (9)..(251): 921254mologous to Coturnix japonica fast troponin T isoform,accession number AF139128,Smith-Waterman Score=367.
gctgcgagaagacgacagaaggggagaaagtggacttcgatgacatccagaagaagcgtcagaacaaagacctaatggagctccaggccctcatcgacagccactttgaagcccggaagaaggaggaggaggagctggtcgctctcaaagagagaatcgagaagcgccgtgcagagagagcggagcagcagaggattcgtgcagagaaggagagggagcgccagaacagactggcggaggaaaaggccagagtgcagatgctggccaagttcagcaagaaggctgggaccccagccaagggcaaagtcggcgggcgctggaagtagagaggccagaaaggcccctcgaggcagagaccctccgccctcttgcacaccagggccgctcgtgggactccacatcctccagcccccacaatcctgtcaggggctccctgacagtcctgggggtggagagg

SEQ ID NO: 889 - DNA, 458 bp, Homo sapiens
  SIMILAR (1)..(60): 801254mologous to Homo sapiens troponin T,accession number M21984,Smith-Waterman Score=68.
agggcagaggtcgccctgaagaagaagaaagctctgtcttccatgcgagctcactacagcaggctacctggccaaggctgaccagaagagaggcaagaagcagacagcccgggaaatgaagaagaagattctggctgagagacgcaagccgctcaacatcgatcaccttggtgaagacaaactgagggacaaggccaaggagctctgggagaccctgcaccagctggagattgacaagttcgagtttggggagaagctgaaacgcctgaaatatgacatcaccacgctcaggagccgctcgtgggactccacatcctccagcccccacaatcctgtcaggggctccctgacagtcctgggggtggagaggccatcccggggcgtcccccgcgtctgtgtccttgctgccttcatcccctggggcctgtgaataaagctgcagaacccccaaaaaaaaa

SEQ ID NO: 890 - DNA, 1659 bp, Homo sapiens
  SIMILAR (695)..(832): 1001254mologous to Homo sapiens protein kinase BRPK,accession number AF316873,Smith-Waterman Score=264.
acaaataaccataattctttttttattttttctgagacagagtctcgctgtgttgctcaggctgaagtgattctcctgtctcagcctccttcacctcccaggttcaagtaattctcctgtctcagcctcccgagtagctgggatacaggcacacaccaccatgcctggctagtttttttgtatttttagtagagacaggggtttcaccatgttggccaggctggtcttgaactcctgacctcaggtgatctacccgcctcggcctcccaaaatgttggcattacaggccaccacacccggcaataactgattcttaatgcacctggttcttaggtttggatttggggtttcaaattcaaatcaaagtctcctggggtataagggcccttggagatcatttgaaccaagctctagctcctttggtcttggggacagctccaattactagaacatgatttaaattgagccacacagtcctttgcctggggattttgcagcctgtacttactggaggcatttccgtgttcgcacagcaggcccttctgatcagctctcaggccttgctgacctcctgggccaacactgagccattagcccctgtcagctatgtcttgctggtggctttagtagggacataggagggcctctcagagggaaggaggggaggagaaatggtcactttgcttgctccttcccagacggctgcccctggctggtgatcgcagattttggctgctgcctggctgatgagagcatcggcctgcagttgcccttcagcagctggtacgtggatcggggcggaaacggctgtctgatggccccagaggtgagtcccgagtgtgtcatgcgccatcggcagcccttcccccacatgtccactgaatgcaggagactcgatgccttgtgataacccaacacctccatcttttctgacccataatttggcacaagttccttccctgccactttgctttcctccggcgttccctcatgttccaggagaatgcaagtcctgtcacataaaccaggtggtctaagcagaccccttctgggtctgagccacagctcactcaagctctgggttccttgggacagagttcagattagcccatggatcaggtgatgtgcaggacatgaaaaggttagatgggcgggcagcgtgatgtctcacccactgcttctgagcaggtgtccacggcccgtcctggccccagggcagtgattgactacagcaaggctgatgcctgggcagtgggagccatcgcctatgaaatcttcgggcttgtcaatcccttctacggccagggcaaggcccaccttgaaagccgcagctaccaagaggctcagctacctgcactgcccgagtcagtgcctccagacgtgagacagttggtgagggcactgctccagcgagaggccagcaagagaccatctgcccgagtagccgcaaatggtgcttcatctaagcctctggggtgaacatattctagccctgaagaatctgaagttagacaagatggttgggttggctcctccaaaaatcgggcgacactttgttggccaaacaggctcacaggaggaagttgttgtgttggaaacaaaaaatgaagatgctctttttggctaacctggagtgtgaaacgcttcttgccaggcaac

SEQ ID NO: 891 - DNA, 1214 bp, Homo sapiens
  SIMILAR (457)..(984): 461254mologous to Homo sapiens Human cytoskeleton associated protein 16 (CYSKP-16),accession number AAY91961,Smith-Waterman Score=243.
cacacaccccggccacccagtcactggccaatgggctcctaggaagatcaaatgtcactataacacgagggtgtgagccgggcgccagtgcctgcagccggtgctgtccacagggagctccagcccttctcacactcgacccgcagaaaccacccaccttcaccatgtctgacgaggaagttgaacaggtggaggagcagtacgaagaagaagaggaagcccaggaggaagctgcagaagtccatgaggaagttcatgaaccagaggaagttcaagaagaggagaaaccgagacccaaactcactgctcctaagatcccagaaggggagaaagtggacttcgatgacatccagaagaagcgtctgaacaaagacctaatggagctccaggccctcatcgacagccactttgaagcccggaagaaggaggaggaggagctgtccgctctcctagagagaatcgagaagcgccgtgcagagaagagcggagcagcagaggattcgtgcagagaaggagagggagcgccagaacagacttggcggaggaaaaggccagacgggaggcgcgaggatgccacgaggagggcagaggacgaccttgaagaagaagaaagctctgtcttccatgggagccaacttacagcagctaccttgggccaaggcttgaccagaagagaggcaagaaagcagacagccccgggaaatgaagaagaagattctggctgagcagacgcaagccgcttcaaccatcgattcaccttggtgaaagacaaaactgaggggaccaaggccaaaggagcttctgggagacccttcacccagctggaagatttgaccaagttcgagttttggggagaagctgaaacgcccagaaatattgacatcaccacgcttcaggagccagagtgcagatgctggccagaaagcaccagcaaagaaggcttgggacccccagccaagggcaaagttcggtgggcgctggaagtagagaggccagaaaggcccctcgaggcagagaccctccgccctcttgcacaccagggccgctcgtgggacttccacatcctccagcccccacaattctgtcaggggctccctgacagtcctggggggtggagaaggccattcccggggcgtcccccgcgactgtgtccttgctgccttcactcccctggggcctgtgaataaagctgcagaacccccttaaaaaaaaaa

SEQ ID NO: 892 - DNA, 1950 bp, Homo sapiens
  SIMILAR (329)..(601): 631254mologous to Homo sapiens Lipopolysaccharide induced protein,accession number AAR43682,Smith-Waterman Score=273.
  misc_feature (1)...(1950): n = a,t,c or g
acgtgaccacccggactcgaagcccgccccgcccccgcccggctcgccggctccggggtctgctccgggggtcgcggacgcggggccgggcggcggagccggcgccagagcatgcggggcgcggcgcgggcggcatgggggcgcgcggggcagccgtggccgcgaccccccgccccgggcccgcccccgccgccgctcccgctgctgctcctgctcctggccgggctgctgggcggcgcgggcgcgcagtactccagcgaccggtgcagctggaaggggagcgggctgacgcacgaggcacacaggaaggaggtggagcaggtgtatctgccctgtgcggcgggtgccgtggagtggatgtacccaacaggtgctctcatcgttaacctgcggcccaacaccttctcgcctgcccaggcacctgaccgtgtgcatcaggtccttcacggactcctcgggggccaatatttatttggaaaaaactggagaactgagactgctggtaccagacggggacggcaggcccggccgggtgcagtgttttggcctggagcatggcggttctgttcgtgggaggccacgccgcaatcanggatatcggccggaggaccacaggcttccagtacgagctggttaggaggcacagggcgtcggacctgcacgagctgtctggtgagtgtcctgcctgnnnnnnnnnnnnnnnnnnnnnnnnnnnnnnnnnnnnnnnncctccagcacgtgccgccaactcacatttgaagtggcgttggtcacaaaggtgccttgacgtggacaccctccctgacttggctttgctgagtgtgaggatcctttgacggtggtgggcggcgttccagagcctgtcccgtccaggctgcttcctgactctgcctttcttctccagcgccgtgccgtccctgcagtgacaccgaggtgctcctagccgtctgcaccagcgacttcggtgagtgtctcctcggcagcttctaccnnnnnnnnnnnnnnnnnnnnnnnnnnnnnnnnnnnnnnnnccccatctccttccccgcacagccgttcgaggctccatccagcaagttacccacgagcctgagcggcaggactcagccatccacctgcgcgtgagcagactctatcggcagaaaagcagggtcttcgagccggtgcccgagggtgacggccactggcaggggcgcgtcaggacgctgctggagtgtggcgtgcggccggggcatggcgacttcctcttcactggccacatgcacttcggggagccgcgggctccgctgtgcccccaaggcttcaaggactttccagaggatgtacaggggatgccccaggagagggggctgaaccctttggtaggctggcaacggaactgactccggttggccgctgcctttccctctccttgatgagtccacaggactgctgtgggcgctgcggtcctggtcgggccgtgcggttgagggccgcgcgcctgggagccgccatgcccctgggccccaggcctgaccctggtacccgaagctgtggacgttctccgccacacttcaacccctatgtacttctcagccaatggatgccctggccgattggaaatgctgtaaaatgcaaactaagttattatattttttttttggtaaaaaagatatgtccataggaaacaaattcccgtgtcttaaaacgccttggtttgccgtctgatactgttctctaaagacgttaggagtcacgtgcatctggcctgcggttgtgtgaagcactggccgttgggcacagtggatgtgtgaaaaggtgccattcagagttgttattctcatgacggaagttttggagccaaataatacgttttttattttcattttatttttaaaggatgagctttggtccttttcaggccgccggttgtttccgttcccgagaataaagacgaggatccgaccagcc

SEQ ID NO: 893 - DNA, 450 bp, Homo sapiens
  SIMILAR (47)..(313): 1001254mologous to Homo sapiens homeobox prox 1,accession number AF100755,Smith-Waterman Score=430.
aataatcctgattttaaggctggtgtgatgctttgcctaccctgctcagattcagcgtcatgatgattacctggtaatgcttaaggcaattcggattttggttcaggagcgcctgacacaggatgcagttgctaaggcaaatcaaacaaaagagggcttacctgttgctttagacaaacatattcttggttttgacacaggagatgcagttcttaatgaagctgctcaaattctgcgattgctgcacatagaggagctcagagagctacagacaaaaatcaacgaagccatagtagctgttcaggcaattatacacttctggcatgtttggaaatcaaaatgtcacattctcgggggaggaagcccagaaaattgggtatgttctagagatttaccaccattgcttattgcttttttctttaataaagtttaggaaagtagaatttttaa

SEQ ID NO: 894 - DNA, 462 bp, Homo sapiens
  SIMILAR (97)..(459): 991254mologous to Homo sapiens homeobox prox 1,accession number AF100755,Smith-Waterman Score=592.
tatctcagagatgttgactgtcctttcaagattcaagatcgacaagaagctattcactggcttcttggtttagctgttagacttgaatatggagataatgtaaataatcctgattttaaggctggtgtgatggctttggctaacctgcttcagattcagcgtcatgatgattacctggtaatgcttaaggcaattcggattttggttcaggagcgcctgacacaggatgcagttgctaaggcaaatcaaacaaaagagggcttacctgttgctttagacaaacatattcttggttttgacacaggagatgcagttcttaatgaagctgctcaaattctgcgattgctgcacatagaggagctcagagagctacagacaaaaatcaacgaagccatagtagctgttcaggcaattattgctgatccaaagacagaccacagactgggaaaagttggaagatga

SEQ ID NO: 895 - DNA, 1256 bp, Homo sapiens
  SIMILAR (220)..(504): 441254mologous to Gallus gallus CLE7,accession number U46756,Smith-Waterman Score=160.
gtcatttcggagcgactcagcgcctgcccgccctctcgccgcgtcgccggtgcctgcgcctcccgctccacctcgcttcttctctcccggccgaggcccgggggaccagagcgagaagcggtggaccatgttccgacgcaagctgactggctcctcgactacttattaccccttttgtgttcaaccgcagagatgaaacagaatttagaaacttcatccgtttggcttgaagaccagaaaatcaggcactacaagattgaagacagaggtgaatttaagaaacatccacagcagcgactggcccaaggttctttgaaaagtatttcaagagatgttaactgtcctttcaagattcaagatccgacaagaaagctattgactggcttcttggtttagctgttaagacttgaatatgggagataatggctgaaaaataccaaggatttagtaccctgataattccaaaacttgctggacaatgcaactaaaaatggcagaaccatttgatccattttgggatgtaaataatccctgattttaagggctggtgttgttggctttgggctaaacctggcttcagatttcagcgtcatgatgattctcctggtaaatgcttaaggcaaattcgggattttgggttcaggagccgccttgaccaccagggatgccagtttgcttaagggcaaattcaaacaaaagaggggcttaacctgttgcttttagacaaacccatattcttggttttgacgacaggagatgcaagttctttaatgaagctgctcgaaattctgcggattgcttgcacataagaggagctcagagagcttacagaccaaaaatcaacgaaagccatagtagctgttcaggcaatttattgctgatccaaaagacaggaccacagactgggaaaaagtttggaagatgaacactttgaggaccttcagcttctcacctactttaggtacatgttggggaaccatacacttctggcatgttttgggaaatcaaaatgtcacaattctcggggggaaggaagcccagaaaaattggggtatggttctagaggattttaccaccattggcttattgcttcctgcttttttctttaataaagtttaggaaagtaaaataaaataaaaaagggggggccgttttaaaggagcaagctttaggtccgggtgctggggaggattaatgttttttataggggccccaaaattaatttcctggcccggtgtttaaaagtgggggatggg

SEQ ID NO: 896 - DNA, 894 bp, Homo sapiens
  SIMILAR (517)..(891): 961254mologous to Homo sapiens Human potassium channel K+ Hnov42,accession number AAY34130,Smith-Waterman Score=627.
atgtaccagtatcagaaccaggccacacaacaggagtgtagcatttgcttggaacatggaatgaaaattaagagtgaatcccaggttttagccaagggcaggaaggtggcaaagggaggcgaatccgagtgggtggagggaggggaagggcgagaggagaaaaagcattcaagaaatatttatcaaagacctgctgtaagccaggtggttgctgtatatggaactttatctgatttgctttctgtggccagcagtaaactcggcataaaagccaccagtgtgtataatgggaaaggtggactgattgatgatattgctttgatcagggatgatgatgttttgtttgtttgtgaaggagaatcatttattgatcctcagacagattctaagcctcctgagggattgttaggattccacacagactggctgacattaaatgttggagggcggtactttacaactacacgcattactcctaccaggcaaatctttgctgtgcaaatcttgaatgagctgatctctggatcagtacttaactgtgcaaatctccagggagtcaagatgctctgttctaatgcagaaggagcatccctgaaactgtgtaattttgaggatccttctggtcttaaagccaatttagaaggtgctaatctgaaaggtgtggatatggaaggaagtcagatgacaggaattaacctgagagtggctaccttaaaagatgcaaagttgaagaactgtaacctcagaggagcaactctggcaggaactgatttagagaattgtgatctatctgggtgcgatcttcaagaagccaacctgagagggtccaacgtgaagggagctgtgtttgaagagatgctgacaccactacacatgtcacaaagtgtcagatga

SEQ ID NO: 897 - DNA, 987 bp, Homo sapiens
  SIMILAR (343)..(723): 961254mologous to Homo sapiens Human potassium channel K+ Hnov42,accession number AAY34130,Smith-Waterman Score=648.
atggctgctgaaccagtagaagacaattgcatcaactttgtggcaatgaaatttattgacaatacgctttactttatagaaaacctggaatcagattactttggcaagcttgaatctaaattatcagtcataagaaatttgaatgaccaagttctcttcattgaccaaggaaatcggcctctatttgaagatatgactgattctgactgtagagggcagaaaggtggcgaagggaggcgaatccaagtgggtggagggggggaagggcgggaggagaaaaaggtgggaggaggaccaggtgggagggtggtggcccactcaggacccagtgggggcagcgtgatgaggcggatgaccctgttcctgaacggcagccccaagaacggaaaggtagttgttgtatatggaactttatctgatttgctttctgtggccagcagtaaactcggcataaaagccaccagtgtgtataatgggaaaggtggactgattgatgatattgctttgaacagggatgatgatgttttgtttgtttgtgaaggagagccatttattgatcctcagacagattctaagcctcctgaaggattgttaggattccacacagagtggctgacattaaatgttggagggcggtactttacaactacacggagcactttagtgaataaagaacctgacagtatgctggcccacatgtttaaggacaaaggtgtctggggaaccaatttagaaggtgttaatctgaaaggtgtagatatggaaggaagtcagatgacaggaattaacctgagggtggctacattaaaaaatgcaaagttgaagaactgtaacctcagaggagcgactctggcaggaactgatttagataactgtgatctgtgtgggtgtgatcttcaagaagccaacctgagagggtccaacatgaagggagctatatttgaagagatgctaacaccactatacatgtcacaaagtgtcagatga

SEQ ID NO: 898 - DNA, 1920 bp, Homo sapiens
  SIMILAR (1)..(828): 921254mologous to Plasmid F Protein A,accession number M12987,Smith-Waterman Score=1314.
atgaaactcatggaaacacttaaccagtgcataaacgctggtcatgaaatgacgaaggctatcgccattgcacagtttaatgatgacagcccggaagcgaggaaaataacccggcgctggagaataggtgaagcagcggatttagttggggtttcttctcaggctatcagagatgccgagaaagcagggcgactaccgcacccggatatggaaattcgaggacgggttgagcaacgtgttggttatacaattgaacaaattaatcatatgcgtgatgtgtttggtacgcgattgcgacgtgctgaagacgtatttccaccggtgatcggggttgctgcccataaaggtggcgtttacaaaacctcagtttctgttcatcttgctcaggatctggctctgaaggggctacgtgttttgctcgtggaaggtaacgacccccagggaacagcctcaatgtatcacggatgggtaccagatcttcatattcatgcagaagacactctcctgcctttctatcttggggaaaaggacgatgtcacttatgcaataaagcccacttgctggccggggcttgacattattccttcctgtctggctctgcaccgtattgaaactgagttaatgggcaaatttgatgaaggtcaactgtccaccgatccacacctgatgctccgactggccattgaaactgtagctcatgactatgatgtcatagttattgacagcgcgcctaacctgagtatcggcacgattaatgtctcgtcacgatgtactcgttgctgcatcgtactctacgtctggtcgactgcgctcgactacgactcttcgtcgtcgtcgtctacctactaccgtcaagtgactactgtgactgacgtgactgtgacgctagccatggctttgacgtcggacccgtcatccgctaatgatccgtccgtgcgactgtatcatgtacattggcatccactatcgatctacttacgacgccctgacctccgctcaatcaatccttgcgcactggatcggatcgaactaagctacttagcaatagcacacaaaatcaattcactaggactgcagcaatgcagtaaagaaagtttaattgacacaaggctggccacacgggagaagaagttcttgctcaaatcagtccccctgaaggctcagaggttaaggtttttcaaggataatttgcattcaagaaatatttatcaaagacctgctgtaagccaggtggttgctgtatatggaactttatctgatttgctttctgtggccagcagtaaactcggcataaaagccaccagtgtgtataatgggaaaggtggactgattgatgatattgctttgatcagggatgatgatgttttgtttgtttgtgaaggagaatcatttattgatcctcagacagattctaagcctcctgagggattgttaggattccacacagactggctgacattaaatgttggagggcggtactttacaactacacgcattactcctaccaggcaaatctttgctgtgcaaatcttgaatgagctgatctctggatcagtacttaactgtgcaaatctccagggagtcaagatgctctgttctaatgcagaaggagcatccctgaaactgtgtaattttgaggatccttctggtcttaaagccaatttagaaggtgctaatctgaaaggtgtggatatggaaggaagtcagatgacaggaattaacctgagagtggctaccttaaaagatgcaaagttgaagaactgtaacctcagaggagcaactctggcaggaactgatttagagaattgtgatctatctgggtgcgatcttcaagaagccaacctgagagggtccaacgtgaagggagctgtgtttgaagagatgctgacaccactacacatgtcacaaagtgtcagatga

SEQ ID NO: 899 - DNA, 1532 bp, Homo sapiens
  SIMILAR (242)..(970): 961254mologous to Homo sapiens Human potassium channel K+ Hnov42,accession number AAY34130,Smith-Waterman Score=1222.
tttcgtggggaagggccccaggcaggctgaggattctaggtgcggggcgggaaggaggaccggccgaaccttgggtgagggacagagggcgtgcgtgtggtgtgtccccaagggcaggaaggtggcgaagggaggcgaatccgagtgggtggagggaggggaagggcgggaggagaaaaaggtgggaggaggaccaggtgggagggtggcggctcactcaggacccaccgggggcagcgcgatgaggcgggtgaccctgttcctgaacggcagccccaacaacggaaaggcgggtgctggatatggaactttatccgatttgctttctgggggcagcagtaaacccggcataaaagccaccaatgtgtataatgggaaaggtggactgattgatgatattgctttgatcagggatgatgatgttttgtttgtttgtgaaggagagccatttattgatcctcagacagattctaagcctcctgagggattgttaggattccacacagactggctgacattaaatgttggagggcggtactttacaactacacggagcactttagtgaataaagaacctgacagtatgctggcccacatgtttaaggacaaaggtgtctggggaaataagcaagatcatagaggagctttcttaattgaccgaagtcctgagtacttcgaacccattttgaactacttgcgtcatggacagctcattgtaaatgatggcattaatttattgggtgtgttagaagaagcaagattttttggtattgactcattgattgaacacctagaagtggcaataaagaattctcaaccaccggaggatcattcaccaatatcccgaaaggaatttgtccgatttttgctagcaactccaaccaagtcagaactgcgatgccagggtttgaacttcagtggtgctgatctttctcgtttggaccttcgatacattaacttcaaaatggcgcaatttaagccgctgtaatcttgcacatgcaaatctttgctgagctaatcttgaacgaactgatctctatggatcagtgcttgactgtgcgaatctccagggagtcaagatgctctgttctaatgcagaaggagcatccctgaaactgtgtaattttgaggatccttctggtcttaaagccaatttagaaggtgctaatctgaaaggtgtggatatggaaggaagtcagatgacaggaattaacctgagagtggctaccttaaaaaatgcaaagttgaagaactgtaacctcagaggagcaactctggcaggaactgatttagagaattgtgatctgtctgggtgtgatcttcaagaagccaacctgagagggtccaacgtgaagggagctatatttgaagagatgctgacaccactgcacatgtcacaaagtgtcagatgagaattttaggggctggaggaagatgtaaaagatgaaaatgttttccttatcacttttctttctccacccactcagttgtctagaagaaataacactgtaaggaaatttaaaaaaaaaaaa

SEQ ID NO: 900 - DNA, 524 bp, Homo sapiens
  SIMILAR (214)..(318): 801254mologous to Mus musculus putative,accession number AK020120,Smith-Waterman Score=150.
cctcgcagacgatgggctctactcctgagtgagtctagtgggcttgggggtgtccatgtggtgctgtcccttggcagggtcagggcagctgctagggtgggaccagcagttggggtctgcagcgtggagatgggcaggaagctggagcccggctcatcgtcgcatagcctgcctgcacccgccccccgccaccacctcctggtgggttccgccctcatgccccagctctccctgcagcgggacctggacttcaccatcgacctggacttcaagggccagctgtgcgagctgtcctgctccaccgactaccggatgcgctgaggcccggctctcccgccctgcacgagcccaggggctgagcgttcctaggcggtttcggggctcccccttcctctccctccctcccgcagaagggggttttaggggcctgggctggggggatggggagggcacatcgtgactgtgtttttcataacttatgtttttatatggttgcatttacgccaataaatcctcagctggga

SEQ ID NO: 901 - DNA, 420 bp, Homo sapiens
  misc_feature (1)...(420): n = a,t,c or g
caattttatagttttggccttaaagtggaaaccttcnnnnnnnnnnnnnnnnnaaacggggttttgctttttttccagggttaaatgcaatggcacaattttgggtccctgcaacctttgaatttctgttcaaagtatttttctggtttaaccttccgagtaagtgggatttcaggtttgcccccccccgcccaggtaattttttgtttttttaataaacaaggttttcccccgtttaccaagatggttttgattttctgacctcaatatgccccccccttggccttccaaaattgttagaattcaggggtgcccccccccttccaagtgaannnnnnnnnnccnnnnnnnnnnnnnnnnnnnnnnnnnnnnnnnnnnnnnnnnnnnnnnnnnnnnnnnnnnnnnnnnnnnnnnnnnnnn

SEQ ID NO: 902 - DNA, 1653 bp, Homo sapiens
  SIMILAR (790)..(1383): 481254mologous to Rattus norvegicus protein arginine N- methyltransferase,accession number U60882,Smith-Waterman Score=308.
  misc_feature (1)...(1653): n = a,t,c or g
atggcggcagccgaggccgcgaactgcatcatggagcttccaagggccttcggcatccggcctagcggagggtcttatcccccctcccacgtggaggagggctgggggcgcttccggccaggcccccacgtggccgctgcgcgccctcctccccggggacctgggcacacgccgtggggtgtgatcgacctggggccctccacgatgtggggagtctcttgggaggagcagtgcttctcagccctttaccaacctccttccgagctccgggggcatctgttgggatatcggacccggttttgtgcgttctgggtgtcctgtggccaggcggaaagcagtgagaagcccaacgctgaggacatgacatccaaagattactacatttgactccatacgcacacatttggcatccacgaggagatgctgaaggacgaggtgcgcacccatcacttaccgcaactccatgtttcataacctggcacctcttcaaggacaaggtggtgctggacgtcaggctcgggcaccggcatcctcttgcatgttttgctgccaaggcccgtggccccgcaaggtcatcgggatcgagtgttccagttattcttcttgattatggcggtgaagatgcgtccaagcccaacaagttaagaccacggcggggaacatccatcaaggggaaaggtgggaggaaggtggagctcccagtgggagaaaggtgggacatcattcatcagcgagttggatggggttattgcctctttcttacggagtccatggcttcaacaccgtgctcttatgccccgggacaagtggctggcgccccgatgggcttcatcttcccagacccgggcccagctgtatgtgacggccattcgagggaccggcaggtacaaagactcaagatcccacttgttgggggagaacgtgtattggcttcgacatgtctttgcatcaaaagatgtgcccattaaggagcccctagtggatgtcgtggaccccaaacagctggtcacccaacgccttgccttcataaaggaggttggacatctatacccgtcaaggtggaagaccttgaccttcaacctcccccgtttctgcccttgcaagttgaagcggaattgacttacgtgcacggccctggtggcnctactttcaacattcgagtttacgcactgccacaagaggaccggagggaccggctttttccaccagcccccgaggtccccgtaacacgcactggaagcaagacggtgttctacaatggaggactaacctgacccgtgaaagacgggccgaggagatcttcggcacccatcggcaatgcggcccaacgccaaagaacaacccgggaccctggacttcaccatcgacctggacttcaagggcccagctgtgcgagctgtccgtgctccaccgactaccggatgcgctgaggccgggtttctcccgccctgcacgagcccaggggctgagcgttcctaggcggtttcggggctcccccttctctctccctccctcccgcagaagggggttttaggggcctgggctggggggatggggagggcacatcgtgactgtgtttttcataacttatgtttttatcacggttgcatttacgccaataaatcctcagctgggaaaaaaaaaaaaaaaaaa

SEQ ID NO: 903 - DNA, 276 bp, Homo sapiens
  misc_feature (1)...(276): n = a,t,c or g
cgcatcgactatgatgagttcctggagttcatgaagggtgtggagtagatgctgaccttcacccagagctgcctatgcccagcctccaactccagctgagtcctggggttggggagggnnnnnnnnnncnnnnnnnnnnncnnnnncnnnnnnnnnnncnnnannnncnnnnnccncctnccccacannnnnnnnnnnnnnnnnnnnccccaccccccctttcccccttcccnnaaccaacaccaccaccccacccccacaacactcacccccact

SEQ ID NO: 904 - DNA, 769 bp, Homo sapiens
  SIMILAR (63)..(563): 471254mologous to Homo sapiens Human cardiac troponin C,accession number AAW41575,Smith-Waterman Score=243.
cggacgcgtgggcggacgcgtgggctgtgagccgccagcatggattgacatctacaaggctgctggtagaagcagctttgaacaagaatgagcaagaaaaatgagttcataggcagcctttcggacatctttcgtgctgggcgcatgaggatggctgcatcagcacccaagggagctggggcaaggtgatgaggatgcatgggccagaaccccaccccatgagggagctgcaggagatgatcgatgaggtggacgaggacggcagcggcacgcgttgacatttgatgagttcctggtcatgtatggttcggtgcatgaaggacgacagcaaaagggaaattctgaggaaggagcttgtctgaccttcttccggcatgttttgaccaaaaaatgcttgatggctacatcggaccttggatgagcttgaagattaattgctgcaggctacaggccgagacccattcacggaggacgacgacatcgaggagcttcatgaaggacggagacaaagaacaacgacggccgcatcgacttatgatgagttcctgggagttcatgaagggtgtgggagtagatgcttgaccttcacccagagctgcctatgcccgagcctccaactccagctgagtcctggggttggggagggggtcggggtcccaggacctgagcctggccatgtcctcaaccccaaatcccccggactccctcccttagatctgtcctgggggatgcaaataaagcctgctctcccaaggaaaaaaaaaaaaaa

SEQ ID NO: 905 - DNA, 368 bp, Homo sapiens
  SIMILAR (26)..(136): 1001254mologous to Homo sapiens insulin-like growth factor I,accession number M37484,Smith-Waterman Score=188.
  misc_feature (1)...(368): n = a,t,c or g
tgtaaaagacctggaacatacaaaaatgattacacctacagtgaagatgcacaccatgtcctcctcgcatctcttctacctggcgctgtgcctgctcaccttcaccagctctgccacggctggaccggagacgctcnnnnnnnnnnnnnnnnnnnnnnnnnnnnnnnnnnnnnnnnnnnnnnnnnnnnnnnnnnnnnnnnnnnnnnnnnnnnnnnnnnnnnnnnnnnnnnnnnnnnnnnnnnnnnnnnnnnnnnnnnnnnnnnncttccggagctgtgatctaaggaggctggagatgtattgcgcacccctcaagcctgccaagtcagctcgctctgtccgtgcccagcgccacaccgacatgccca

SEQ ID NO: 906 - DNA, 479 bp, Homo sapiens
  SIMILAR (61)..(219): 1001254mologous to Homo sapiens insulin-like growth factor IB prepropeptide,accession number M11568,Smith-Waterman Score=280.
  misc_feature (1)...(479): n = a,t,c or g
ttctttntgcttcattattcctgctaaccaattcattttcagactttgtcttcagaagcaatgggaaaaatcagcagtcttccaacccaattatttaagtgctgcttttgtgatttcttgaaggtgaagatgcacaccatgtcctcctcgcatctcttctacctggcgctgtgcctgctcaccttcaccagctctgccacggctggaccggagacgctcnnnnnnnnnnnnnnnnnnnnnnnnnnnnnnnnnnnnnnnnnnnnnnnnnnnnnnnnnnnnnnnnnnnnnnnnnnnnnnnnnnnnnnnnnnnnnnnnnnnnnnnnnnnnnnnnnnnnnnnnnnnnnnnncttccggagctgtgatctaaggaggctggagatgtattgcgcacccctcaagcctgccaagtcagctcgctctgtccgtgcccagcgccacaccgacatgcccaagacccagaagtatcagcccccatctac

SEQ ID NO: 907 - DNA, 458 bp, Homo sapiens
  SIMILAR (40)..(198): 1001254mologous to Homo sapiens insulin-like growth factor IB prepropeptide,accession number M11568,Smith-Waterman Score=280.
  misc_feature (1)...(458): n = a,t,c or g
ngtaaccattccattttcagactttgtacttcagaagcaatgggaaaaatcagcagtcttccaacccaattatttaagtgctgcttttgtgatttcttgaaggtgaagatgcacaccatgtcctcctcgcatctcttctacctggcgctgtgcctgctcaccttcaccagctctgccacggctggaccggagacgctcnnnnnnnnnnnnnnnnnnnnnnnnnnnnnnnnnnnnnnnnnnnnnnnnnnnnnnnnnnnnnnnnnnnnnnnnnnnnnnnnnnnnnnnnnnnnnnnnnnnnnnnnnnnnnnnnnnnnnnnnnnnnnnnncttccggagctgtgatctaaggaggctggagatgtattgcgcacccctcaagcctgccaagtcagctcgctctgtccgtgcccagcgccacaccgacatgcccaagacccagaagtatcagcccccatctac

SEQ ID NO: 908 - DNA, 1094 bp, Homo sapiens
  SIMILAR (183)..(767): 1001254mologous to Homo sapiens insulin-like growth factor IB prepropeptide,accession number M11568,Smith-Waterman Score=1051.
cttctgtttgctaaatctcactgtcactgctaaattcagagcagatagagcctgcgcaatggaataaagtcctcaaaattgaaatgtgacattgctctcaacatctcccatctctctggatttccttttgcttcattattcctgctaaccaattcattttcagactttgtacttcagaagcaatgggaaaaatcagcagtcttccaacccaattatttaagtgctgcttttgtgatttcttgaaggtgaagatgcacaccatgtcctcctcgcatctcttctacctggcgctgtgcctgctcaccttcaccagctctgccacggctggaccggagacgctctgcggggctgagctggtggatgctcttcagttcgtgtgtggagacaggggcttttatttcaacaagcccacagggtatggctccagcagtcggagggcgcctcagacaggcatcgtggatgagtgctgcttccggagctgtgatctaaggaggctggagatgtattgcgcacccctcaagcctgccaagtcagctcgctctgtccgtgcccagcgccacaccgacatgcccaagacccagaagtatcagcccccatctaccaacaagaacacgaagtctcagagaaggaaaggttggccaaagacacatccaggaggggaacagaaggaggggacagaagcaagtctgcagatcagaggaaagaagaaagagcagaggagggagattggaagtagaaatgctgaatgcagaggcaaaaaaggaaaatgaaggacaggaggattaaacagacagaggcaaggatgatgagagaggagcagacagcaagaatgaaaagcagaaaatacaatagaggaaatgaagaaaagtaggcctgctggagctagatgatgatgtgatggaaatagaagtaaccttttagagaatctcgctaagaaacatggagaaaacggaaaagaaaaatgtaatgccctagaaagcgcaaagaaagacagtggcaaaaatgaaaaaaaaaaaataaaaattataaaagaggcaaaaaaagacacactattctctgccctctaaaacacaattaaataaaagaatttaaat

SEQ ID NO: 909 - DNA, 1798 bp, Homo sapiens
  SIMILAR (324)..(839): 501254mologous to Homo sapiens insulin-like growth factor IB prepropeptide,accession number M11568,Smith-Waterman Score=325.
gtcaccatgcccaaaaaagtccttactcaataactttgccagaagagggagagagagagaaggcaaatgttcccccagctgtttcctgtctacagtgtctgtgttttgtagataaatgtgaggattttctctaaatccctcttctgtttgctaaatctcactgtcactgctaaattcagagcagattagagcctgcgcaatggaataaagtcctcaaaattgaaatgtgacattgctctcaacatctcccatctctctggatttccttttgcttcattattcctgctaaccaattcattttcagactttgtacttcagaagcaatgggaaaaatcagcagtcttccaacccaattatttaagtgctgcttttgtgatttcttgaaggtgaagatgcacaccatgtcctcctcgcatctcttctacctggcgctgtgcctgctcaccttcaccaagctctgccacggctgggaccggagacggctctgcgggagctgagctgggtggatgctcttcaagttccgtgtgtggaagacagggggcttttatttcaacaaggcccacagggtatgggctcccagcagtgcggagggcgcctcagacaggcaatcgtgggatgagtgctgcttccgggagctgtgaatctaaggaggctggagatgtattgcgcaccccctcaagcctgcccaagtcagctccgctctgtccgtgccccagcgccacaccgacatgccccaagacccagaaaggaagtacatttgaagaacgcaagtagagggagtgcaggaaacaagaactacaggattgttggaagaccctcctggaggagttaagagtgacatgccaccgcaggatcctttgctctgcacgagttacctgttaaactttggaacacctaccaaaaaataagtttgataacatttaaaagatgggcgtttcccccaatgtgaattcacaaattaaacattccaacattgtctttaggagtgatttgcaccttgcaaaaatggttcctgaatttggtagattgccgttgatcttttatcaataatgttctatagaaaagaaaaaaaaatatatatatatatatatatcttagtccctgcctctcaagagccacaaatgcatgggtgttgtatagatccagttgcactaaattcctctctgaatcttggctgctggagccattcattcagcaaccttgtctaagtggtttatgaattgtttccttatttgccatttctttctacacaactggggctgtttgttttacagtgtctgataatcttgttagtctatacccaccacctcccttcataacctttatatttgccgaatttggcctcctcaaaagcagcagcaagtcgtcaagaagcacaccaattctaacccacaagattccatctgtggcatttgtaccaaatataagttggatgcattttattttagacacaaagctttatttttccacatcatgcttacaaaaaagaataatgcaaatagttgcaactttgaggccaatcatttttaggcatatgttttaaacatagaaagtttcttcaactcaaaagagttccttcaaatgatgagttaatgtgcaacctaattacgtaactttcctctttttattttttccatatacgagcactatgtaaatttagcatatcaattatacaggatatatcaaacagtatgtaaaactctgttttttagtataatggtgctattttgtagtttgttatatgaaagagtctggccaaaacggtaatacgtgaaagcaaaaccataggggaagcccg

SEQ ID NO: 910 - DNA, 817 bp, Homo sapiens
  SIMILAR (533)..(754): 451254mologous to Homo sapiens Human myelin oligodendrocyte glycoprotein gene,accession number AAZ29204,Smith-Waterman Score= 141.
ccaccctttgcccctgggtactgctagagaacaggtccaccctggctctgggactcgctgccaggggctgccacactcctgaatgccttaacatttcttccatggccccacaccatggcatccgggggtcttcgggaacccgggaaatggaataaagatgtttttggggtctgttcctgcactcacccatggggtgagctggttattttagcaacaatcatcagagtgacgctgatggtttggggcaccagctatacatcagccccagtgccagaccttctattcattaattttaacgccctcagagcaaggccctcagggagggtcatcctcccatgttttgaagaagagactgaggttcagagaggataagaggcgtgacccaaggcccacagagctatgggtgtccagcacccaggatttgaagcccaggtgaatcccgagcccttttccccatatcatctgtttgttctgttgtctaaaagcacactgcaagccgggctcagtggctcatgcctgtagtcccagcactctgtggggccgaggcaggcagatcgcttgaggtcaggagttcgagaccagcctggccaacatggtgaaaccccgtctatactaaaaaattcaaaaattacccggacgtggtggcgcatgcctgtaatcccagctacttgggagcctgaggcgggagaattgcttgaacccgggaggcagaggttgcagtgagccgagatcgcatcactgcagtccagcctggatgacagagtgagactccatctcaaaaaataaataaataaataaaaatgaaattaaaaaaaaa

SEQ ID NO: 911 - DNA, 439 bp, Homo sapiens
ttttaaaatcagtcaatgattcttgcctgagtcagttattgtgatggtggtttgaaaaaggtgcttttctaactctatcattccatccacataaatttactagttgcacctttaagttttgaattcgtagcctcatttgaatccagacctttcttggtttggggaagaattggtgggcaacttgcactgacctttatctgattaatataagatctatgtccacatgttacctttgttctatttcagaccaggtggatgcaacccttattcctattacaaattttagctgtgggatatttgctggtattctggcctcactggtaactcaacctgcggatgttatcaaaactcatatgcagctttatccactgaagtttcaatggattggccaagcagtgacacttattttcaaagactatggactacgtggcttcttcca

SEQ ID NO: 912 - DNA, 2229 bp, Homo sapiens
  SIMILAR (414)..(674): 321254mologous to Schizosaccharomyces pombe mitochondrial carrier protein,accession number AL355013,Smith-Waterman Score=74.
  misc_feature (1)...(2229): n = a,t,c or g
aaatctccccttctacagagttcctccggcgcttcctccaccccgggatacacagaacctcatctcctacggtgctgaagcctgcagcagggcaggatgggcaggagagcaaagccgcggagtctgcggcgcgggtgaagagcggcgcgtaattcccgcagcaagattgttccgcgcccgcagcccctggactagcaggatccgaaccccggcggctgcgtgcttataggcgcagacgtgcagagagcccgcggcttaaagcgcgtcgcctggctagcgccaccccctagccttcttcaaggcctccagggctgggccacagcgcccgctcgacggcaccctgggcccagaggactcgcgggcctcatctccaatgattcagaactcacgtccgtcgctgctgcaaccccaagatgtcggagacacggtggaaacgcttatgttacatccggtgatcaaagctttcctgtgtggctccatcactgggacctgctctaccctccttttacaacactctggatctccttaaaacacgcctgcaaaccctccagccctcagatcatgggtctagacgtgttgggatgttggctgtactcttgaaggtggttcgcacggagagtcttttgggcctttggaaagggatgtccccttccattgtgagatgtgtccctgggcgttggaatctacttttggcactctctactcttttgaagcagtatttcttggcgaaggccaatcccccaaaccgccctggaagtcaagtcatgctggggggtgggctctcgctctgttgcaggggtctgtatgtcacctatcactgtaatcaagacgcgctatgagagtgggaaatatggctattaagagtatctacgctgccctgaggagcatctatcacagtgaggggcaccggggcctcttcagtggcctgacagcaactctccttcgagatgcgcccttctcaggaatctacctgatgttttacaaccagaccaaaaatatagtgcctcatgaccaggtggatgcaacccttattcctattacaaatttcagctgtggggatatttgctggtattctgggcctcactgggtaacttcaacctgcgggatgtttattcaaaactcatatggcaggcttttattccacttgaaggtttcaatggattggccaagcacgtgacacttatttttcaaagactatgggactaacgtgggctttctttccaagggtggccatcccccgaggccctccgcaggaactcttaatgggcaggcaatgggcgtgggacggtgtatgaagagatgatggccaagatgggcctgaagtcctgaccaaggagnagggactggggaacgggtgaaatctgttgccctgcttggtttctgccaagggctgcatgcttcttactattcttgcagtaaggatgaagtcctacctgggaaaaccagggcaggaattgtgtttgcctttggcctttcagtaatcccctttaagggggaaaatatatgggacctgattttcagcctttcagaatctccaaaaagaggagtcatcaaattcatagaagcaacactaggggtgttaaggaagagaacttttgcaatactcctgagaaggctacttggaaaagccattttcccccaggagacttcttgtcaaggttggctgcggcttctgcccccacccctacacccacagggtcctcccttgggtatgttccttgggcaagcaatccacaaagcccagagaagctgtaagcctgccctgccgggccctgaggagctcccaacccaggggaagaactggaaggtgagaagaggagtcactgtcacccaggtcacagactgactgaggtgatggtaggatgaggaggaacagatgcccttctttaattggttctcagttaacttctcagaggctctggagaacgggacagtggctttctagcctctgaatgttcccaaataaaattttttggtcttggccctcccgtagtgtactgctttacctctaaattctggcatttttttttccctgcaattaaagtgctgtactttatttctctgaactttatcattgaaagctgtttggaaaacctaaaagatgttgtcacacttctgttttctttacctgtgccttataaaaatggaccaaacccttttctaaaataaaatagttctagggtggctggttattgacctatgtaggtccctaaaacctaaaaaaaaaaa

SEQ ID NO: 913 - DNA, 2110 bp, Homo sapiens
  SIMILAR (1021)..(1254): 601254mologous to Homo sapiens Human secreted protein encoded by gene 44 clone HTDAD22,accession number AAY02693,Smith-Waterman Score=221.
ttcccaggatacaacaaaaactgctcaggacaactgatgcatatcataataccttcttaatatataactgttctggatacaaatttaaaaaatgggctcagacaagtatcataaataataaatgaaagattttattcatctttagtagataacaagcactcaaaggttaatgagtgaaggagataaccatctcctccaaacaaagaggctcttaataacgcagaagcaaaaatctttccacttttagatgaaaacaaactaaaaaataacttcaggcttcagatatggaaataaagcaccatttttcaaatggtagacttggcttacttaaaataagtaaatagccccagactatctgaaaaagaaaaacatttcaatgccccttgtgagttctaattaccatggctacatgttaaggaacatctcagatctctctctgaacctactagtaaacaaaaattatacagatatatatacaaatgtagtcttccatttcattttttcatttgcacaagcttccagctatttaaccaggtgacaaatcaaagtgacaagatgcactaatattcgtgagaactttaaattttaaaagctagtatttaattacccttagtgagctcatttacttacattaaaaattatgcgatcagtcatgatttttctttagaccatttaataatacacatggactaacatttatcatgctttgttcaggacctccttacaatcatatcccttgtatgacttactcttcacataatcccttgccagtaaaagtgaagaccgaagattgacctgacagacaggtccctttactaacctttgcaatcttgtaccacttcataaaataatgcttactctaaaccactacagactagtttggaaataaatggaccttttcctcagaaataatcaatctttcctggtgtagtaattgaacacttgactttaaccttcatttattatcactttattattaatagaacatcccagggaatagactcccaaatcttatcactttttctttttttctttttttttttgagacggagtctcgctctgtcacccaagctggagtgcaactggcgccatctcggctcactgcaacctcctcccccttggttcaagcgattttcctgcctcagcctccagagtagctggggttacaggcacgtcccaccacaccccggctgatttttggtatttttagtaggagacgggggtttcactatgttgggccagggctggtctcaaaactcctgcacctccaggcgatccacccgcctcagactggcccagccccttttctctcaatttaaaaactgctttaaaaactgcaaatcaagtattgggttaataccactttactattattaactgattcctctaatattccagaaagagcacaagattttttccatttttgatagctgcctattgtcagttttaactggagctgaaaaacagaagacttaaataaacttgaaagccatcatcgagttttaaaaagggacactgaaataatccttcttgaagatattttctttaacagccacttatttctaccctgcaaaaagcttgaaatataaagtgtagtatttaaagccccattcaaaataaaaaatccagacaaaggagtaaggtatgttccaatttaatctttatgcaggcaaatttgtaaaaaatgttaatcacatctacatgaagtcgcaaaagagatgcaataattattgctcacttttaaacattaccttatattacggaaatttggctacttactctcatcactattacatgcacttcaagttaaatacttaccaaattttcactgtttattcctgctaggaaaggacacagttccttagaaatttacttcactttaaatcttaaagacataaattgagggtccatactttgtttagtgcttatctagaagaatgcattgccacatcacatactcaggtattgattttcagattttagaaaactatcattgttcatactaaaaagcatcacagttgactgtttattattggttcagaaagatcacaggaggaaacagaatgtaaaaacattcttagcatatgctggttttaatctaggatatagt

SEQ ID NO: 914 - DNA, 2356 bp, Homo sapiens
catgagcctgccagattgccaattccatcctccaccttcagaggatgccgccatccagaattttgccttactcattttactttcttcatagttcgacaccttaaatgtatattactaatagtagctttgcatttttggctgatttaaaaattgatataaatgaaataatgctgtagagatgctttttggtattaagtggatatactgttattcttaaagatgtttgaaatgaatatacctttctaaatatctttttaaaataatacattaaatgatactgctttagaattcatgaactgcatctcatgagaatatgtagagatgacgtgggcaggtaaagtaaaacttcaggttgaatatcctatgataatttaaaaatgacaaaatagtgtggtgaataatagagcttgagcactttaaggcaccatagggaccccttcaatgtaatgatgacagtgctgaggtgcagagaagttaggtaatcagcccaagccactactactaaggacagaccctatctacttttcctaatttgtcagaagactgcctatgatactactaataaaaagtcctatgaaattggtattgtcattattttacaaataaaataatcttcaatttttgtttcctctatgcatgggttacttagtattttgtaatttgaatttcaagcataattaaaaagaaatcaggtatctaggctgggcatgatggctcaggcctgtaaatctcaacattttgggaggctgaggcaagaggatcacttgaggccagggagtttgaggtatcttttgttggatctctacactggattgtattctctcttttattctatggaaagttaaaggatttttttctgatactaccaaattggtccagttttttaaatactcagtttgtgctaaaagaaaacattcggcaactgatatctgctggttctgtatgtatctgtcaagtccagatttgtccattatggtgtatgaatctaataggacctccaccaatggtaatacctggccttcttggaaatcattaccggggatagctaatattaaaatatcctggtttgtctgtatatttaattctttactctcattatactaaatttttttaatgtaatttgaattgatggtaaaaattgtatacaggccgggtgcagtggctcactcctataaatcccagcattttggaagtcctatgcaggaggattgccagaggccggggaatttgagatcagcctggggcaacatagtgaaactctcatctttataaaaagtaatattaaaatttttaaaagtgtataaactgtaaagtatattttactggtgttttcttccttattcctacttgtcagatgcaaatacacatttttgtgtgtttgtgtttagtaattataagtatacatatttcattcttctatttcatatatttctatgacattatatcttagatgtgtaatttatgaactactactggattattttaatccattagaaattactattcacgcattctgtattcaattcatgtgatagctaatatatttggttttaaatgcatcttattttgtggttttcttctaggctgttttttgtgctttcttttaaaaatatataggttttaataatcttaattttcttttagtttgaaatgtatatactcattttattcattagtctaagataagaattgtaacacttctctaacctattatagaattgttaatacctttacccttctcttgaacacatcaaaggatgtcattgagtgttgggtattgggagtataggcatatcctattattctgcctcaattaggaggatattgttccatgttgtataggaggtaataggtaattgtattgatctgcagatgcatccatctcttggattctcattccttctaccactgcagaactttcacctgtaaacacattccatttggcattaaggataacttttagggttacttttctactaaatttccaatttttgaccagatataatcttatattgtgctcttcctgaaaaatactattgttgtggatagaaatctgggttggtagttatttcttcagcaatttgacccatgtcattcccactgtgtcccctggccrccctgtatactggatgtgaatggatacaattatatattgtgtttatagttttcctgtgctataggaacagtattcgaatttgatgcaaaggacaacacaccctagagattgtaacagtgagatgaaccaagtgattggatggggttttgagttgctggaataatggagttacagtgtacaatgcataagcaacataataaattatatatttggtgaacaaatggaaaaaaaaaaaaaaaa

SEQ ID NO: 915 - DNA, 499 bp, Homo sapiens
  SIMILAR (2)..(319): 1001254mologous to Homo sapiens GPI-H,accession number L19783,Smith-Waterman Score=535.
  misc_feature (1)...(499): n = a,t,c or g
gtcctgccgggaattctgcctcagctgccctcggctctcgctgcgttcgctcaccgctgtcacctgcacggtgtggctggcggcctacggactcttcaccctctgcgagaacagcatgatcctctctgctgccatcttcatcaccctcttaggtctgcttggttatctccattttgtgaagattgatcaggagactctgttaatcattgattcccttggcattcagatgacttcatcttatgcttcaggcaaagaaagcactaccttcatagaaatgggcaaggtcaaggatattgtcatcaatgaggccatttacatgagtgccaagccccggctggactgcttgattgaagtatacaggagctgccaggagatcctggcacaccagaaagccacatcaacaagcccatgagccccagcgttcagaaggccagcattgtcttccatgggagatgactcttaagccatangggctggttttccgtactccaaaccatca

SEQ ID NO: 916 - DNA, 404 bp, Homo sapiens
  SIMILAR (3)..(137): 971254mologous to Homo sapiens GPI-H,accession number L19783,Smith-Waterman Score=239.
tggcgctgcagcgccgctattactccccgttctgccgggaattctgcctcagctgccctcggctctcgctgcgttcgctcaccgctgtcacctgcacggtgtggctggcggcctacggactcttcaccctctgcgaggtaatggcaagtcggcccctccccgcgctcgaaggagggggttcggctttgggagggtctttggggtctttggtcgagcccggacctctggtcggcccctcctacagtgataggacaggagggcgggaactcacgggttctggggacgatattccgctgctggacagctctttaaatgacgtttagtgaaatgtgtgctcctggatagtacattccccttccgtggctgtgctctgctcggtgggttcactcagcatacatctaggt

SEQ ID NO: 917 - DNA, 2985 bp, Homo sapiens
  SIMILAR (73)..(666): 661254mologous to Homo sapiens GPI-H,accession number L19783,Smith-Waterman Score=552.
  misc_feature (1)...(2985): n = a,t,c or g
agcggtcgagacgaccagggccggcgagcgcagtgcagcgccgcgcggtgcgggcggccgagtgggggcgtcatggaagatgaacggagcttttcggatatctgcggcggccgcctggcgctgcagcgccgctactactccccgtcctgccgggaattctgcctcagctgccctcggctctcgctgcgttcgctcaccgctgtcacctgcacggtgtggctggcgggctacggactcttcaccctctgcgagaacagcatgatcctctctgctggcatcttcatcaccctcttaaggccgctgggtgtatccccatctgtcaaaaatgatcaggagactctgttaaatcattgattcccttgggcattcagatgacttcatcttatggtttcaggcaaagaaagcactaccttcaatagaaatgggcaaggtcaaaggatatttgtcaacaatgaggccatttacatggtaagcatttaaaagcacaaggcgatttactacctctggaacttatttgaaaagattccagtgggaaccacatggggatatccccaagtatgtacccgtcttccagagtgccaagccccggctgggactgcttgaattgaagtatacaggagctgccaggagatcctggcacaccagaaagccacatcaacaagcccatgagccccagcgttcagaaggccagcattgtcttcccatggggagatgacctcttaagccataggggctggttttcccgtacctccaaacccatcaggtgggacaccagtcctagggaaccattatgggatgtagtgcatcttaggagccatagagcaggtgactgggaaatctaactccagtatatttcccgtgtattatagtgttttcctttgttaaggtttttgcctactttaccgaaaggaggggagaccttaagaattttgacacagtatgttcaaaagtaatgtcagcaaagaacacttttcggaaaattggtaagcatgttccaggtttactttgttgatgtttgtgaagcaaaacaatgggaaactgaccatcagatgtcttgagaaagctatattttccaatagtacccccttgtgtaaagttacgaaaaaaaacaagcccttcagtactggttagcaggaagaaatgtcctacaaaagacgagtctgtcaacctagtgcctgtgttctgtacagggcttatttatttactgttaataaacagatcttccaaaacacacagttacctggttcacagatagactgactttttattgacaaacaagatcatagtatttcagtcatggtgtcaagcacgattaatacttttctgttactcagcattttttttttatatcagttcaaaagctacttttgccaagaaggatgagacaaaaggccagacagaaattggactttggttttcagacatggggactctcatgttaacaaagaataaataaggcaaatattggaatcctttgtttctaaggttagtttcttctgtataaggattaataaactaaaggggttcctggaggggttggggggagggagagaggggtggggggaaataggattgacccccaaattcaggtgttggaacacaggctccattcttgttttactcttcccttggggctccccacttttcttctaaactctctgggtagataatgttatccttattggccttagagatacccaagatattataaaaccagagctgttatgtctgtcaccagccctgcaggaattattcaggaaccctgtggtacatgtgacttgttcgaggtagaaatgtctcagctagatccccaagttgtggggtgaaaagtgtgaacagaaatggctgtaaaactacttgccttgcaaagtcaagtaacatttaaaggaggcagaaactggaatctgctctcttttttcaacatggcttgtcagttaacgggggtgagaggaggaggacgcttacacgcgcccgaaggggttcagaataaaacagattctggcctgccacatttttgtctgtgcaaaagataacccacatgtgtgggggttcaaggcctgggtttttgggtgcctcacgctaaaaatacaggtttcacactcttatctcgactatagtaagggctgcctgaagccaggaataaaaaactccagttcctagatgttggaaaatcagagtatgaactctttcgttttgtttttgttaggggagggtgtgtctacaacctgtctagaggagactgtctagtctcctctgcactcaatcagaaggtctgaattgagggggattatggtattatcagtaaggcaaaagatgaaagaaacttttttttaacctgcntactcctaggcctaggggcaaatggtcaacatatgtacccttacccctcaaacctaattccccagcagaaagtttgcccaagaagtctcaaggaagcatatccaggcccacatgccctgaaaatagtccttctgtgtttcctgactcatttttggtggtccttacagcagcaaaaagcagagtgcatttgcttggtcttttaacaagaagaaggaaacaaatgatggccccactacagtgaacacagccttcaccgagcgctgtcccagtcattcaaaatgagacagggaggggtcagattggacctacctcctgcccttgcttgcacattgcgtggtactgggtttggcctaaagtccagtgtgaggaaaacagcttgaatcttagcaggtatagcatgttatcctgcaaaggacctccccagaaggggctgtaccaatgcctacataccaataatggggaaaaatgagtctattcttttttctccaactctgtcagcacctttcccatttgggaaaggcagcccagtttagtgagttctaggcttctgacagagtgtaggagaattggaaattttagtcctatcctgtttagcgacgttcacaaaacttcaagtataaataagaccatatacaatattaaaag

SEQ ID NO: 918 - DNA, 1358 bp, Homo sapiens
  SIMILAR (219)..(1223): 361254mologous to Homo sapiens golgi matrix protein GM130,accession number AF248953,Smith-Waterman Score=467.
cttgtgtcgggagttgcagacagccatggcccatgggcctggcgctgacggaccccggagcggtgtctgagggaggtgggcaaagccactggctggcccgagtgcatcctcacttgacagaccatcatccccagaccaaccctagtgttggtacagcagcaagcgacaccaaaaagaagaaaataaataatggcactaaccctgagacaaccacttctggtggttgccactcgcctgaggatgcccaggttcaaaccatacgaatccttacatgtcagaaaactgagcttcagatggcactttactacagccagcatgctgtcaagcagttggaaggagaggccagggatctgatcagccgcctgcatgattcatggaagtttgcaggagagttagagcaggctctctctgctgtcgctacacagaagaagaaggcggataggtacattgaggagttaacaaaggagagggacgccctgagtctggaactgtacaggaacaccataactgatgaggagctgaaggagaaaaatgccaaactacaagaaaaacttcaacttgtagaatctgaaaagtctgagatccagctcaacgtaaaggagctaaaaaggaaactggagagggccaagctcctgctgccacagcagcagctgcaggcggaggctgaccacctgggtaaggagctgcagagtgtgtcagcaaagctccaagcccaggtggaagagaacgagttgtggaaccgcctgaaccagcaacaggaggagaagatgtggaggcaggaggagaagatacaggagcgggaggagaagatacaggagcaggaggagaagatacgggagcaggaggagaagatgcggaggcaggaggagatgatgtgggagaaggaggagaagatgcggaggcaggaggagatgatgtgggagaaggaggagaagatacgggagctggaagagaagatgcacgagcaggagaagatacgggagcaggaagagaagaggcaggaggaggagaagatacgcgagcaggagaagaggcaggagcaggaggcgaagatgtggaggcaggaggagaagatacgggagcaggaagagaagatacgggagcaggagaaaaagatgtggaggcaggaggagaagattcacgagcaggagaagatacgggaggaggagaagaggcaggagcaggaggagatgtggaggcaggaggagaagataagggagcaggaggagatatggaggcaaaaggagaagatgcatgtgagaactgatgaaatatctgtatgtagtatctttcaaggatttatatcggttggatttctgtgtaaatttgcatatccctttgactgctttaccctatag

SEQ ID NO: 919 - DNA, 465 bp, Homo sapiens
  SIMILAR (164)..(463): 901254mologous to Homo sapiens HHR23A protein,accession number D21235,Smith-Waterman Score=447.
taagatggcggcggcgtgagttgcatgttgtgtgaggatcccggggccgccgcgtcgctcgggccccgccatggccgtcaccatcacgctcaaaacgctgcagcagcagaccttcaagatccgcatggagcctgacgagacggtgaaggtgctaaaggagaagatagaagctgagaagggtcgtgatgccttccagaacatgcggcaggtgattcagcagaaccctgcgctgctgcccgccctgctccagcagctgggccaggagaaccctcagcttttacagcaaatcagccggcaccaggagcagttcatccagatgctgaacgagccccctggggagctggcggacatctcagatgtggagggggaggtgggcgccataggaaaggaggccccgcagatgaactacatccaggtgacgccgcaggagaaagaagctatatagaggttgaaggccctcggctt

SEQ ID NO: 920 - DNA, 448 bp, Homo sapiens
  SIMILAR (69)..(380): 971254mologous to Homo sapiens HHR23A protein,accession number D21235,Smith-Waterman Score=501.
ggtaagtacctgccgaggttgcatgttgtgtgaggatcccggggccgccgcgtcgctcgggccccgccatggccgtcaccatcacgctcaaaacgctgcagcagcagaccttcaagatccgcatggagcctgacgagacggtgaaggtgctaaaggagaagatagaagctgagaagggtcgtgatgccttccccgtggctggacagaaactcatctatgccggcaagatcttgagtgacgatgtccctatcagggactatcgcatcgatgagaagaactttgtggtcgtcatggtgaccaagaccaaagccggccagggtacctcagcacccccagaggcctcacccacagctgccccagagtcctccccagcccagcctgctcagagaagctggcaggacttggaagcgacagatgggcccctcttgggctctgtccagctctctga

SEQ ID NO: 921 - DNA, 2242 bp, Homo sapiens
  SIMILAR (451)..(1587): 471254mologous to Homo sapiens HHR23A protein,accession number D21235,Smith-Waterman Score=585.
  misc_feature (1)...(2242): n = a,t,c or g
tttttttttggaagaggcaaaatgaggtttttacagaagaaatacaaatgtctgtaaccagtacaggtacataaaaactttgttaaaaattcatttgagcgtgagagtggggacaccagagtcactttgcagccccgtgacgtcaccgataacgggcatggcgtcactcaggagaccacgtgtgcgggccgagcaagaagccccgcccacagcgcggagtttagtctgcgcgtacctcgctcgagaacgcgctcgtgcgcatgcccacaaaggccaaggagggagtgcgcaggtcacgtgcgccggtggtcagcgcgcgcattgcctgcccccggaagtggtcggcgcgcggcgcggcgcgcctgggcgctaagatggcgggcggcgtgagttgcaatgtgtgttgagatcccggggcccgcggcgtcgctcgggccccgccattggccggtcaccatcacgctcaaaacgctgcagcagcagaccttcaagatccgcatggagcctgacgagacggtgaaggtgctaaaggagaagatagaagctgagaagggtcgtgatgccttccccagtggctggacagaaactcatctatgccggcaagatcttgagtgacgatgtccctattcagggacttattcgcattcgatggaggaaggaactttgtggttcgttcatgggtgaccaaggaccaaagccggccagggttaccttcaggcacccccaggagggccttcaccccacagcttgccccagagtcctcttacatccttcccgccttgcccccaccttcaggcatgttccatccccccacttgccggccagagaaggnacaagagcccatcagaggaattccggccccaagacgttcccagagtctgtgttcaggctctgttccctcttcaggttaggcagcgggcgagaggaagacgcgggcttccacgcttagtgaacggggcttttgagtattgaggacgatggttgacggagatcatgtccatggggctatgagcgagagcgggtcgtggccgccctgagagccagctacaacaacccccaaccgagcccgtggagtatctgctcacgggaattcctgggagccccgagccggaacacggttctgtccaggagagccaggtatcggagcagccggccacggaagcagcaggagagaaccccctgggagttccttgcgggaccagcccccagttccaagaacatgcgggcaggtgattcaagaagaacccctgcgctgctgccccgccctgctcccagccagctgggcccaggagaacccctcagcttttaacagcaaaatcagcccggccacccaggagccagttcatcccagatgcttgaacgaagcccccctggggaagcttgggcggacattttcagatgtggagggggaggtgggcgcccataggagaggaggccccccaagatgaactacatccacggtgacgcccgcaggagaaaagaagctatagagaggtgaaaggccctgggcttcccagagagccctggtcatccagccttatttcagcgtgtgaaaaaaatgaagactttggctgccaacttctccttgagtcagaactttgatgacgagtgatgccaggaagccaggccaccgaagcccccacccctaccctttattcccatgaaagttttataaaagaaaaaatatatatatattcatgtttatttaagaaatggaaaaaaaaaaatcaaaaatctttaaaaaaacaaggcaaacagttccagctttcctgttccttccttaaagtgggcccctgttccccatctcccgggccaagacagttgtccccccgtcctcctccccagccccagcctgcttcagagaaagctgggcagggactggggagggcgacagatggggcccctcttgggcctctgtcccaagctctctgcagccagacggaaaggcggctgcttgcctctccatcctccgaaaaacccctgaggaccccccccccatcttttttaaggaaaaagggaaagctgaagccccaactttgatcctccattgggagtggcccaaatctttccaatctagggcaagtcctggaaaggcccaagtccccctccccagtctggccttggcctccagcctggagaagggctaacatcagctcattgtcaaggccacccccaccccagaacagaaccgtgtctctgataaaggttttgaagtgaataaagttttaaaaactaaaaaaaa

SEQ ID NO: 922 - DNA, 475 bp, Homo sapiens
  SIMILAR (348)..(401): 881254mologous to Homo sapiens M phase phosphoprotein 10,accession number X98494,Smith-Waterman Score=74.
gcctcggaccgcccggaatcccgggcgacccacgcgtccgggaaaagcccagttttcagtgatgaggattctgaccttgactttgatatcagcaaattggaacagcaaagcaaggtgcaaaacacaggacatggaaaaccaagagaaaagtccataatagacgagaaattcttccaactctctgaaatggaggcttatttagaaaacagagaaaaagaagaggaacgaaaagatgataatgatgatgagtcagttaaaagttccagaaatgtgaacaacaaagatttttttgatccagttgaaagtgatgaagacatagcaagtgatcatgatgatgagctgggttcaaacaagatgatgaaattgctgaagaagaagcagaagaaggaagcatttctgaaatatgaatgaaaaaaattacatctttagaaaaagagttattagaaaaaagccttggcagcgtcggggggaaggg

SEQ ID NO: 923 - DNA, 505 bp, Homo sapiens
  SIMILAR (242)..(394): 941254mologous to Homo sapiens proteoglycan core protein,accession number M14219,Smith-Waterman Score=231.
  misc_feature (1)...(505): n = a,t,c or g
cgccaagtgtgcccnttccgctgtcaatgccatcttcgagtggtccagtgttctgatttgggtctggacaaagtgccaaaggatcttccccctgacacaactctgctagacctgcaaaacaacaaaataaccgaaatcaaagatggagactttaagaacctgaagaaccttcacgcattgattcttgtcaacaataaaattagcaaagttagtcctggagcatttacacctttggtgaangttggaacgactttatctgtccaagaatcagctgaaggaattgccagaaaaaatgcncaaaactcttcaggagctgcgtgcccatgagaatgagatcaccanagtgcgaaaagttactttcaatggactgaaccagatgattgtcataggtcttcctccttcccttacggaattacatcttggatggcaacaaaatcagcagagttgatggcagctaagcctgaaaggactggaataattttgggctaagttggggattgagttt

SEQ ID NO: 924 - DNA, 681 bp, Homo sapiens
  SIMILAR (1)..(90): 761254mologous to Homo sapiens proteoglycan core protein,accession number M14219,Smith-Waterman Score=107.
tcctacatccgcattgctgataccaatatcaccagcattcctcaaggtcttcctccttccctacggaattacatcttgatggcaacaaaatcagcagagttgatgcagctagcctgaaaggactgaataatttggctaagttgggattgagtttcaacagcatctctgctgttgacaatggctctctggccaacacgcctcatctgagggagcttcacttggacaacaacaagcttaccagagtacctggtgggctggcagagcataagtacatccaggttgtctaccttcataacaacaatatctctgtagttggatcaagtgacttctgcccacctggacacaacaccaaaaaggcttcttattcgggtgtgagtcttttaaaaaccctcagtactgggagatacagccatccaccttcagatgtgtctacgtgcgctctgccattcaactcggaaactataagaaaaaataaaaagagtatgagtcttctgtaattcattgagcagttagctcatttgagataaagtaaatgcaaacactagctctgtattaatccccatcattactggtaaagcctcatttgaatgtgtgaattcaatacaggctatgtaaaatttttactaatgtcattattttgaaaaaataaatttaaaaatacattcaaaattaaaaaaaaaa

SEQ ID NO: 925 - DNA, 639 bp, Homo sapiens
  SIMILAR (1)..(636): 1001254mologous to Homo sapiens decorin variant C,accession number AF138302,Smith-Waterman Score=1123.
atgaaggccactatcatcctccttctgcttgcacaagtttcctgggctggaccgtttcaacagagaggcttatttgactttatgctagaagatgaggcttctgggataggcccagaagttcctgatgaccgcgacttcgagccctccctaggcccagtgtgccccttccgctgtcaatgccatcttcgagtggtccagtgttctgatttgggtcttcctccttcccttacggaattacatcttgatggcaacaaaatcagcagagttgatgcagctagcctgaaaggactgaataatttggctaagttgggattgagtttcaacagcatctctgctgttgacaatggctctctggccaacacgcctcatctgagggagcttcacttggacaacaacaagcttaccagagtacctggtgggctggcagagcataagtacatccaggttgtctaccttcataacaacaatatctctgtagttggatcaagtgacttctgcccacctggacacaacaccaaaaaggcttcttattcgggtgtgagtcttttcagcaacccggtccagtactgggagatacagccatccaccttcagatgtgtctacgtgcgctctgccattcaactcggaaactataagtaa

SEQ ID NO: 926 - DNA, 2051 bp, Homo sapiens
  SIMILAR (199)..(1272): 641254mologous to Homo sapiens decorin,accession number L01131,Smith-Waterman Score=961.
cgcaaaacaaattgcaatataatgtgataaagttctttaaaagaggtaagagcaacgtgctttgggagcagagaagagggagaaagcagcatcttgcctggatgagccaggggacacagaagagaagcccactatctcatttaatctttacaactctcttgcaaggttccctggttgttaaaatacatgagataaatcatgaaggccactatcatcctccttctgcttgcacaagtttcctggggctggaccgtttcaacagagaggcttatttgactttatgctagaagatgaggcttctggggataggcccagaagttcctgatgaccgcgactttcgagccctccctagggcccagtgttgccccttccgctgttcaatgccatctttcgagtggttccagtgtttcttgattttgggtcttggacaaagtgaccaaagggattttttcccccctgaacacaactctgctagacctgcaaaacaacaaaataaccgaaatcaaagatggagactttaagaacctgaagaaccttcacgcattgattcttgtcaacaataaaattaggcaaagttagtcctgggagcatttacacctttggtgaaagttgggaacgactttatctgtccaaggaatcagcttgaagggaattgccagaaaaaatgcccaaaactcttcaggagctgcgtgcccttgaggattgaggttcaccaaagtgcgaaaagttactttcaatggactgaaccagatgattgtcatagaactgggcaccaatccgctgaagagctcaggaattgaaaatggggctttccagggaatgaagaagctctcctacatccgcattgctgataccaatatcaccagcattcctcaaggtcttcctccttcccttacggaattacatcttgatggcaacaaaatcagcagagttgatgcagctagcctgaaaggactgaataatttggctaagttgggattgagtttcaacagcatctctgctgttgacaatggctctctggccaacacgcctcatctgagggagcttcacttggacaacaacaagcttaccagagttgtctaccttcataacaacaatatttctgtaagttggatcaagtgacttctgcccaccttggacacacaccaaaaagggcttcttattcgggtgtgagtcttttcagcaacccggtcccaagtactgggagaatacagcatcccacctttcagatgtgtctacgtgcgctctgccattcaactcggaaactataagtaattctcagggaaagccctcatttttataacctgggcaaaatcttgttaatgtcattgctaaaaaaataaataaaagctaggatactggaacccctaactgcaaatgtggatgttttacccaccatgaccttattatgcataaagcccaaatttccaggtttaagtaaattgcctaccaataaaaagaaattttgcctgcccattttcagaatcatccttttgaagcttttctgttgatgttaactgagctacctggagatattcgtaatttcacgtaaatgtaaaaatttggagtaaatatatatgtcaatatttagtaaagcttttcttttttaatttccaggaaaaaataaaaagagtatgagtcttctgtaattcattgagcagttagctcgatttgagataaagtcaaatgccaaacactagctctgtattaatccccatcattactggtaaagcctcatttgaatgtgtgaattcaatacaggctatgtaaaatttttactaatgtcattattttgaaaaaataaatttaaaaatacattcaaaattactattgtatacaagcttaattgttaatattccctaaacacaattttatgaagggagaagacattggtttgttgacaataacagtacatcttttcaagttctcagctatttcttctacctctccctatcttacatttgagtatggtaacttatgtcatctatgttgaatgtaagcttataaagcacaaagcatacatttcctgactggtctagagaacctcgtgc

SEQ ID NO: 927 - DNA, 1584 bp, Homo sapiens
  SIMILAR (1249)..(1380): 791254mologous to Homo sapiens decorin,accession number L01131,Smith-Waterman Score=178.
aattcatgagggagtcagccggactgtgttcattgagggaaaccttattttttagctgtgctatggagtagaagcaagaggttttcaactctagtcacagagcagcacctaccccctcctcctttccacacctgcaaactcttttacttgggctgaatatttagtgtaattacatctcagctttgagggctcctgtggcaaattcccggattaaaaggttccctggttgtgaaaatacatgagataaatcatgaaggccactatcatcctccttctgcttgcacaagtttcctgggctggaccgtttcaacagagaggcttatttgactttatgctataagatgaggcttctgggataggcccagaagttcctgatgaccgcgacttcgagccctccctaggccccatgtgcccctttccgctgcaatgccatctttcgagtgggccaagggtctgatttgtgtctggaacaaatgccaaaaggatcttccccctgacacaaactctgctagaacctgcaaaacaacaaaattacccgaaatcaaagatggagactttaagaacctgaagaaccttcacgcattgattccttgtcaacaataaaattagcaaagttagtcctggagcatttacacctttggtgaaagttggaacgactttatctgtccaagaatcagctgaagggaattgccagaaaaaatgcccaaaactcttcaggaagctgggtgcccatgaggaatgggatcaccaaaagtggcggaaaagttaacttttcaatggacctgaacccgatgattgtccataggaactgggcacccatcccgctgaagagctcatggaattgaaaatggggctttccatgggaatgaacgaagctctcctacatcggcatttgctgataaccaatatcaccagcattcctcaaggtcttctccccttcccatacgaaattacatcttggatggcaaacaaaaatccagcagagttggatgcaagctagcctgaaaggactggaataatttgggctaagttgggaattgaattttccaacagcatctctgctggttgaacaaatgggctctctggcccaacacgccctcatcctgagggagcttcacttgggacaacaacaagccttacccagagtaccctggtggggctgggcagagcattaagtacatcccaggttgtcctaacctttcataaccaaccaatatctctgtaggttgggatcaagtgacttctggcccacctgggacacaacacccaaaaaggcttcttattcggggtgtgagtcttttcagcaacccggtccagtactgggagatacagccatccaccttcagatgtgtctacgtgcgctctgccattcaactcgggaaactataagtaattctcaagaaagccctcatttttataacctggcaaaatcttgttaatgtcattgctaaagaataaataaaagctagatactggaaacctaactgcaatggtggatgttttacccacatgacttattatgcataaagccaaatttccagtttaagtaattgcctacaataaaaagaaattttgcctgccatc

SEQ ID NO: 928 - DNA, 2171 bp, Homo sapiens
  SIMILAR (523)..(1497): 931254mologous to Homo sapiens Human live cytosolic beta- glucosidase cDNA,accession number AAX22400,Smith-Waterman Score= 1614.
cggacgcgtggggcctggctcctctggccaaagggtgctctgcttctggcagctgaagatcccagtagacagcttcttaaaccatggctttccctgcaggatttggatgggcggcagccactgcagcttatcaagtagaaggaggctgggatgcagatggaaaaggcccttgtgtctgggacacatttactcatcagggaggagagagagttttcaagaaccagactggcgatgtagcttgtggcagctacactctgtgggaggaagatttgaaatgtatcaaacagcttggattgactcattaccgcttctctctttcctggtcacgtctgttacctgatgggacgacaggtttcatcaaccagaaaggaattgattattacaacaagatcatcgatgatttgttaaaaaatggggttactcccattgtgaccctctaccactttgatttgcctcagactttagaagaccaaggaggttggttgtcagaggcaatcattgaatcctttgacaaatatgcttcagttttgcttcagtacctttggggatcgtgtcaagcagtggatcaccataaatgaagctaatgttctttctgtgatgtcatatgacttaggtatgtttcctcatgccagatctcactttgggactggaggttatcaggcagctcataatttgattaaggctcatgccagatcctggcacagctatgattccttatttcgaaaaaggcagaaaggtatggtgtctctatcactttttcccgctcggttggaaccagcagatcccaactcagtgtctgaccaggaagctgctaaaagagccatcactttccatctggatttatttgctaaacccatattcatcgatggtgattatcctgaagttgtcaagtctcagattgcctccatgagtcaaaagcaaggctatccatcatcgaggcttccagaattcactgaagaagagaagaaaatgatcaaaggcactgctgatttttttgctgtgcaatattatacaactcgcttaatcaagtaccaggagaacaagaaaggagaactaggtactctccaggatgcggaaattgaattttttccagatccatcttggaaaaatgtggattggatctacgtggtaccatggggagtatgtaaactactgaaatatattaaggatacatataataaccctgtaatttacatcactgaggatgggtttccccaggagtgacccagcgccttttggatggacacttcaacgctggggagtattttcagacaaacatttcaggaactgttcaaagctatccaacttgataaagtcaatcttcaagtatattgtgcatggtctcttctggataactttgagtggaaccagggatacagcagccggtttggtctcttccacgttgattttgaagacccagctagaccccgagtcccttacacatcggccaagtaatatgccaagatcatccgaaacaatgggccttgaaggcacatctgtagggcaagatggctgagaaatacaggagaggcgtctgcttttggaaaggaaatctgctttggtgatgatctttcaggcaatctcaacttacttctttaatcaacatttaatatcaatggatctgtgattaaaaggtctgaatatgtaatgcctcgtgaagtatttaataatggcctttatttgtatttggatcaatgaggtttttaaagaaaaatggaagagaaaaccactaaccttgatttttgtattgcaaaatcagatagcccctggaaacataaatttaaatcctttagacatttttctagaaaaaaatgcaaagtttataaagatgatacaaccatgatttgcaactgtaacaggagaccatttattataagcgtacctgtttgtgaacttaattattctgattccataagctgtttttgcttaggtgatccactgccatgtgatccataatttttctacataaaaaatcaaagttaaaagtcacattatacagttatgcattcatttcaacaaaatagtgaattgataatctacttgttaatatattcgcgcccatattttgtgtgtttggacaagtacatctcccttttgcttaatgaacttccgaacaataataaaataatagaataaaaaagaaatttgaatggcaaaaaaaaaaaaaaaaa

SEQ ID NO: 929 - DNA, 1842 bp, Homo sapiens
  SIMILAR (389)..(916): 421254mologous to Homo sapiens E25 protein,accession number AF038953,Smith-Waterman Score=173.
  misc_feature (1)...(1842): n = a,t,c or g
cccccagtggcaaatccgcgccacctcgcaaacccccaactcaggcacttgggccccttttgggccccctctcgctcctccctttaggcacctccctgggcccgcccacggtctccccccagtttgggactgcgtcataagtatcccagacctcggcttgcagtagtgttagactgaagataaagtaagtgctgtttgggctaacaggatctcctcttgcagtctgcagcccaggacgctgattccagcagcgcctctaccgcgcagcccgaagattcactatggtgaaaatcgccttcaatacccctaccgccgtgcaaaaggaggaggcgcggcaagacgtgggaggccctcctgagccgcacggtcagaactcagatactgaccgggcaaggagctccgagtttgccacccagggaaaaaggagggctcctctggggagatgttatggtttactctttttagggcctttcaattcatcttgggaaggactttatttgtttggtggagcctgcatttacaagttactttcatgcccaagaggcaccattttaccgtgggagagatgtgcttttttgattctgaggatcctgcaaatttccccttcggtggaggagagccctaactttcctgcctggtgacttgagggaggctgacattcgtgaggatgacaacattgcaatcattgatgtgcctgtccccagtttctctggatagtgaccctgcagccaattatttcatgacttttgaaaagggaatgactgcttaacctggaacttgttgctgggggaactgctaatctgatgccccttcaatacttctatttgttatggcctccaaaaaaaatctgggtagagctctttgggcaaactgggcgagtgggcagatatcctgcctccaaacttatgtggttcggagaagacctagttgctgttggnaggaaaattcgtgatgttagtaaccttggcatctttatttaccaactttgcaattaacagaaagtccttccgccttcgtcgcagagacctcttgctgggtttcaacaaacgtgccattgataaatgctggaagattagacacttccccaacggaatttattgttgagaccaagatctgtcaagagtaagaggcagcgagatagagtgtccttggtaatagagaagtcagagatttacaatatgactttaacattaaggtttatgggatactcaagatatttactcatgcatttactctattgcttatgctttaaaaaaaggaaaaaaaaaaaactactaaccactgcaagctcttgtcaaattttagtttaattggcattgcttgttttttgaaactgaaattacatgagtttcattttttctttgaatttatagggtttagatttctgaaagcagcatgaatatatcacctaacatcctgacaataaattccatccgttgtttttttttgtttgtttgttttttcttttcctttaagtaagctctttattcatcttatggtgcagcaattttaaaatttgaaatattttaaattgtttttgaactttttgtgtaaaatatatcagatctcaacattgttgggtttcttttgttttttcattttgtacaactttcttgaatttaggaaattacatctttgcagttctgttaggtgctctgtaattaacctgacttatatgtgaacgaattttcatgagacagtcatttttaactaatgcagtgattctttctcactactatctgtattgtggaatgcacaaaattgtgtaggtgctgaatgctgtaaggagtttaggttgtatgaattctacaaccctataataaattttactctatacaacca

SEQ ID NO: 930 - DNA, 2212 bp, Homo sapiens
  SIMILAR (984)..(802): 501254mologous to Homo sapiens PRO1902,accession number AF118082,Smith-Waterman Score=130.
tccaaccagggcaggagtaaacccttgtctaaacaaaaaaagccaagcactacccctggaaatccaactgaaggttagctcctcacttttggaaatccactcccaaaattgtaacccaattcccaacatagtaaactgttaaaagaaatgcccacttccatccttaaagccttaaaattcatttattgtagtgagcaagtttgtaatgaataccagcgaggtggtgctcaagcccacagttgtctaagacactgggtttcacaggaagttaatctcaatctcagtatatgcaagtaaactgactcattcctgcttccagtcgggaacaatttttcagttaaatcttgcttccttgcatgtcaagaattctctactgggtaaatcttacaggtgtcaactttcattatcagggcatctattggccatctattaaaggccttacctgtttttttctgtcatccaggcaaatcttaggactatttacttgtggtaaacattaggataggcaaaggaaactaaggacaaaaatctctagttcaatttagaacttgaataccctcaagagcactgggctgatgggaaggcattttatctaattcagactcagatgaagggaaaacgataacacttcattacagacttgtctatggccaattcaagtacctttgaatcttgagcaatacacattgccagtcactttaagagggcctaatctctttgggctgctttaactcctgcttagcatgtccttaagaacacatgtccctggccaggcatggtggctcatgcctgtaattcccagcactttagaaggccgagccgatccactcaaggtacaggagtttgagaccagccctgaccaacatgggaaaaccctccatctctattaaaaaccaccaaattagcacatgcctgtaatccccagctacttgggaggctgaagtaggagaattgcttgaacccatgaggaggagattgcagtgagattttgccattgcattctagcctgggcaacaagaactccatcttaaaaaaaaattttaaaaaccatcacacaaacagaaagcatgtccctttaaattttaccctatcccttcaaacttaagcaaaaattttcccttttataacccaaaaaaaaacctttagacacttttacatatgggaggtcaggcacaagtggctcatgcctgtaatcccagcaggaagatcgctgaaaagcatttttcaaatgcacaaatgcttaaagattcaggagtaagtgggctattacacctgttaagcctattaccatgtagtttcattcctagtgaccaagtagacaaactgctaattatcaaagcataaaaggtattagactctgcaggagaaaagcaatgtagattagtctaattttatagctacttcaaattgccatctttttctattagaaccttgttcctattctgaatagcactcaatagaacttgtgaaaccatccaaactggcataaagcttactccactgacttcaaaatggacccttccactcatagggtggtaccctagccactacacttatttcttatgtcatggcaaatagtcaactttcactgccaagtcattttaccccacgtttcaacatgcacatcccagtaatttggaaacattttgtttccaaagattcacttaacattggtttagcaacatgaagctttctatgcaacacaaggactcaagtttttggcctgttttagtgacaggcaatcagcaacatgctgcctttctccccagtgttgtaatcaaagcaaccctcccatagctttaaatgatattccttccccttccaattatgtggggggaaaacaaccctattctccacccagaagtgttaactcaagatttacattttcaagaagtttccagattcgtaaacccagaattagatgtctttcacctaaatgtctcggtgttgaccaaaggaacacacaggtttctcatttaacttttttaatgggtctcaaaattctgtgacaaatttttggtcaagttgtttccattaaaaagtactgattttaaaagctaataacttaaaactgccccccgcaaaaaagaaatccaaagtgtggtcacacaacaacatatctcctccctatctgaaggttttacgatgcattgttatcattaaccagtcttttactactaaacttaaatggccaattgaaacaaacagttct

SEQ ID NO: 931 - DNA, 599 bp, Homo sapiens
tttcgtgattaggtcagcattcaagccccaagtccagcctatgacaaagctcaaagctccagcccatctctgctgccctctgccctcaagagactctcgccagtggctgggcccttcctagtaacttcacccaaccactcaccccctgcccttcccttcctgattgattaaaatccggcctaatctcccaggtgtaacccaagccctcttccacaagctttccagggctccggagattgccccctcccctgtacggctgcagggcttatgtgtgcctggcgctcagcacgggaaccttgccttctgcctcacccatgtctccccagggtttggcacaggcgagatccctgagccagcctacttcacaaggatgaacagaagctctccctatcctttgcaagtagaagccccctccctggccccctcaagaaatctccccctctcagtggattcaccaaagccctgcggatcctgcactgtgaaggagaagccctccccaggggcatccggacagctgcagccaggccctgcgtgacattgctgagccgcagccccacagcctgtgccagctgcccatgcccggctcatagaccctgagc

SEQ ID NO: 932 - DNA, 520 bp, Homo sapiens
  SIMILAR (59)..(247): 771254mologous to Homo sapiens renal Na+-dependent phosphate cotransporter,accession number D28532,Smith-Waterman Score=239.
  misc_feature (1)...(520): n = a,t,c or g
ctctgtgttcagtactgctttacccatcaaactcactccaagaataatgtttcctcttcagaatgggttcttggcttcccttccctatttgtttgcctggatctgtggtaacctagcaggtcagttatcagacttcttcctgaccaggaatattctcagcgtaattgctgtccggaaactcttcacagcagcaggtaagcaacagccagaacatttaagcacttgggagatacttctcccctatctttaggatgcacctgactatgttgtctgaatcactccccaggatttctccttcctgcaatctttggtgtctgcctgccttacctgagttccaccttctacagcattgtcatttttcctaatacttgctggtgcaacaggcagcttttgcttgggtgggagttgttttaataaaatgngcttggatattgctcccagatattttgggatttatttaaaggcatggtttcaactttnaactgggaattgataagggggggcttaattgggntcccca

SEQ ID NO: 933 - DNA, 1995 bp, Homo sapiens
  SIMILAR (172)..(1785): 301254mologous to Homo sapiens golgi matrix protein GM130,accession number AF248953,Smith-Waterman Score=583.
atgtccaaagaaaccagacagagcaaattggccgaggccaaggaacagttgacagaccatcatccccagaccaaccctagtgttggtacagcagcaagcgacaccaaaaagaagaaaataaataatggcactaaccctgagacaaccacttctggtggttgccactcgcctgaggatgaacagaaggcaagccaccaacatcaggaagccctaaggagggagctagaggcccaggttcataccatacgaatccttacatgtcagaaaactgagcttcagatggcactctactacagccagcatgctgtcaagcagttggaaggagaggccagggatctgatcagccgcctgcatgattcatggaagtttgcaggagagttagagcaggctctctctgctgtcgctacacagaagaagaaggcggataggtacattgaggagttaacaaaggagagggacgccctgagtctggaactgtacaggaacaccataactgatgaggagctgaaggagaaaaatgccaaactacaagaaaaacttcaacttgtagaatctgaaaagtctgagatccagctcaacgtaaaggagctaaaaaggaaactggagagggccaagctcctgctgccacagcagcagctgcaggcggaggctgaccacctgggtaaggagctgcagagtgtgtcagcaaagctccaagcccaggtggaagagaacgagttgtggaaccgcctgaaccagcaacaggaggagaagatgtggaggcaggaggagaagatacaggagtgggaggagaagatacaggagcaggaggagaagatacgggagcaggaggagaagatacgggagcaggaggagaagatgcggaggcaggaggagatgatgtgggagaaggaggagaagatgcggaggcaggaggagatgatgtgggagaaggaggagaagatgcggaggctggaggagatgatgtgggagaaggaggagaagatacgggagctggaagagaagatgcacgagcaggagaagatacgggagcaggaagagaagaggcaggaggaggagaagatacgcgagcaggagaagaggcaggagcaggaggcgaagatgtggaggcaggaggagaagatacgggagcaggaagagaagatacgggagcaggagaaaaagatgtggaggcaggaggagaagattcacgagcaggagaagatacgggaggaggagaagaggcaggagcaggaggagatgtggaggcaggaggagaagataagggagcaggaggagatatggaggcaaaaggagaagatgcacgagcaggagaagatacggaagcaggaggagaaggtgtggaggcaggaggagaagatgcacgaccaggaggagaagatacgggagcaggaggagaagatgtggaggcaggaggagaagataagggagcaggaggagaagatacgggagcaggaggagaagatacgggagcaggaggagaagatacgagagcaggaggagatgatgcaggaacaggaagagaagatgggggagcaggaagagaagatgcaagaacaggagaagatgcggaggcaggaggagaagataagggagcaggaggagaagatacgggagcagaaggagaagatacgagagcaggaggagaagatatgggagcaggaggagaagatacgagagcaggaggagatgatgcaggaacaggaagagaagatgtgggagcaggaggagaagatgtgtagcaggaagagaagatgcaagaacaggaggagaaagtatgtctttgcaaggattatccagcgtgtctacctactcaatcatattatcagaaacagaaaaagtgtccagattcttgtcttgtcctgttcagattttttaaattccaagaacagtcaccttctaccagacactctgatgttggaagacaaagcatatttgcaaattgaaagctgccttataccgaatgaggaagaataccaatacttggctgaatga

SEQ ID NO: 934 - DNA, 1906 bp, Homo sapiens
  SIMILAR (983)..(1381): 671254mologous to Homo sapiens Sodium-Phosphate Transport System 1,accession number X71355,Smith-Waterman Score=372.
tcccgaatcagtgggtggaggcaaaacccttcagcaagaagagaagcaacttcagccgtgtatgcaaatggataaccggttgcctcccaaaaaagttccaggtttctgttcctttcgctatggattgtctttccttgtgcactgttgtaatgttataataacagcacagcgtgcgtgcctgaacctcacaatggtagtcatggtgaatagccacagatccacatggtttgcccaacacctccacaaagaagcttcctggataatataaaagaaccctatgtataattggagcccagatatcccagggaatcatcttgagttcccacctcctatggtgtcatcatcatccaagttccctgttgggatacttctctggaatatattctacaaagaaaatgattggctttgcattatgcctcagctctgtgttaagcctgctcatcccaccagcagctggaattggagtagcttgggtcgttgtatgtcgagcagttcagggagcagcccaggggatagttgcaacagcccagtttgaaatatatgtcaaatgggctcctcccctggaacgaggccgacttacttctatgagtacatcagggtttttgctgggaccctttattgtcctacttgtgactggagttatctgtgaatctctgggctggcccatggtcttctatatttttggtgcttgtggctgtgccgtatgtcttctctggttcgttctgttttatgatgaccccaaagaccacccatgtataagcatcagtgaaaaggaatacatcacatcctccctggtccagcaggtcagttcaagtagacaatctctgcctatcaaggctatacttaagtcgcttccagtctgggctatttccattggtagttttacgtttttctggtcacataacatcatgacactatacactccaatgtttatcaactccatgcttcatgttaatataaaagagaatgggttcttgtcttcccttccctatttgtttgcctgggatctgtgggtaacctagcaggtcagttatcagacttcttcctgaccaggaatattctcagcgtaattgctgtccggaaactcttcacagcagcaggatttctccttcctgcaatctttggtgtctgcctgccttacctgagttccaccttctacagcattgtcattttcctaatacttgctggtgcaacaggcagcttttgcttgggtgggagtgtttataaatggcttgggatattgctccccagatattttgggatttattaaagcatgttcaactttaaactgggaattgatagggaggactaattgcttcccactttgactggattgatcctttaagcaggaatccggaatccgcctggttttaaaaccttcaatccctgatggccagcccattaatggtgactggcccctaattttcccacccttataggttgcctacagccagaaattccagggactggggctaaagaaaaacaacaccacacgtcccctgaagtgtgaaacaggagcacttgcagagccctgggacaaccctccttaattgaagggaagagggacccagcacatgaggctgaggctgaggggcagtcaccagcacccaggaagaaggtggtaggaggagtcctaggggccggttttaccctcccacatatcctgtgtgcatcgttttttaacatgtgttgttttgtaacatgtaatatatctgaattttaaatggggggtggtgatttatctcagtcttcctctctgcatcagttgctttataaatgattgtcaaaccaataaatacacacaagataaaattttattctaaggcttcatgaaaaaaaaaaaaaaaaaacttttgctttttaccctggaagaaatactcataagaatcccgagtcggcggccggg

SEQ ID NO: 935 - DNA, 533 bp, Homo sapiens
  SIMILAR (322)..(456): 911254mologous to Homo sapiens BCL7C,accession number AJ223980,Smith-Waterman Score=225.
atcatagcgctcctccatgcattttcaaaatatatcaaaaaatatctaactgtataattagcataagaaaattccttataaacctctgacatttctcacgaggctacctcgaggcattttcagaaatatcaaatatcaggttcgttcctccacacagtgtcactgtcgttgttgtttttggtgcctgcttcctctgcatcctgggcatctggccctgggcttgcctcccgggcccaggaggggaggggagtggaggctttggagaaggcagaggctcagaggctggacgcctgggttctgtggagctcacgcctgtccacccttcctctccaggcccccgaagcttaccctgtctttgagccagtgccacctgtccctgaggcagcccagggtgacacagaggactcggagggtgcccccccactcaagcgcatctgcccaaatgcccctgacccctgagaagccggcctgcctgtcctggttgccccaggggcccctttggctttttacaaataaagacccttttgtaaaaa

SEQ ID NO: 936 - DNA, 879 bp, Homo sapiens
  SIMILAR (284)..(793): 381254mologous to Homo sapiens BCL7C,accession number AJ223980,Smith-Waterman Score=181.
  misc_feature (1)...(879): n = a,t,c or g
gcccgtccgnanctcccggttcgacgatttcgtggcgcccgggcctggcgcggagcctgagcccgccggacgggaggcggccccgccgcgggctcggccccggccccagccccgccagcatggccggccggactgtacgggccgagacccggagccgggccaaggatgacatcaagaaggtgatggcgaccatcgagaaggtccggaaatggaagaagcgatgggtgactgtggccgccactccctttcggatcctcaattgggttgcaagtggtggatccccaggaggaggagcgaagcgcgaggcaggtggcggggcagagagatcccgtgggccgggaacgtcggggcaggggcgccagtccccgagggggtggcccctctcatcctgctggatcttaaatgatgagaacagcaaccagaatttccattcggaagggttccttgcaaaggggcacagaggcccagtcctgggggcacccccaaagcccaaccggccttgtgtcaccttgccggaccccccagaagggggtccctgagaagggctcagccccccacgggttgggccaagaagagagatcccccgggggcataactgtttggcagcacatacgaaccccccaatgctgaccaaggaggagcctgttccagaactgctggaagctgaggcccccgaagcttagccctgtctttgagacagtgccacctgtccatgagacagcccagggtgacacagaggactcggagggtgccccccccactcaagcgcatctgcccaaatgcccctgacccctgagaagccggcctgcctgtcctgttcgcccaggggcccctttgcgctttttacaaataaagacccttttgtaaaaaaaaaaaaaa

SEQ ID NO: 937 - DNA, 1065 bp, Homo sapiens
  SIMILAR (694)..(819): 611254mologous to Homo sapiens B-cell growth factor,accession number M15530,Smith-Waterman Score=133.
tttttttttgcatgcttccctcctgatttattaagaccgacatatttaatttgcatttcttgagggaatagcacctggaaaccagggagaaagaagctgaagcatgcaggtcatgaattattcaatttggtgtcaataatttgtcagaaaaattaaaaaaaatcaatagataaccgtattgtagttcaactgattataatatagaagcaacggataatgaacaccctttcctcaaagtcatttattctcaacctttggaaatgattacgtttttacctccagtgaatcccttcatcacagagaataacagggtaccagcccaagccaacagtgccccataccagagaactcagggaaacaaagaccctaaaggttatgtacaatgagagaatcagactgtgaggctccagctctcttctgtatccctgctcactttacctcagtgcacaccatatcccttcttcctccattgtgaaatgtgcatacacgtgtttgtctgtgaatatataaatatctctatttacacatatatacatatataaaaatgtgcaatacaaagacataagcaaggagttttttcctaataactattttaatccagaggactgattggagaaaaaacaagttcttcccctcaaattttccttctaacttgagaaccaatttcctggaccaattcctgctcaaagaaaccattttaaggaagcacctgtcggcttgggagtgctagctcacacctgtaatcccagcaccttgggaggccgaggcgggtggtcaccttgaggtcaggagtttgaaaacagcctgaccaacatggtgaaccacttctcatagagacacattattaacttggtgaaacttaattgggatgaggagcactctgtatacatgtatcatttctgtttttcctcattgtgatggttaatcttatgtgtcaacttgactaggccacatgatgcccagatatttggtcatacagtattctgggtgtgtctgtgagggtgtttttggaagagactaacatttcagtcagtagactgaatacagcacatggccctccctaat

SEQ ID NO: 938 - DNA, 1941 bp, Homo sapiens
ggaacaggttaagaaaactatgtagatgtaggaaagatgggaggaaataaagccctgttctggatcccccatcccctccagaataagagcatgttctgcatgtattaatcttttatgctgtttatgaaacaggcaagataagtctgtttttccttctggaaccataagggtaaccagattttcatctacagacaagtggtagtcatttgtgtttatcatgcaacttacttacaaacaccaagatattaattgctgcaacttgatgtcaaatcacattactgggtaatttttaagactatgtacccacaccatacatacatacatatatatatacacatacatacaaacctgtgtgccaagtgacagctatttttttatatacatggtaattcattaaaattgccttagtaatatattagaatatacaaatatgtgtgtataaaataaacatacacacacacacacacccctatgtagttttttaaaacactgggcaatgacccactccccttggaaatgcatgtatgaactaccctatgaaatgtaagctgcagaatagataaaacacaggtttccactaataaaagacatctgaacgtcctgaatataggaggaccagaaggtttttggttggttggttggttggttggttttaaccatggtttaacccaacagaagttatttacagaaattcatatatccccaggcaacacaaaactcctttattcaaaatcactgctatctttgggactaaacacaggctactttctgtttactcctaacaaaataaagcaagcaaatttgagtcaaatattggtgcactttaatactatcacatctttgaaaactcaatttgagttttaccaattaatgtgtctcatgaagagaagacaccagttttaaaatgagccacaaacagtaaagtcctatcagtataaaatttgaaaaaaaaaaaaaagatgattgtatttctagattagcaagaaattagttaattctggctgatttctatttctagctaatttggtcattctttgccatagcttactctattcaaataaacatatattcttgcttgcatcctagattggaaattaaaatttttcaaagaacaaagcttcaatattggatactgaagagtatacatgaaagaaaattcctttttgaagctattaaacccatttttttcctatgtgaaagttgaggacaatttatataactcactttttgtcatgtaaaaaaggttactcaagttgtactacccacataactgaaaatattggccatttggccttatctgtgagatttgacactaagtttttgttagagatdtggaaattatactagtcctbtttaaggggtaaaaaattcaattcaatactgacaaacttttgctctgtagttttactgtacatttatttggtaaagaaaaagaaaacaaaagccatgacaaacccaaagttgtccaggcaaataaactcaaatctttgtcacgtctgatattataatccttctatgtaagttttttaattaaggttatttctatatgccgtgtgttgcttgttattaaatgcgacgtattcatggcacaaagctttcccaagctgaataaaaagcaaacattaacaaatttttaccgttgtaatgcagggaagaaacccaagcaagctctagtctgtgcttaagtgttagcattcttattttttgaaccttatttctcaaaacttatagtagcctcaagaagtctattgatattggtcatgtttatttcttgccatatttataacacagcaagagtatttacaggaatgaagtagctgacacatatttttagactctgtataattcagaacagttataaatatttagtttatggattgactctgtatcctgtcatcttttcgcctacctgatctttcttggaataaaataatatatcct

SEQ ID NO: 939 - DNA, 395 bp, Homo sapiens
  SIMILAR (63)..(230): 961254mologous to Homo sapiens Similar to vesicle-associated membrane protein 8 (endobrevin),accession number BC001634,Smith- Waterman Score=272.
caccctgggaggaagccgactaggcgaattcacttactgaccggcctgggctgctctgagacatggaggaagccagtgaaggtggaggaaatgatcgtgtgcggaacctgcaaagtgaggtggagggagttaagaatattatgacccagaatgtggagcggatcctggcccggggggaaaacttggaacatctccgcaataagacagaggatctggaagccacaggacaaccctccataaatgtgtgccaagagggtctcctttcctgtcttcctctacagagaatgctgctcggtcctcctacccctcttcccgaggccctgctgccacgttgtatgccccagaaggcaggaatagagttggagcggtgccagcagcaggcgaacgaggtgacg

SEQ ID NO: 940 - DNA, 356 bp, Homo sapiens
  SIMILAR (7)..(141): 971254mologous to Homo sapiens endobrevin,accession number AF053233,Smith-Waterman Score=232.
tttcgtctggcccggggggaaaacttggaacatctccgcaataagacagaggatctggaagccacatctgagcacttcaagacgacatcgcagaaggtggctcggaaattctggtggaagaacgcgaagatgattgtcctttttttatcatcatcctcttcattgtgctctttgccactggtgccttctcttaagtaacagggaacctctcccacctgcccttcttttcagggacaaccctccataaatgtgtgccaagagggtctcctttcctgtcttcctctacagagaatgctgctcggtcctcctacccctcttcccgaggccctgctgccacgttgtaggccccatgtatt

SEQ ID NO: 941 - DNA, 382 bp, Homo sapiens
  SIMILAR (1)..(171): 1001254mologous to Homo sapiens endobrevin,accession number AF053233,Smith-Waterman Score=298.
  misc_feature (1)...(382): n = a,t,c or g
aatattatgacccagaatgtggagcggatcctggcccggggggaaaacttggaacatctccgcaacaagacagaggatctggaagccacatctgagcacttcaagacgacatcgcagaaggtggctcgaaaattctggtggaagaacgtgaagatgattgtccttatctgctgccatgttgtatgccccagaaggtaccttggtcccccggaaggagagaaaaaagagagatggactgtggctgcatttcttgggtccttagagtgggctggagagacctagagggcccagcatgtggctgggaaactgttggtggccagtgggtaataaagacctttcagtatccctaaaannnnnnnnnnnnnnnnnnnnnnnnnnnnnn

SEQ ID NO: 942 - DNA, 399 bp, Homo sapiens
  SIMILAR (1)..(195): 861254mologous to Homo sapiens Similar to vesicle-associated membrane protein 8 (endobrevin),accession number BC001634,Smith- Waterman Score=274.
atggaggaagccagtgaaggtggaggaaatgatcgtgtgcggaacctgcaaagtgaggtggagggagttaagaatattatgacccagaatgtggagcggatcctggcccggggggaaaacttggaacatctccgcaacaagacagaggatctggaagccacaggaaacttttacgatatttggagcactgatgttctggaaattaaggaggagggtgtcctcaagttccttgcagcaggaagccacttaggtagcaccaaccttgacttccaaatggaacagcacatctataaaaggaaaagtaatggcatcgacatcataaatctggagaagcttctattggcagcttgtgctattgaaaaccctgctgatgtcagcatcatcctccaggaatactag

SEQ ID NO: 943 - DNA, 791 bp, Homo sapiens
  SIMILAR (88)..(357): 581254mologous to Homo sapiens Similar to vesicle-associated membrane protein 8 (endobrevin),accession number BC001634,Smith- Waterman Score=200.
agagaaactgattcatgagcgattccgcacgagaggaagccgactaggcgaattcacttacttgaccggcctgggctgctctgagacatggaggaagccagtgaaggtggaggaaatgatcgtgtgcggaacctgcaaagtgaggtggagggagttaagaatattatgacccagaatgtggagcggatcctggccccggggggaaaacttggaacatctccgcaacaagacaagaggatctggaaaagccaacatctggagcacttcaagaccgacatcgcaaaaaggtggctccgaaaaattctggtggaaagaacgtgaaagatgattgtcccttaatctgccgtgattgtttttaatcatcatccctccttcaattgtggctctttgcccactggtgccttctcttaaagtaaacagggaacctctccccacctgcccttctctttcaggggacaaccctccataaattgtggtgccaagagggtctcctttccttgtcttcgctctacagagaaatgctgctcggtcctcctacccctcttcccgagggccctgctggccacgttgtatggccccagaaggtaccttgggtcccccgggaaggaggaggaaaaaagaggagatgggattgtgggctggcatttttttggggtccttagagtgggctggagagacctagagggcccagcatgtggctgggataacctgttggtggccagtgggtaataaagacctttcagtatccccgaaaaaaaaaaaaaaaaaaaaaaaaaaaaaagtcgtatcga

SEQ ID NO: 944 - DNA, 1322 bp, Homo sapiens
  SIMILAR (710)..(874): 921254mologous to Homo sapiens M phase phosphoprotein 10,accession number X98494,Smith-Waterman Score=251.
  misc_feature (1)...(1322): n = a,t,c or g
atgctaagtgaaacaagccaaacacagaaaagaaaaacagtatgtgattccacattatatgaggcacctagaatagtcagattcacagagaaggtagaacagtggttgccaagagctgggtcagaggagaatgggcaggtgttgtgtaatgggtaccgagtttttagttttggtgagatgaaaaagctcaggaaaggggtggtggtgactgttgcacaacaaacgaccttcctggagctcggtattcacctaaggtgttggcggcggcagcctttagcaggcgcgctatctccgctgtgtctctccgcactagccgctgaccgagccaggtgcgcgcttgtgtcgggagttgcggacagccatagccccgcgggcctggcgctgacggaccctggagcggtgtctgacagaggtcggcaaagccaccggctggccccagtgcatcctcacatatgcgcgcagatccctggctccggtgctactggggtcgcacctggacgcgggttgcagacccctggcaaattgtggagctgggggaagagtgaagaacaggagtgtgaagaggatggttcagagacagagactggtggccaggaggacctagaagatttacaggaggaagaggaagtgtcagatatgggtggtgacaatcctgaagtgggcaagaaagctagaaactcaagcaaatttgagctgaggaaaagcccagttttcatgtgatgaggattctgaccttgactttgatatcagcaaattggaacagcagagcaaggtgcaaaacaaaggacagggaaaaccaagagaaaagtccatagtagatgataaattcttcaaactctctgaaatggatctctatttagaaaacatacataaantgttaagaggaacgaaaagatgataatgatgatgagttgagagactctcctccccagaccagccctagtgttggtacaggagcaaccgacaccaaaaagaagaaaataaataatggcactaaccctgagacaaccacttctggtggttgccactcacctgaggatgcccaggttcataccatacgaatccttacatgtcagaaaactgagcttcagacagcactctattacagccagcatgctgccaggcagttggaaggagagtccagggatctggtcagctgcctgcatgattcatggaagtttgcaggagagttagagcgggctctctctgctgtcactacacagaagaagaaggcggacaggaggcaaactggggctgagtcagctgctgtgggtgagttgggggacacgggggacactgtggggagtgagcactggacatag

SEQ ID NO: 945 - DNA, 1655 bp, Homo sapiens
  SIMILAR (236)..(1228): 561254mologous to Homo sapiens Human mesenchymal stem cell cDNA,accession number AAA54288,Smith-Waterman Score=764.
tctactctagcgtggtggaattcctcggcctcgcggcgacggcggcggtggcggcttggacgactcggagagccgagtgaagacatttccacctggacacctgaccatgtgcctgccctgagcagcgaggcccaccaggcatctctgttgtgggcagcagggccaggtcctggtctgtggaccctcggcagttggcaggctccctctgcagtggggtctgggcctcggccccaccatgtcgagcctcggcggtggctcccaggatgccggcggcagtagcagcagcagcaccaatggcagcggtggcagtggcagcagtggcccaaaggcaggagcagcagacaagagtgcagtggtggctgccgccgcaccagcctcagtggcagatgacacaccaccccccgagcgtcggaacaagagcggtatcatcagtgagcccctcaacaagagcctgcgccgctcccgcccgctctcccactactcttcttttggcagcagtggtggtagtggcggtggcagcatgatgggcggagagtctgcttgacaaggccactgcggctgcagccgtggcctccctgttggccaatgggcatgacctggcggcggccatggcggtggacaaaagcaaccctacctcaaagcacaaaagtggtgctgtggccagcctgctgagcaaggcagagcgggccacggagctggcagccgagggacagctgacgctgcagcagttttcgcagtccacagagatgctgaagcgcgtggtgcaggagcatctcccgctgatgagcgaggcgggttgctggcctgccttgacatggaggctgtggcaggtgccgaagccctcaatggccagtccgacttcccctacctggggcgctttccccattcaacccagggccttctttcattattgaccccggcaggtgttgtttcctgggccgagaagcgcgctgcacatgggcgggcctgggcttgagttaccccattgcaggggagagttgggcttttgccattcagttcccggcaagaagaagcggaaacgctgcggccatggttccgcgccctgccggcggcgcattcaactgcgaagcagtgcagcagttgtaggaatcgaaagactggccatcagatttgcaaattcagaaaatgtgaggaactcaaaaagaagccttccgctgctctggaggtaacggcgccttagagggagaaggtgatgctttccaccggaaccccccttccggtggttttcagttgacgggcggcgggaaccccaaagcttgccctctccgtggcaatgttcactgcttcgtgtggtcttccagcaaagggatttcgggcgaagacaaacggatgcacccgtctttagaaccaaaaatattcttacagatgcattctgttttataaacatgttgttgcgtctacattcacgtctagataacaaaacacaagtcttatagcgccgagtaccgttagtaggtattcgtgcatgcgggttacaggcctggaactgggccaatacgtgaacccttcgagggaatggaagccgcaaaccggccagaatgggcggggccaaaggtgtgcagacacgcgttttttttggcgcaaaagggttttccaaaaggcgggtttctagacccactttggaaaaaccccat

SEQ ID NO: 946 - DNA, 8736 bp, Homo sapiens
  SIMILAR (6703)..(8109): 321254mologous to Homo sapiens KARP-1-binding protein 1 (KAB1),accession number AB022657,Smith-Waterman Score=464.
atgcccggccaaattcttgtcaaagcagcccagttattccaacagaaagcaaagtcttttcaccgaatggtcctggaacagctgggtatttactgggaaaccaataaacctggacccttccatcccatcactcatgaaaatgaatttgaaatgaatcatagaggggaatgtaaaaccaaaaactataaaacttctagaagaaaatataggagaacttctttaacacctcgagggcagcaaagttttcttaggatacagaagattgggcaaagatacctgcaatacatttaccaagcaaaggcctccaacccagaatgcacaaagaattcttgcaaaccaaaagacaaacaacccgatagaaatatgggcaagaaaacactggaaagtgacaaggagggtctcagacctaaggcccccatccctgccccagacccagttgctggtaggacactgattgggaaggagcatgtccctatcctttggggtggtgtgctggcctcggggaccagctgctccctgtcccctgcgggctccccagtgcaccccacaaccctgagggaccaccagctggggccaccccagcccctctggagctgcctggagctccagccacaccagacccacaacaaattcgtgggacggggtggtgccaaggaaagggacaggaatctggccagagcctgcccaccgctaagccaagggcaatggcagcgccctggcctcaacactaccattaacattcctgcgggtgaaaacttgaaccttgtggagggaccccgggacccagggctggctctggaccctgccaggacccccacatcccaccagagggagtgggcgggtcccctgatgggccaggagcctggccagcccccaacactcactcagcttcttggagctggggaccccaccctgagtgcccacccccagcctgagcagctgactgcagaggaacagaccgctctgagtcacacagccagcccagtctgcccgctcagcccaaactcacagcggccaccacacctcgaagcaccagggtatctgccaggaggctccagcaggactcaaccagctgtgctacgtgtagcccccctgggatcccagtgtgccagccctgtgcccatagcctggatagaaaacgactctatttacacggaggcaggaaagctggccacgtctgctccagggacactcccagacagctctcacctgggaacgctgtttactgtttaccacctgacacccacactcagccaggcagggcagggctggctgagtcagcgccgtacccagaggcccagcctgctggagtgggacaggaaggagacgctggcacagagcggggccgtcatgccagacacagcactgacccccgcaagagcctttgctggggcccccaccccagctacgcccacctcacagcagccagagggaggtgccctgcacagctggccacagcgctggccacgcaagcccttcccagaccctcgctgcagtgcggccagtgtggtccgccaagccctggaacacatgacggagatctcctcctggtgcaccctccccaacgcggacagccatgggaacgcaccacaccctgccccaggccctctccagactctaagcacgtgccactggctctgcctggggcaccctcccagctcagatcctggacttgctcccccgccaggcactcagaaccgagccctcggctccagagcccctggcgggctacggggactccccttggctttgcgggatggctgtgtccactgggcctgtcctcccctggctaagaaatggtcccagaaccaaccacagctgctcaggtccaggaacttcgcctctgccctgcacggggctgcccacttccaagtcttttatacggagatgatgggggaggaccccctgaccagctgggtgcccgtttcaggcctgggtattgtccccaggtccacttcctctgcacccacacagctgggatcaggaaatgtggcagtggtggggcatgtcagggtgctgccatcgttccactcggatgggtttcttcaacccatgtcttcatcgggctctctggctcagcagtccgtgtgggctagcctgggatccgagcagcagcaggttcccatgctgccgcctgcaagccctggcactcctgctgccagagctgggccagttcaatttgagcagtgcctgctccaatcgccaacctggaagccttatcctcagctcgtgcctttcaggctgtgccatgaagcaggatggtctgcccagaagctggcccaagaagccagcagcggcctagcagccacctgggctgcccccacctcctcctgcaaccagggttgggcacctgatgtcaagggcaggggaaggttgggcagtcctgggcggccagcaccccggcgtgcatgtctcctgagcagctgcccatcgggcctctgctggcctgggggctccaagatgcaaggccggcgggagctggggggagagcctttgagtgacctccaggaggaagcagccagcgcttccctccgagtggcacctgagaggctgagtgatgacagtttggaatggagacggacctgccccgaccttctcctgtccgatgggaaagccagcatctccatgccccgtgagggcggttccacctgcactgcccgatgtcctgaccctggggaacacagcagcacttggggggagtttgaaggctttcgggaatcttcagccaagtctggacaattctcacagtcccttgaactcctcgagggacccacagaaccccagccaccgagaaccacttctgccccaaaagagtgcagttctcaccaaccatgccagggtggaccttgggtgacaggaacttctgccgtcccaccttctgagcccattctcagctatgagaacattttaaagtgtgcttttcaagaaataacagtccagcaggcagctgaagacgtttccaccatagaccatttcctagaaataagcagtgaagaaaaacctggcgttgaacgtgtacataaattgtgtaacgaatccagaaaactctggagagcccttcagagcatacacaccacgtctacttctcagcgcctctggagcgagtcccgttgccaggagaacttctttcttgttctcggaatagatgctgcgcagaagaacctttctggaggccagggccacatcatggaagattgtgacctcaaagagcctgaaggactcctcactgtcagcagcttctgtctccagcattgcaaagccctgatccagaccaagcctcaaggacaggcctttgtccctcacggttgtggacaggaggtcgcaccactggcctgcgagagcctctgggtccggcacaagggctctgctggggctgagatccgtgaaggcagatgcggagaggcgccgctggattgcgagcaggcccaggtgcggggccaggtcaggtccactgtgggcgtccagggccagacgggcccagccagcaccaagatgagtgccacgtcctggttcctggtgagcagcagcggcgcccgccaccggctccctcgggagctcatcttcgtggggcgtgaggagtgtgagctcatgctacagtgtccttgtgcccagtgcaagcctggcacagagctggtgcccagcgaacaggcgttaaatgacgcaggaacgtggacccaggcaggacttcctgctgtggctgtcactcctgtggtggcccaggctgtggtccaggagaccacagcctgggcaggccctgaccttctgtgccccgtgcatcgagccggtctgctgcgggtgcctgtggccgccaatggggaactcggagactgccactggggtggccaggagccatgtagctgtgggtgccagcttcggagaaggaatttgaacagggtggacctggagtcccgcagcgtggacaagcagcatgccgtcatcaactacgaccaggacagggacgagcactgggtgaaggacctgggcagcctcaatgggcatgcctgtctgatgaagcggctgtccctgaatggctgcacagcaagtggccgctcctctgcctgtgtggactgcgtcacccacatgggctttgagaggacgtttgtgaatgacatgcgcatcccggaccagaagtacgtcacgctgaagctcaacgatgtcatccgcttcggctacgatatcctgcccctgagcgtccctcctcctgggcttcttctcagtccccaggaccacagtcaccctgttactccagaagcagggctgtcactgctgggaaagaggcccctcctctgcctgcctcgatgggcccttgagctggcacacctgttgctgggcgtggacttcagcgctgggctcctggctcttctgctctgtgttcgccttaacacgtgtccacattccaacatgtatgtgctggagcgtgtgcagcaccgagtcccggaggaggcactcaagcatgaaaagtacaccagccagctgcaggtgagcgtgaagggtttggcgcccaagaggagcgaggcactgccggaacacacaccatactgcgaggcctcgaaccccaggccggagaagggggaccggagaccaggaacagaggcagcctcttaccgcacacccctgtatgggcagccctcctggtggggtgaggacgatggtagcacgctgcctgacgcccagcgccagggagagccctacccagagcgccccaagggaccagtgcagcaggacggggagctccacggcttccgcgcccctgctgagcctcagggctgctcgttccggcgggagcccagctacttcgagatccccacgaaggagaccccgcagccgtcgcagccccccgaggtgccggcacacgagatgcccacgaaggatgcagaggcaggtgggggcggagcggcccctgtggtgcagagccacgcctccttcaccatcgagtttgatgactgcagccctggcaagatgaagatcaaggaccatatcaccaagttttccctgcgccagcggcggcccccgggcaaggaggccacacctggcgagatggtgtcggctgagaccaaggtggccgactggctggtgcagaatgacccgagcctgctgcaccgggttggccctggggatgaccgccacagcaccaagagcgacctgcctgtccacacccgcaccctgaagggccacaagcacgaggacggcacgcagagtgactcagaggaccccctggccaaggcggcctcggccgccggggtgcccttggaggccagcggggagcaggtgcggctgcagaggcagatcaagcgggacccccaggagctactacataaccagcaggcctttgtcatcgagttcttcgacgaggacacgccccgaaagaagcgctcccagtccttcacgcacagcccgtccggggaccccaaggccgacaagcgccgtggcccaacgccggccgatagggaccgccccagtgtcccagccccagtccaggcagggggccgcagctcggggccacagagggccggctcgctcaagcgggagaagacagaggaacggctgggcagcccctcgcccgcctcccgaacccctgcccgccccttcggaagcgtggggcgccgctcccgcctggcccaggacttcatggcccagtgtctgcgggagagctccccggccacccggcccagccccgagaaggttcctccggtgctgcccgctcccctgacaccccatgggaccagccccgtgggccccccgaccccaccgcccgcccccacggacccccagctgaccaaggcacggaaacaggaggaggacgacagcctcagtgacgcagggacatacaccatcgagaccgaggcgcaggacacggaggtggaggaggcccggaagatgatcgaccaggtctttggggtgttggagtcccctgaactctccagggcatcttcggccacctttcgcccagtcatcagaggggacagagatgagtctgatgacgggggcgtggcccagcggatggcgctactgcaggagtttgcctcccggccactgggtgcggccccccaggcggagcaccagggcctcccggtgccgggctcccctgggggtcagaagtgggtgtcccgctgggccagcctggctgacagctactcagacccgggcctcacagaggatggcctgggacgtagaggcggggagccggaggggtccctgcctgtgcgcatgcggcgacggctccctcagctgcccagtgagagggctgacagccctgcgggcccagagagcagcaggaggagtgggcctgggccaccggagctggacagtgagcagcccagccgcctcttcggccaggaggagttggatcctgacagcctcagcgatgccagtgggtcggacgggggccgaggccccgagccaggggtggagccacaggacagcagacgcaggagcccccaggaggggcccacgtggagcaggggtcggcgctcaccaagggcccccggggagccaactcccgcctctttcttcattggggaccagaatggggacgctgtgttatctaggaaaccgcttgcggctccaggggatggggagggcctagggcagacagcccagcccagccccccagcacgggatggcgtctatgtcagtgccaatgggagaatggtcatccagctacggcctggacggtccccagaacccgacggccctgccccagcctttctccggcaagagagcttcactaaggagccagccagtggtcccccagcgcccggcaagcccccccacatctccagccacccgcttctacaggacctggccgctacccgggccgcacgcatggacttccactcccaggacacccacctgatcttgaaggagacggagacggccctggcggccctggaggcccgactcctctctaattctgtggatgccgagtgtgaggggggcagcaccccgaggccgccggaggacgccctgtctggggactcggacgtggacacagccagcaccgtcagcctgcgtagtggcaagagcgggcccagccccacaaccccccagcctctgcgggcacagaaggagatgtcgccatccccgccagctgcacaggacccgggaggcaccgccctggtcagtgcccgtgagcagtcctcagagaggcagcatcacccacttggcccgacggacatgggccgtggagagccggtacggcgctcagccataaggcgtggccacaggccccgagggtccctggattggcccagtgaggagcgtggccctgtcctcgcccacctacccagctcagatgtgatggcctccaaccacgaaacccctgaggccaccggggcaggacggctaggttctcgccggaaaccagcggccccaccgccatccccagctgcccgggaggagcagagccgtagctcagccagctcccagaaggggccgcaggccttgacccgctccaacagcctgtccacccctcgccccacacgggcctcccggctgaggcgggcccggctgggggacgcttcggacactgaggctgcggatggtgagcgggggtccctgggcaaccctgagcccgtgggccggccagctgctgagcaggccaagaagctgtcacgcctggacatcctggccatgccccggaagcgggccggctccttcacagggactagtgaccccgaggcagcccctgcccgcaccagcttctctggccgcagtgtggagttgtgctgtgccagccgcaagcccaccatggccgaagcacgggctgtctccaggaaggctgccaacacagccaccaccacgggtccccgccagcccttcagcagggcccgctcgggcagtgcccgatacacctccaacacgaggcgccggcagcagggctcggattacacgtccacctctgaggaggagtacggctcccgccacggctcccccaaacacacacgctcccacacctcaacagccactcagaccccgagggctggcagctccagccgggctcgttcccgggcccccggcccccgggacacggacgacgaggaggaggagcctgacccttatggtttcatcgtgcagacggcagagattgcggagattgccagggtcagctccctgccctgcccgtcccggctcgcggttcccacctgcagcgacagctccctgggcttcctggctctcggttcccacctgcagcgacagctccctgcgcgtcctggctctcggttcccacctgcagcgtcagctccctgcccgtcctggctcgcggttcccacctgcagcgacagctccctgcccgtcctggctgatggttcccacctgcagcgacagctccctgcgcgtcctggctctcggttcccacctgcagcgtcagctccctgcgcgtcctggctcgcggttcccacctgcagcgtcagctccctgcccgtcctggctgatggttcccacctgcagcgacagctccctgcgcgtcctggctctcggttcccacttgcagcgtcagctccctgcccgtcctggctcgcggttcccacctgcagcgacagctccctgcccgtcctggctgatggttcccacctgcagcgacagctccctgcgcgtcctggctctcggttcccacctgcagcgtcagctccctgcccgtcctggctgacggttcccacctgcagcgacagctccctgcccgtcctggctctcggttcccacctgcagcgtcagctccctgcccgtcctggctga

SEQ ID NO: 947 - DNA, 465 bp, Homo sapiens
  SIMILAR (103)..(2): 851254mologous to Homo sapiens Unknown (protein for IMAGE:3610995),accession number BC003539,Smith-Waterman Score=143.
  misc_feature (1)...(465): n = a,t,c or g
gaagaagaaagttctcctggcaacggaactcgctccagaggcgctgagaagtaaacgtggtgtgtatgctctgaagggctcccaagagttttctggattcgttactcgagcttctcaaccactgcggcctaatccactcgagcgctgtctgtctttcaatgctcagttgaaagtgtgtcccacaatttatgtacacgttcaacgccaggtttttcttcactgcttatttctaggaaatggtctatggtggaaacgtcttcagctgcctgctggactgttatttcttgaaaagcacactttaaaatgttctcatagctgagaatgggctcagaaggtgggacggcagaagttcctgtcacccaaggtccaccctggcatggttggtgagaacaacactcaatggggcagaagtggttctcggtggctggggttcagtagnccccgcccgggaatncagccggtacg

SEQ ID NO: 948 - DNA, 4239 bp, Homo sapiens
  SIMILAR (471)..(2144): 291254mologous to Homo sapiens Protein polymer adhesive substrate PPAS1-C,accession number AAW49717,Smith-Waterman Score= 233.
atgcccggccaaattcttgtcaaagcagcccagttattccaacagaaagcaaagtcttttcaccgaatggtcctggaacagctgggtatttactgggaaaccaataaacctggacccttccatcccatcactcatgaaaatgaatttgaaatgaatcatagaggggaatgtaaaaccaaaaactataaaacttctagaagaaaatataggagaacttctttaacacctcgagggcagcaaagttttcttaggatacagaagattgggcaaagatacctgcaatacatttaccaagcaaaggcctccaacccagaatgcacaaagaattcttgcaaaccaaaagacaaacaacccgatagaaatatgggcaagaaaacactggaaagtgacaaggagggtctcagacctaaggcccccatccctgccccagacccagttgctggtaggacactgattgggaaggagcatgtccctatcctttggggtggtgtgctggcctcggggaccagctgctccctgtcccctgcgggctccccagtgcaccccacaaccctgagggaccaccagctggggccaccccagcccctctggagctgcctggagctccagccacaccagacccacaacaaattcgtgggacggggtggtgccaaggaaagggacaggaatctggccagagcctgcccaccgctaagccaagggcaatggcagcgccctggcctcaacactaccattaacattcctgcgggtgaaaacttgaaccttgtggagggaccccgggacccagggctggctctggaccctgccaggacccccacatcccaccagagggagtgggcgggtcccctgatgggccaggagcctggccagcccccaacactcactcagcttcttggagctggggaccccaccctgagtgcccacccccagcctgagcagctgactgcagaggaacagaccgctctgagtcacacagccagcccagtctgcccgctcagcccaaactcacagcggccaccacacctcgaagcaccagggtatctgccaggaggctccagcaggactcaaccagctgtgctacgtgtagcccccctgggatcccagtgtgccagccctgtgcccatagcctggatagaaaacgactctatttacacggaggcaggaaagctggccacgtctgctccagggacactcccagacagctctcacctgggaacgctgtttactgtttaccacctgacacccacactcagccaggcagggcagggctggctgagtcagcgccgtacccagaggcccagcctgctggagtgggacaggaaggagacgctggcacagagcggggccgtcatgccagacacagcactgacccccgcaagagcctttgctggggcccccaccccagctacgcccacctcacagcagccagagggaggtgccctgcacagctggccacagcgctggccacgcaagcccttcccagaccctcgctgcagtgcggccagtgtggtccgccaagccctggaacacatgacggagatctcctcctggtgcaccctccccaacgcggacagccatgggaacgcaccacaccctgccccaggccctctccagactctaagcacgtgccactggctctgcctggggcaccctcccagctcagatcctggacttgctcccccgccaggcactcagaaccgagccctcggctccagagcccctggcgggctacggggactccccttggctttgcgggatggctgtgtccactgggcctgtcctcccctggctaagaaatggtcccagaaccaaccacagctgctcaggtccaggaacttcgcctctgccctgcacggggctgcccacttccaagtcttttatacggagatgatgggggaggaccccctgaccagctgggtgcccgtttcaggcctgggtattgtccccaggtccacttcctctgcacccacacagctgggatcaggaaatgtggcagtggtggggcatgtcagggtgctgccatcgttccactcggatgggtttcttcaacccatgtcttcatcgggctctctggctcagcagtccgtgtgggctagcctgggatccgagcagcagcaggttcccatgctgccgcctgcaagccctggcactcctgctgccagagctgggccagttcaatttgagcagtgcctgctccaatcgccaacctggaagccttatcctcagctcgtgcctttcaggctgtgccatgaagcaggatggtctgcccagaagctggcccaagaagccagcagcggcctagcagccacctgggctgcccccacctcctcctgcaaccagggttgggcacctgatgtcaagggcaggggaaggttgggcagtcctgggcggccagcaccccggcgtgcatgtctcctgagcagctgcccatcgggcctctgctggcctgggggctccaagatgcaaggccggcgggagctggggggagagcctttgagtgacctccaggaggaagcagccagcgcttccctccgagtggcacctgagaggctgagtgatgacagtttggaatggagacggacctgccccgaccttctcctgtccgatgggaaagccagcatctccatgccccgtgagggcggttccacctgcactgcccgatgtcctgaccctggggaacacagcagcacttggggggagtttgaaggctttcgggaatcttcagccaagtctggacaattctcacagtcccttgaactcctcgagggacccacagaaccccagccaccgagaaccacttctgccccaaaagagtgcagttcttcaccaaccatgccaggggtgggaccttgggtgacaggaacttctggccgtcccaccttcttgagcccattcttcagctatgaggaacattttaaagtgttgcttttcaaggagataacagtccagcaggcagctgaagacggtttccaccatagaccatttcctagaaataagcagtgaagaaaaacctgggcgttgaacgtgtacataaattgtgtaacgaatccagaaaactctggagagcccttcagagcatacacaccacgtcttactttctcagcgcctctgggagcgagtcccgttgccaggagaacttctttcttgttctcggaatagatgctgcgcagaagaacctttctgggagccagggccacatcatgggaagattgtgacctcaaagagcctgaaaggactcctcactgtcagcagcttctgtctccagcattgcaaagccctggtccagaccaagctctcgggggccgcctggcagcaaacaggggaggctgatgacatgcagccgcttcctgaagaccccctcatgcggaggtggccagcacatcactattccaaggaaaaggatgttcactccacgcaagcttcaaatttgacactctttaattaggcgacgttttgctaaaatcagggaggattttgttacctttatgagggattttttcattttcttcctgggtgggttgatgttggaaccagaggtgttttttggagctgtttttcagaccccaggcccattcctgggatctctccaacaggacctgtcctgtgttctgggcttgtctcgggtctgaccaggagatggaggatgtgtccttggcagagccaaggggagacagaggtttctggatgccatgacaggctgtcggggtccaggtggcactcatgggccccctgccccatgtgaatgctgctggcacctggtggggggttgcccagggatggacccctgggcatggctttctggggctgctttaagtccaagggggagccaacttgtggcccaaatccatgagttcagaggaaaaaggggaaggcactgaaacgtcaccagagagacagcttgttgagacccgctcagaaaccctctgtctgtcacactcttgccctggcttgctgtgtggtcagggcaccatgagggtgtacagatgtgctgtgtcctaaaaagcttgccaggtgccctcacttattgtttgggcccctgcccagcagcctcaaggacaggcctttgtccctcacggttgtggacaggaggtcgcacccctggcctggcgagaggcctctggtgggcccgtggcttcccccagttatctgcctaaggaaaactgtgctcttcgaagggcagagccaagaagtcagccctgacttttgtaaaattttactaaataaaaccacctggataaa

SEQ ID NO: 949 - DNA, 760 bp, Homo sapiens
  SIMILAR (185)..(295): 831254mologous to Schmidtea mediterranea alpha tubulin,accession number AF112360,Smith-Waterman Score=161.
ccctaacccgaataccattccttggggccaaatatgcccctgtcatctttgctaaggagcctccaatgacaacgttcgtgaacagagatacaaatggcttgctttaagcaagcaaccagatgggtgaaatgtaccctcgccatggtaaatacatggcttggctgcttgttgtaccgtggtgacggtgtttccaaaagatgtcaatgctgccattgccaccatcaaaaccaagcgcagcatccagtttgtggattggtgccccactggcttcaaggtttggcatcaactacagccctcccactgtggtgcctggtggagacctggccaaggtacagagagctgtgtgcatgctgagcaacaccacagccattgctgaggcctgggctcgcctggaccacaagtttgacctgatgtatgccaagcgtgcctttgttcactggtacgtgggtgaggggatggaggaaggcgagttttcagaggcccgtgaagatatggctgcccttgagaaggattatgaggaggttggtgtggattctgttgaaggagagggtgaggaagaaggagaggaatactaattatccattccttttggccctgcagcatgtcatgctcccagaatttcagcttcagcttaactgacagacgttaaagctttctggttagattgttttcacttggtgatcatgtcttttccatgtgtacctgtaatatttttccatcatatctcaaagtaaagtcattaacatcaaaaaaaaaaaaa

SEQ ID NO: 950 - DNA, 1752 bp, Homo sapiens
  SIMILAR (227)..(1549): 331254mologous to Torpedo marmorata alpha-tubulin,accession number X71980,Smith-Waterman Score=287.
atccttaattaaattaatcccctccccccccagtgcgttacttacctcgactcttagcttgtcggggacggtaacccgggacccggtgtctgctcctgtcgccttcgcctcctaatcccttacccactatgcggggagtgcatcttccatccaacgttggccaggctggtgtccagattggcaatgcctgcttgggagctctcttgcctgtaacacggtatccagcccgatggccagatgcccaagtgaccaaaaccattgggggaaggagatgactccttcaacaccttcttcagtgagacgggcgctggcaagcaccgtgccccgggctgtgtttgtagacttggaacccacagtcattgatgaagttcgcactgggcacctaccgccagctcttccaccctgagcaagtcatcacaggcaaggaagatgctgccaataactatgcccgagggaacttacaccattggcaaggagatcattgaccttgtgttggaccgaatttcgcaagcttggctgaccagtgcaccggtcttcaagggcttctttggttttccacagctttggtgggggaactgggttctgggttcacctccctactcgatgaactgtctctcagttgattattggcaagaaagtccaagcctggagttctccatttacccgggcgcccccaggtttccacagcctgtagttgagcccctacaactccatcctcaccacccacacccaccctgggagcactctggattgtgcccttcatgggtagagaatgaggccatctatgacatctgtcgtagaaacctcgatatcgagcgcccaacctacactaaccttaaccgccttattaggtcaaattgtgtcctccatcactgcttcccttgagatttgatggagccctgaatgttgacctgacagaattccagaccaacctggttcccttaccccggcattcaacttccctccggcccacatatgcccctgtcaatcctccttcctgagaaaagcctacccatggaacaagctttctgtagcagaagatcacccaaatgctttgcttttgagcccagccaacccagatggttgaaatgtgacccctcgcccatgggtaaatacattggcttgcttgcctgttgtaccggtggtgacgtggttcccaaaagatgtcaaatgctgccattgcccacccatcaaaacccaagcgcagccatccagtttgtggattggtgcccccactggcttcaaaggttgccatcaactaccagcccccccactgtggtgcctgttggagacctggcccaaggtacaaaaaactgtgttgcatgctgagcaacacccacagccattgctgaggcctgggctcgcctggaccacaagtttgacctgatgttatgccaagcgtgccctttgttcactggtacctgggtgcaggggatggaggaaggcgagttttcaaaggccccgtgaggacatggctgccctttagaaaggattatgaggaggttgggtgtggattctgttaaaggaagagggtgaggaagaaggaaaaggaatactaattatccattccctttttggcccctgcagcatgtcatgctcccagaatttcagcttcagcttaactgacagacgttaaagctttctggttagattgttttcacttggtgatcatgtcttttccatgtgtacctgtaatatttttccatcatatctccaaaggtaaagtcatttccatcaaaaaaaaaaaaaaaa

SEQ ID NO: 951 - DNA, 564 bp, Homo sapiens
  SIMILAR (2)..(250): 911254mologous to Homo sapiens clathrin light-chain a,accession number M20471,Smith-Waterman Score=385.
ttcacaagtggatcgatagcagtcagagcctgagagtatccgtatatgcagagaagaccacatggaacgcttgcaagcctttgatgccaattctcggaagcaagaagcagagtggaaagaaaaggcaataaaggagctagaagaatggtatgcaagacaggacgagcagctacagaaaacaaaagcaaacaacagggtggcagatgaagctttctacaaacaacccttcgctgacgtgattggttatgtcagaagaagcctttgtaaatgacattgacgagtcgtccccaggcactgagtgggaacgggtggcccggctgtgtgactttaaccccaagtcattggattaattatgttgagttcttttggaccaaacctttttgtctttagagttgttcattgtttgtgattgcatgtttccttccttcaactgtgttctccctggcattcagagaggagggagaggaggaagaggaaggggagggaagcttcccaagagtagcctcaacctgtgcttctgtgcattattccccccataaatttctgtttcaaactgtaaaaaaa

SEQ ID NO: 952 - DNA, 2740 bp, Homo sapiens
  SIMILAR (3)..(44): 1001254mologous to Homo sapiens clathrin light-chain a,accession number M20471,Smith-Waterman Score=75.
gggctttctacaaacaacccttcgctgacgtgattggttatgtgtatgttgcaaaactaattcctttttctacatctgattctttctacttttgtttagagttaatgctccttttatgtcacaagttgctttgctttttaaattatttcaaattggcactttgggggctgcctaagaattgataagcggggtatgatctgttgatgaatcttccagatttgtgactccctgcatcctctgatggccatttttcatatttggggttttggagggaagaaagctaactcgctttcaaaatgtgtcatttgcgatcttatctgggaacggtttgaggctcgggggaactctgctctcttgctcttggctgccatcactgctgccatgccctgttgcctgcctgcctcaggtgggaaagaggtttccccacctgggagcaggtggcagtcccaggtggttaggagccagtgagcagcagcaccttgcattgccaaaatcagagctgtggggcagcatttttccatacttggttcattcaaacaatgtggggtcgtttgcctctccctcaggcagaagagtccagagcagagggggttgtctccagtgggtgtctataattgttcctctgtggtcttgcatgtcagaaattgctatttagtggtcagcttctgatgtcctgtctcctagcacagggaagcccccagctttgagatcaggatagtcaaagtgtcttgatacgggccacttgggcttctccccctgacccccccaaaagaaacctgcatcttctctggagaaggtgtttttcttattcttttttttttctttttttcttttttcttttttttaaggatttcttttatcaaagcagtattgctgaagagttggaaacagttctcattgtctcctccttaaaaaaagggctggctttacatgagaagtaagggtggaatggaagaggagaggaacctgtggaaggtgggcgatgagctcaggtctgtagagcctctcagggcctatgaccttgagatgttcatccccttagaagatagaactgggtttcctgggcccccagatgcatttgcagtgagacttgtgaaatgctggacttacaggtggtgtttgatttgatttctgcacattctctctggagtagaaatggagactggaaaggtcgagtctggttttgctgggcagctgggtggccagcaaagccagctgcacgtccccaagcacagatagagtggcaagggcatgtccagcttactgaccatctgcattgagctcattctcattttctatatctgacttaaagtttctctcgtttcttttcttctcttcacctttaagcacaaacataaaccatccttgctacagcctagaacagttaagtaaacctttctcactgcccctaactgtgtgtgccatgaagtcgcagtgttgtagtggctctgggcttcagcggtgtttgccacggccatccctgtgatagtgccacctcagtccccacagaccagtcatctccattgcttttctttgcccgtgatgcttgttggagtagatgaatatagtgtgtcttagcgctgtcctttccggctgtagctcccaccagttaattccgaactgggggtgggctgaccttgatgtgaaagaatgttggagcagcatcctgccaaaaagcaactcacgttggctctcctgccagtgtgccctgagtggccccaaggcacctggctggagggaaaatggcaaacttttggctgaactggagaatgtcctaacaaacccccttccagaatggctttagtctctagtgcttgctagcatgggagctttgtcttgaattccttttgatctgccccgtttctctccagccttaggaataaatctagaggctattgtgcaatgatctgtgggctttttagaagtctctaaatttccttgaaattcagtacagcccagcataaactactcaagttcttgatcagcctgctgctttgttcttattaataaaagcagtgtgtagctggctaaggacttgttttattaatgctccacaggagcagagacagacagagagacatagtgagccttgaaccaaacacctgtattccaacattttacacagcggtctgggcaccctgtgcctaggagagccagctacgtgtctacctgagtctgacctgggccaggggctgttatcttgggaaagccagaatgtcattaagaaagggacaaataggcagttgcttgtgtagcaaggcagccaccaggttgctcaaagggggttctgcataaaccaacatattttgttgttgcttccagggcagcagaagaagcctttgtaaatgacattgacgagtcgtccccaggcactgagtgggaacgggtggcccggctgtgtgactttaaccccaagtctagcaagcaggccaaagatgtctcccgcatgcgctcagtcctcatctccctcaagcaggccccgctggtgcactgaagagcaccctgtggaaacactacatctgcaatatcttaatcctactcagtgaagctcttcacagtcattggattaattatgttgagttcttttggaccaaacctttttgtctttagagttgttcattgtttgtgattgcatgtttccttccttcaactgtgttctccctggcattcagagaggagggagaggaggaagaggaaggggagggaagcttgcatgcctgcaggtcgactctagaggatc

SEQ ID NO: 953 - DNA, 1157 bp, Homo sapiens
  SIMILAR (332)..(631): 681254mologous to Mus musculus clathrin light chain 2,accession number U91848,Smith-Waterman Score=290.
gccaccgctgtggtgtcggtgggtcggttggtttttgtctccaccggttgtgtccgtgccgttcagttgcccgccatggctgagctggatccggttcggcgccccctgccggcgcccctggcggtcccgcgctggggaacggagtggccggcgccggcgaagaagacccggctgcggccttcttggcgcagcaagagagcgagattgcgggcatcgagaacgacgaggcccttcgccatcctggacggcggcgcccccgggccccagccgcacggcgagccgccggggggtccggatgctgttgatggagtaatgaatggtgaatactacccaggaaagtaatggtccaacagacagttatgcagctatttcacaagtggatcgattgcagtcagagcctgaaagtatccgtaaatggagagaagaacaaatggaacgcttggaaatcccttgatgccaattctccggaaagcaagaagcagagttggaaagaaaaaggcaattaaaggagcttagaaagaatggttatgcaagacaggacgaagcagctacagtaaaacaaaagcaaacaacagggtggcagatgaaagctttctacaaacaacccttcgctgacgtgattggttatgtcacaaacataaaccatccttgctacagcctagaacaggccagccagaagaagccctttttaaagtacctggagggattgtcccccagcaatgaatgggaaacgggttgcccggctgtgtggactttaacccccaagtcttagcaagcaggcccaaagatgtctccccgcatggcgcttcagtcctcatcttccctcaaggcagggccccgctggggccacttgaagagccaccctgtggaaacactacatctgcaatatcttaatcctactcagtgaagctcttcacagtcattggattaattatgttgagttcttttggaccaaacctttttgtctttagagttgttcattgtttgtgattgcatgtttccttccttcaactgtgttctccctggcattcagagaggagggagaggaggaagaggaaggggagggaagcttccccaagagtaagccctcaaacactgtgcttctggtgacattattctgagaataaatttctgtttcaaactgtaaaaaaaaaaaa

SEQ ID NO: 954 - DNA, 962 bp, Homo sapiens
  SIMILAR (902)..(453): 661254mologous to Rattus norvegicus rRNA promoter binding protein,accession number U77931,Smith-Waterman Score=462.
tttttccttaatttgggggaggatatattccaacttgggggaagggtgaaggcattttagctctggagctcaatcatgacatttctagagagttctgcagtgcccccgcattggcttcaaggcccccccccacgcctcctcccctcctcccgcccacgccccgctccccgccccccggagccccgcggacgctacgccgcgacgagtaggagggccgctgcggtgagccttgaagcctagggcgccgggcccggggtggagccgccgcaggtgcagatcttggtggtagtagcaaatattcaaacgaagaacttttgaaggccgaagtggagaagggttccaattgtaaccaagcagttgaaacatgggtcagtcggtcctgagagatgggcgagcgccgttccgaagggacggggcgatggcctccggtgcccctcggccgattcgaaaggggagtcgggttcagatccccgaatccggagtggcggagatggcgcgccgcgaggcgtccagtgtcggtaacgcgaccgatcccggagaagaccggcgggagccccggggagagttctcttttctttgttatgggttttgtgcgccctggtaatgggttcgccacaagagaggggttcgttccttggaaagcgtcgcgcttccggcggcgtccggtgagctctcgctggcccttgaaaatccgggggagagggtgtaaatctcgcgccgggccgtacccatatccgcagcaggtctccaaggtgaacaggcctttggcatgttggaacaatgtaggtaagggaaagtcggcaagccggatccgtaacttcgggataacggattggctctaagggctgggtcggtcgggctggggcgcgaagcggggctgggcgcgcgccgcggcggcgactctggacgcgagccgggcccttaccgtggatcgccccagctgcggcgggcgtcgcggccgc

SEQ ID NO: 955 - DNA, 1077 bp, Homo sapiens
  SIMILAR (964)..(779): 641254mologous to Homo sapiens Human secreted protein sequence encoded by gene 112 SEQ ID NO:282,accession number AAB56188,Smith-Waterman Score=202.
tctgtaggtcagataatttaataaatatttcaaataaatatataataaaaactgaaataaaatgtcaagaatggggaactaatggtattaagttttatatagaaggacaggagggcagcgtcataacaatatgttcaaggttatgatagaaagggctaggaaggtacttaatgtcctcagaggatacttacagaacatgtgatgtaattaggctgacctttgcaaatagttgaacaaccacaccgtgtattcccataccccctagactgcctgtccaggccaagccttagtaccaacgaagtccaacagtgaagtccaaatcccgggttatctgccataggtaagccccggcacctttccctcttttccctttaggtgccctcccctctaccccacaacctccttatttcatctcaaacacagctattacaaacatgtttttatttcactggaaaaatctgttaaagaacttaaatcttggttcccctttgaagaaaaacattttagcacaagctttaaataaaagtttgagaaggagggtaaagagtgcaattgcccccattctaagctctgtatagacataccttacctctgactctaaggccctgtggcatgaaaagcaggtatccaaaaagaactctgcttggccctactgatacggccttgagagtcagccctggtgcctgctttctggcccacaaaccgctgaaatccctaggagctgcccatgggagttaccaaaaatatgtgaataaactgaatgcagagtctgaggcaggtggatcaactgaggttcaggagtctaagaccagcctggccaacatggtaaaaccccatctctactaaaaatacaaaaattagctgagcgtggtggcgggcacctgtaatcccagctactcaggagactgaggcaggagaatcatttgaacccgggaggcagatgttgccagtgagccgagattgctccactgcactccagcctgggcaatgagagcaaaacttcgtctcaaacaaacaaaaaaattagccaagagtggtggtgtgtgcctatagtcctatagtcccagctactcaggg

SEQ ID NO: 956 - DNA, 1205 bp, Homo sapiens
  SIMILAR (241)..(792): 551254mologous to Homo sapiens clathrin light-chain A,accession number M20472,Smith-Waterman Score=419.
  misc_feature (1)...(1205): n = a,t,c or g
cgcccccccgccnnnnnnnnntttgagnccatcgcgatccctagtccgtgtggtggaattcgcaccacagcggtggctgccgggcgtggtgtcggtgggtcggttggtttttgtctcaccagttggtgtccgtgccgttcagttgcccgccatggctgagctggatccgttcggcgcccctgccggcgcccctggcggtcccgcgctggggaacggagtggccggcgccggcgaagaaaacccggccgcggccttcttggcgcagcaagagagcgagattgcgggcatcgagaacgcacagggccttcgccatccttggacggcggcgcccccgggccccagccgcacggcgagccggcggggggtccggatgctgttgatggagtaatgaatggcgaatactaccaggaaagtaatggtccaacagacagtgtatgcagctatttcacaagtggatcgattgcagctcacagcctgaaagttatccgtaaatggagagaagaacaaatggaacgctttggaaagccctttgatgccaattctcggaagcaagaagcagagtggaaagaaaaggcaataaaggagctagaagaatggtatgcaaggacaggacgagcagctaccagaaaaccaaaaggcaaacaacagggacagacagaagcaagacctttgtaaaatgacattgaccgagtcgtcccccaggccactgaaatggggaaacgggtggccccgggctgtgtgaactttaaacccccccaagtcctaagcaaagcaggcccaaaagatgtctcctccgcatgacgcttcagtcctcatcctccccctcaaagcaggcccccgctggtgccactgaaagaagcccacccctgtggaaaacacttacatcttgcattattctttaattcctacttcagttgaagttctttcacagttctttgggtttaatttatgtttgagttcttttttgggaccaaacctttttgtctttaggagttgttcattgtttgtgattggcatgtttccttccttcaactgtgttctccctggcattcagagacggagggagaggaggaagaggaaggggagggaagcttcccaagagtagcctcaacctgtgcttccgtcgcactactctgagaatacactttctgtttcaaactgtaaaaaaagtcgaccggccgcgaatttagtagtagtaggtagta

SEQ ID NO: 957 - DNA, 585 bp, Homo sapiens
  SIMILAR (1)..(516): 781254mologous to Homo sapiens 'human homologue of rat ribosomal protein L9',accession number D14531,Smith-Waterman Score= 686.
atgaagaccatccgcagcaatcagactgttgatattccggaaaatgtcattactctgaagggatgcagagttattgtgaagggccccagaggaactctgtggagggacttcaatcacatcagtatagaactcagtcttcttgtaaagaaaaaaaagaggctccggcttaacaacacttgtggtgagaacatgatcaagggtgttacactgggcttccattacaagatgagatctgtgtatgctcacttccccatcaacatcgttacccgggagaatgggtcttttgttgaaatccgaaatttcttgggtgaaaaatacatccgcagggttaggatgagaccaggtgttgcttgttcagtatgtcaaacccagaaacatgaattaatccttgaaggaaatgacattgagcttgtttcaaattcagcggctttgattcagcaagcaacaacagttaaaaacaagcatatcaggaaatttttggatggtatctatgtctctgaaaaagaaactgctcagcatatcaggaaatttttggatggtatctatgtctctgaaaaagggggatcctatagagccacacggcag

SEQ ID NO: 958 - DNA, 673 bp, Homo sapiens
  SIMILAR (36)..(506): 511254mologous to Homo sapiens 'human homologue of rat ribosomal protein L9',accession number D14531,Smith-Waterman Score= 250.
aggaaccctgcggagggacttcaatcacatcaattgtagaactcagccttcttgtaaagaaaaaaaagaggctccgggttgacacaatgctgggtcaacagaaaaggaactggcctacccgttcgggactatttggtagtcatgtacaggaccatgatcaaggggtgttaccactgggcttcccgttaccaaggatgagggtcttgtgtatgcctcacttcccccaatcaacggttgttatcccagggagaatggggtcctccttgttgaaaatcccgaaatttccttggggtgaaaaataccatcccgcagggttcgggatgagaccagggtgttgccttgttcagtatcctcaagcccagaaagatgaattaatccttgaaggaaattgacattgagctttgtttcaaattcagcgggttttgattcagcaagccacaacagtttaaaaacaaggaatatcaggaaattttctggatggtatctatgtctctgaaaaaggaacctgttcatgcaggctgatgaataagatctaagagttaccctggctacagaaagaaagatgccagatgacagctcaggacctgcatgtgatatttaaatgatgcaataaaaggcctattgatttggaaaaaaaaaaaaaaaaaaaaaaaaaaaaaaaagggcggccgct

SEQ ID NO: 959 - DNA, 2107 bp, Homo sapiens
  SIMILAR (590)..(640): 471254mologous to Homo sapiens Human secreted protein, SEQ ID NO: 7870,accession number AAG03789,Smith-Waterman Score=52.
tgggtttccacaaaggcttttggttttattattattatttttaacaaacatacattggaaatagtaaaggtttctaattgaaaagagacctaatgcatagtttctctgcagcatagaagaccacctgtttcccaaaacttccaaggttaagggctttgaaaacattcccctggtaaattatcctcccagctggcctagcctagttaggcatattggtgccacattggtatcaaaggtgattattttttgcatttagcaaatgagcgctattacttttttgatgtatttttaattcagattgctcaaaagtcttgttatttcaagggagccttatgtcatacccacaaatattgatacctcctagtggaaatggtggctgtgggctccctagtagagttaatggatgaaagggctgagatacttagatactggcggaacattcagggttatggagcaaagtgttatgaacaatagctaccagagagttccaaagtctcccaaagcaactcataactataacaccagataaagttccaaagtcatttcatcacctatgtgaaaatgcaatactgaatgttttggctctctgatgcattttgttgttgttttatttattattattattatttttttgagacagcagggtcgctctgtcacccaggctggagtgcagcggtgcgatcttggctcactgcaatctccgcctcccgggtttgagcaactctccagcctcagcctcccgagtagctgggactacaggcacgtgctatcgcatccagctaatttttgtatttttagtagaaacaggatttcactatgttggccaggctggtcacaaactcctgacctcaggtgatccacccgcctcagcctcccaaagtgctgggattacaggtgtgagccactgcgcccagcctgttgttgttttcttaatccagtactttaacgttttactgtcctagaaatgccctgtgttttctcatgctatttcataagagaatatgctacttttcattgatgtcaagaaggcaacagaaatgctcctggggaagatctccttacaaataggtttcatctcatcagtaacaaaaattagaaaagcctttggtcagcccatggaggtgagttactctgaacctatgaaaatgtctctttataagagcaaattgcatcagatgacaaaacaggaatcaatttctcttagaaaaagttagtaatgtgttaagactactcttttaggttttattcaggcaaatgctcactgaacctaaaatactttaggggactctgatgggaggttcctttgaacgctggttggtgggtgtgcttgcttttaaagagaactcaacacagcaactgtgtgcttatgaaagttctacaaacgtgttcacttttctttccatctatttgtataatacgtacaatccttggggaagagcatgtacaaaaatgtcttctaagtaatccctttacaaggtaaacagactgctacgggttcaacttatgttgaaaagtaaaattacagcatcacataggtattattacattactctgaagaatgcataaactgccagatcacattttctaacctgaaaattaaacttctttcactgatagtcacgatcagtgccagctttccaggatgctgtgaaaactgcggttggccacagctacttagctgtgatgccacgggggattactgacttgctgcttttctaatatagaaacaaactcaacatagaatcaaagtgctgtcttgtgaatctctgctcatttcctggacagcttccatttcctgaagcagacccctgccccactggcgtgggaaggtgagccaggccagccgtctgcttctgcttctccttcataggctctttctttggcccatctgggggcacaagctcctgggtgatcttggctggctcttctgtaatttgcagaaacctgaaaaccatcacataattgggctttggaatacgattaaaattacgcagggacaaatgactgaaaggacaggacacagggctggtgtgggtcagacccacacatctggggccagccttggacaagcctttttggggaatttgaacttttaaaacttggttaa

SEQ ID NO: 960 - DNA, 381 bp, Homo sapiens
  misc_feature (1)...(381): n = a,t,c or g
gtttaaagtatgtgggagcatattaaccaagatataggatctgagaatacttaattgattttgagatttgaattaaattttaaaaatcaaatattttgtatgttaattcaggtaggttttggccaaagatgaactcaaatttttacatgttagccaaaatcaatatggaatcagaatagacatttttacttttagttaactgtgaaataaagatgcagatcagatgtatttacatatgcctttgccacctggcagcacccaacnnnnnnnnnnnnnnnnnnnnnnnnnnnnnnnnnnnnnnnnnnnnngtcacgctgatctcacaagggtcgggaaaatcatcattaacaggatgataaatggcctgggcgtacgcgtggg

SEQ ID NO: 961 - DNA, 1845 bp, Homo sapiens
tttttatgcttatcaccgcaatgatggcaaacagtgatttttttttcatagtttatgtttcattgttgccagcacctttagtgctcagtcttgagtgaaaaatataaagtgccaaaaaaatcttgcaagacagaatccatacttaacactctttccaagacactgtgaccatgtacagtagctatttcctgatgaccaaatctctcaacgaatcatgttattaataaatatttttagcactcatcagtattctccaatgtgaccttctcattggagtacacagaaggaaagcaaagaagagcatctgacttctagctctggcttacagcctctctaccaggccgaagcaagagacccgcggcagcagctccccgccactcagaccctggggtggtgataaactcaaaagaatgggctctggttttctattgacagaaaacccacttgattttgcttctgagttagcagtcagaagaccctctaagtacaatagaagtgctcttaacggactctgcctgtgggactcccaggccccggagtctccatctctctcgtaagccacctgccaacagcacagctggaaggctgttctctggtgttctcagcgctccggctccctccctggagttgtgcaaccgtcccaaactcctccatgcaagttctgcttcctcttataagtacacaactcagttaagtattcacatacacacagaaaatacgggtgtgaaaagaaagaattttctgtaaaaattaagttgaatactttggtaaaaagtgataaaggctgagttgccaataaaagttgcttttaaattaggtgtggctgggaatattataagatattggggaaaatatacaaatcaagaaaatttctgagcttagattgcttcatagatttatttaagtactcatcccacctttaaaacctctaaactgagaagaagggacccaaatcatgttattggtgtgactttatgtgagacgtagaactgtagtcattggacccttaggcaaaggaaaatccgtgtctttatatcagaagatcggcaaaccgaatgtatattacacagtttaggttatgattccctactttaacctacttactttattaaatgaccaactaccgatactgatcacaatagttattagagattctaatttagttgggaaggttctaatcactttccattaccaggcatttgaaaaataggggattcctttccgaatatattagccagggagccatagttaggatgttacccagggccatttattcatcctgttaaatggatgattttccccgacccctgtgagatcagcgtgacaggagtgtgtgtgtgtgtgtgtgtgttcctgtggggtgtgtggtttgggtggggtgcctgccaggtggcaagggcatatgtaaatacatctagatctgccatctttatttccaccagttaactaaaagtaaaaatgtctattctgattccatattgattttgtctaagatgtaaaaaatttgagttccatctttggcccaaaacctacctgaattaacatacaaaatatttgatttttaaaatttaattcaaatctcaaaatcaattaagtattctcagatcctatatcttggttaatatgctcccagatactttaaaccatggcaaccttttggcctaagagaatgtttgttcatggaaaaaagcttttgagatgagagggtgtcttactttcttgtggcaattgattttctgttttaacaccctttgggtaaaatcttgcaaagagcttttataatttgttttactgaattgtatggagattgtataccaagtaaagctcttttaaattacaaaaaaa

SEQ ID NO: 962 - DNA, 743 bp, Homo sapiens
ggtcatcgggacgtactaagactagggttgggccgagagtcggagccattactgcaggaaaaggtcccggagagctgagcagtcaagatggtggggcccaggtcttgggagacgggcaggattggggacgagaggcaggaagagacgggtggggggcgaggagaaggcaggggtaggaggcaaagggaatctgaggacccgaaaggttggaggtggggttggaaagactggggccctgcgaggaagcgagtctgcagcctgaaacaggagtttgtgggtcaaatatttgtgggtcacagtttgtggggctgggataaaaactcgggggattggcgttcaaatgctgaccacttccctcttttctgagcatggtgacttcacccgagaaccaaaccgcaggtaggttatctctgatccctaccgaggtcacccttagggagagggacaccctccccccagcacctatcctctaatcttaatctggcatctctttatcacccccatgagattaccccctggattattttctcttcttctggatcctccattttcttttctcactttcttcctccctccccttccactctaaatctgatcccaagcactygggtgagttttaggtggtgtgggtatgtgaaaaaacttggtcacttaatgcctgctgtgtgtggggtctcgggagggtgtataaagctgcctgctttcctttgtcctttaatcagctacttctgccycttttctcc

SEQ ID NO: 963 - DNA, 417 bp, Homo sapiens
  SIMILAR (229)..(417): 1001254mologous to Homo sapiens This gene includes jumping translocation breakpoint,accession number AB016488,Smith-Waterman Score=346.
acgatttcgtggaacaccgggccccgagctcggtcccgcgcccgaggatcctccacggggctagatggctgcgtcgggggcgggagcggaggcaactccggccttccctgccctgacctggaacctctgggagggctgcagagtaagtgccgcctctgcgctccgacggaggcacgaggcctgtggagtaggtccctctgttccgacaggtgcgacacttggcgctccatgcttgcgggtgccgggaggcctggcctcccccagggccgccacctctgctggttgctctgtgctttcaccttaaagctctgccaagcagaggctcccgtgcaggaagagaagctgtcagcaagcacctcaaatttgccatgctggctggtggaagagtttgtggtagcagaagagtgctctccatgc

SEQ ID NO: 964 - DNA, 453 bp, Homo sapiens
  SIMILAR (97)..(2): 871254mologous to Mus musculus putative,accession number AK005918,Smith-Waterman Score=147.
caatgtactccttcttccgccgccgactgtcctgagctgactgcttgttacggattttcctcctgaccttcttgaggaccctctcctctgccttggaggcccaggatgtgtgagtcctgggtccttcacctgcccccaactccccaatgcttctcctgggatattggcccctcagaggtcatggtgaggcccctgggttgggatacccttaggggaagcatgttaccttggtgaggggcaggtgagagggcagggaaaccccttcctgccccagcagacgcttctcctcatcggtcaggaacagggtttgacagggcagctgggggtaggggcaggagaagatgcaataggagtgaggagggggtcatcccatttgcagcacccaggctactccccccacatgccttctggagagtgtttcctcactgggagacaacttgaattccgccgcac

SEQ ID NO: 965 - DNA, 958 bp, Homo sapiens
  SIMILAR (432)..(554): 731254mologous to Homo sapiens This gene includes jumping translocation breakpoint,accession number AB016488,Smith-Waterman Score=149.
tcgacccacgcgtccgcccacgcgtccggccccagcgggcgacgaccgaacgcccccgggaacaccgggccccgagctcggtcccgcgcccgaggatcctccacggggctagatggctgcgtcgggggcgggagcggaggtgagcgggcgctacggccgcgagcccccgccggcccttcctccagcgccctgcggaccccgcagaaggcgctcgcctccctaccccgcaaaaacatatcgatttttctcgctgtggcaacggggacgtcctgatagatcctctgctccaataggcaactccggccttccctgccctgacctggaacctctgggagggctgcagagtaagtgccgcctctgcgctccgacggaggcacgaggcctgtggaagaaggtccctctgttccgacaggtgcgacacttggcgctccatgcttgcgggtgccgggaaggcctgggcctcccccagggcccgccacctctgctggtgctctgtggctttcaccttaaagctctgccaaccagaggctcccgtgcaggaagagaagctgtcataaaactacccctgagtgtggtcccacaggatatgtacagaaaatcacatgcagctcatctaagagaaatgagttcaaaagctgccgctcagctttcatggaacaacgcttattttggaagttcgaaggggctgtcgtgtgtgtggccctgatcttcgcttgtcttgtcatcattcgtcagcgacaattggacagaaaggcctggaaaaggtccggaagcaaatcgagtccatatagctacattccacccttgtatcctgggtcttagagaccctatctcagacagtgaaagtgaaatggactgatttgcactcttggttctttggagccttgtggtggaatccccttttccccatcttcttctttcagatcattaatgagcagaataaaaagagtaaaatggt

SEQ ID NO: 966 - DNA, 543 bp, Homo sapiens
  SIMILAR (26)..(133): 701254mologous to Homo sapiens Neural thread protein,accession number AAR95913,Smith-Waterman Score=110.
actactttttttttttttttttgaaatggagtcttgctctgtcaccaggttggagtgcagtggcgtgatctcagctcactgcaaactctgcctcccgggttcaagcgattctcctgcctcagcctcccgagtagctgggactacaggcgcatgcgccacgcctggctaattttttgtactttagtagagatggggtttcaccgtgttgcccaggctggtctcaaactcctgagctcaggcaatctgcccgcctcggcctccaaagtactagaattacaggcgtgacgatgcgagcctggctgcatgcagcactttcttggggctgggactgttgtgggtctgaggccgggccccacagatgaaagtgctgtagccacatctggctcccatcccctcttcaactctaccgagcaccagcactccatccatgtctgtctgctgcctccctcaggactgggtgtggtcctcccaaacatctgcaaagccccccagccagtggagcctcctggaagaaccgggaaggctgagcccatttcctcctga

SEQ ID NO: 967 - DNA, 734 bp, Homo sapiens
  SIMILAR (196)..(339): 791254mologous to Homo sapiens HSPC222,accession number AF151056,Smith-Waterman Score=200.
ttcggcaccaggggaagagaagctgtcaggtgggtgattgtctgggaacccgacacgtcccgtcgtttgtttttggttttagtatcttccccatataccaagagcacaggtggaaaaggccggcaccacatggaatgagggcaagcgctgtgccgggaagttggatgggcagagcctgggagaaatgttttctgaatggcctggggctggcatttatctttcctttcagcaagcacctcaaatttgccatgctggctggtggaagagtttgtggtagcggaagagtgctctcccatgctctaaatttccgggctaaaactaccccatgagtgtggtccccacaggatattgtggagaaaatcacatgcagctcaatcttaagagaaatgagttcaaaaaactgccgctcagctttgatggaacaacgcttattttggaagttcgaaggggctgtcgtgtgtgtggccctgatcttcgcttgtcttgtcatcattcgtcagcgacaattggacagaaaggctctggaaaaggtccggaagcaaatcgagtccatatagctacattccacccttgtatccctcggtcttagagaccctatctcagacagtgaaagtgaaatggactgatttgcactcttggttctttggagccttgtggtggaatccccttttccccatcttcttctttcagatcattaatgagcagaataaaaagagtaaaatggtaaaaaaaaa

SEQ ID NO: 968 - DNA, 2392 bp, Homo sapiens
  SIMILAR (1949)..(1719): 1001254mologous to Homo sapiens Secreted protein 108-009-5-0- A2-FL,accession number AAY59682,Smith-Waterman Score=379.
ggggcgccgagctaattcccagtgagcagcaggcgaggcgccaccgacgcggaagactataagccccagcgggcgacgaccgaacgcccccgggaacaccgggccccgagctcggtcccgcgcccgaggatcctccacggggctagatggctgcgtcgggggcgggagcggaggtgagcgggcgctagggccgcgagcccccgccggcccttcctccagcgcccttgcggaccccagcagaaggcgctcgcctccctaactcccaaaaacatatcgatttttctcgctgtggcaacggggacgtcctgatagatcctctgctccaatacggcaactccggccttccctgccctgacctggaacctctgggaagggctgcaagaagtaagtgccgcctctgcgctccgaacggaggcaacgaaggcctgttggaagtaaggtccctcttgtttccgacaggttgcgacactttggcgctccatgcttgcgggtgccgggaggcctggcctcccccaggggccgcccacctctgctgggttgctctgtgctttcaccttaaaagctctgccaagcagaggctccccgtgcaaggaagagaagctgtcagcaagcacctcaaatttttcccatgcggggtgtggaagagtttgtggtagcagaagagtgctctccatgctctaattttccgggctaaaactaccccctgagtgtggtcccacaggatatgtagaggaaaatcacatgcagctcatctaagaagaaatgagttcaaaagcttgccgttcagcttttgatgggaacaacgctttatttttggaagtttcgaaggggctgtcgtgtgtgtggccctgatcttcgcttgtcttgtcatcatttggtcagcgacaattggacagaaaggctctggaaaaggtcccggaagcaaatcgagtccatatagctacattccacccttggaatcctgggccttagaggacccttatctcagacagtgaaaagtgaaatggactgatttgcactcttggttctttggagccttgtggtggaatccccttttccccatcttcttctttcagatcattaatgagcagaataaaaagagtaaaatggtttccttcccttctgtaacttggagcaggaagtcatgggggcagagagggaaaggaggtggttacttaaggccccaatctaccaagtcttccccaccacttctcccttgttttccccctcttctactacttatttcaaacttctgggatacaatttcagctcaaaacgtttattttctccacctcaaaacttatttcccctcaaccctatacccaaagaagaaataaaatcacagataacataacagaagtatttgaggtaccctctcatatatgcaaacaaagtgcagactaggcctcaggcagagactaaaggacatcttttggggtgtcctgaagtgatttggacccctgagggcagacacctaagtaggaatcccagtgggaagcaaagccataaggaagcccaggattccttgtgatcaggaagtgggcaggaaggggtctgttccagctcacatctcatctgcatgcagcacggacccggatgcgccacctgggggtcttggcttccctcccatcttctcaagcagtgtcccttgttgggagccatttgcatccttggctccaggtggctcccctccagtctggactctaccactttgggtcttccagattttctgttacgtccttgtgggtcaggatatttctggaagtcactccgtgaggctggtaatcctcagacccagcttctggtcgactctggaatggactgaagctgggcaggatgatgagagccagggaaaaaagaagaatcaaaacacaagtgctggtctgggcagctttgttggaagtttgagcaattagcgtctgcagctggcggagctgagctaccaaggaggatgttgtgcctctacagctcctggactatttttcagtaattcttggttctgtgcagaacaggctgtcaccctgctctccagcccatcaatgtactccttcttccgccaccgactgtcctgagctgactgcttgttacggattttcctcctgaccttcttgaggaccctctcctctgccttggtgaggggcaggtgagagggcagggaaaccccttcctgccccagcagacgcttctcctcatcggtcaggaacagggtttgacagggcagcagggttgtacagggcactggggctacggtgcctgctctgggcaggatgtgggcatgagcatcaaagggcagctcactgaccatgcaggaatcaggcaccataaatgctgcgctccactgatctagctggatggagaaaaggcctacatttggcccagtttccccctgcat

SEQ ID NO: 969 - DNA, 1349 bp, Homo sapiens
  SIMILAR (191)..(772): 411254mologous to Mus musculus putative,accession number AK020471,Smith-Waterman Score=235.
  misc_feature (1)...(1349): n = a,t,c or g
atggtgagcggcaggccacggcgcctgagggaggcggctgcgggtcggtcgcctgcgcgcgggaagcgactggggagcgacgtccgcaccccctcccccagcgccccgggcgggatgagggtctcgcacgaaggggcgggcggtgccggaatgcgcgtgcgcgcccgtgggcgccggggagggccggcctgccggtgtggctgtctctgatggtgtcatcaaggtgttcaacgacatgaaggtgcgtaagtcttcaacagccagaggaggtgaagaagcgcaagaaggcggtgctctttctgccttgagtgaggaccaagaacaacatcatcctgggaggagggcaaggagatcctggtgggccgatgtgggccagacctgtcgacgatccctacgccaccttttgtcaaagatgctgccagataaggactgccgctatagccctctatgagtgcaacctattgagaccaaggagaagcaagaaggaggatcttggtgtttatctttctggggcccccggagtctgcgccccctttagagcaaaatggatttatgcccagctcccaaggacgcccatccaagaaaggaagctggacaggggattcaagccatgaatttgccaagccaaactgcctaccgaaggaaggtcaagggaccgcttgcaccctggcaagagaagctggggggcaagtgccggtatattcccctgggagggcaaagccttttgtgagccccttctggcccccctgccttggagcatctggcagcccccaacaccttgccccttgggggtttgcaggctgcccccctttcctgcaaagacccggacgggcctgggggggatccccagcagggggaggggaaatccctttaaaccccagttgcccaaaacagaccccccccaacccccctgggaattttccttctccctccaatcccttggacgggttctggcctttccccaaactgctttttgaatcttttgattcctcttgggggtgaagcagaccaagttcccccccaggcaccccaagttgtgggggaagcctgtattttttttaacaaacatccccattccccacctgggtcctcccccttcccaatgctgccaactttttaaccgaaataagnggacttcntgtggcttgtcttgttttagttctgtgtataaaatgggaaatgtttgtgggagatgacccctcccctgtgccaggctggttcctctccgttttccccgcggtcacggctactcatggaagcaggaccagtaagggaccttcgattaaaaaaaaaaaaagacaataataaaaaggctcattaaaaaaaaaaaaaaaaaaactcgagactag

SEQ ID NO: 970 - DNA, 2185 bp, Homo sapiens
  SIMILAR (694)..(828): 671254mologous to Homo sapiens ornithine decarboxylase (EC 4.1.1.17),accession number M20372,Smith-Waterman Score=101.
  misc_feature (1)...(2185): n = a,t,c or g
gccgccgccgccgcccgccgcccctctgccagcagctccggcgccacctcgggccggcgtctccggcgggcgggagccaggcgctgacgggcgcggcgggggcggccgagcgctcctgcggctgcgactcaggctccggcgtctgcgcttccccatggggctggcctgcggcgcctgggcgctctgagattgtcactgctgttccaagggcacacgcagagggatttggaattcctggagagttgcctttgtgagaagctggaaatatttctttcaagttccatctcttaagttttccatgttgcatttcagaggaacatcaagaaatcatgaacaactttggtaatgaaanaagtttgactgccacttcctcgatggaaggttttactgccaagggacattctgggaccaagaaaaattaatgaagtttcttcttctgatgataaggatgcctttctatgtgagcagacctcgggagacattctaaagaaaacatctgaggtggttaaaagctctcccctcggtgtcacccccctttttatgcagtcaaatgtaattaatagcacagccatcgtgaagacccttgctgctaccgggacaggatttgactgtgctagcaagactgatatacagttgtgtgcagagtctcggggggtgcctccagagaggattatctatggcaaatcctttgtaaaacaagtatctcaaattaagtatgctgctaataatggagtccagatggatgactttttgatagtgaagttgagttgatgaaagtttgccagaggcacattcccaaaggcaaaagtttgggttttgcggattgcccactgatgattccaaagcagtctgtcgtctcagtgtgaaattcggtgccacgctcagaaccagcaggctccttttggaacgggcgaaagagctaaatatcgatgttgttggtgtcagcttccatgtaagaagcggctgtaccgatcctgagaccttcgtgcaggcaatctctgatgcccgctgtgtttttgacatgggggctgaggttggtttcagcatgtatctgcttgatattggcggtggctttcctggatctgaaggatgtgaaaccttaaatttgaagagatcacccggccgtaatcaacccaacctttggacaaatactttcccgtcaaactcttggaattgaaaatcataacttgaacccggcaagatactatgttgcatcaactttcaangctttgcagttaatatcatttgccaagaaaatttgtattaaaaggaaccagacgggctcctgatgaccgaagattgagtccgagttgagcagacctttaatgtattaatgtgaatgaatggcgtctatggatcatttaattgcatactctatgaccacgcacatgtaaagccccttctgcaaaaagagacctaaacccagatgaaggaggtattattcatccagcatatggggaccaacatgtgatggcctcgatcggattgttgagcgctgtgaccttgcctgaaaatgcatgtgggggattgggatgctctttgaaaacatgggcggcttacactgttggctgctgcctctaacgttccaatgcttccaagaggcccgacgatctactatgtgatgtcaggggcctgcgtggcaacctcattcagcaattccaaaacccccggctttccccccggaagtaggaggnaaccaggatgcccagcaccctgccctgtgttctgtgcctggggagagtgggatgaaacgcaccagagccagccctgtgccttccggctaagtattaaaggtggtagatagcactctggtagctggttaactgccaagtttaagctgaaattaagggatttgtggaggaccattgttacttaatttactgctagttttgaaatgtctttgtaagagtaggggtcgccatgatgcagccatatggaagaataggatatgggtccccacttatctgtgctctcctatggaaactaattgaaaaatttgttttatatgggatttttattcactcttcagacacgctactcaagagtgcccctcagctgctgaacaagcatttgtagcttgctacaatggcagaatgggccaaaagccttagtgttgtgacctgtttttaaaataaagtatcttgaaataaaaaaaaaaaaaaaaaaaaaaaaaagggcggccgct

SEQ ID NO: 971 - DNA, 935 bp, Homo sapiens
  SIMILAR (477)..(346): 431254mologous to Homo sapiens PRO2550,accession number AF130089,Smith-Waterman Score=76.
catttaccatactttattgatattatctgcttttatttttctcataatcagattatatactcttcaaggactacactgtatcttcatcttttaccccacatcctatcaaaattgtcctttagaggagaaaaaaaacaaaatattaaaatgtgctgattgaaggctgggtgtcatggctcatgcctataattgcagcactttaggaggctgaatcaggaggagcacttgagcccaggagttccagcccaccctaggcaacatggtaaaaccctgtctctacaaaaaagtatatacaaaaattagctgggtgtggtgacacttgcctgtagtcccagctactcgggaggctgaggtgggagaattacttaaggattacttaagcctgggagatcaaggctgcagtgaaccatgattgcaccactgcactccagcctgagtgacagagcaagaccctgtctctaaaaatatatataaaaagtaaaactaaagaacttcttgcctaaacctgaattaccgcaatttgctgagtgactttgagaaaaatcagactgtttagttcagtcggggatgaaaagcttgcgattgctttcccaccaagaatgggcaatagtgacggctgcaaggtacttttatttgttcatgaaagaacgacaatttttcaaaatgtaattaaacataatagaatgttttaaactactgggcactgaaactggaagaaaaaggaggctttattgaacattcccctttttcagttggttcaaagttcagcactgtggttatcattcggtgatgccagaaaccattagtagacttagacaattgctatggcagtttctaaaccagagctttttctatacactattttgcaactggagtgcaatattgtatattctgtgttaaagaaataaagtatttttatcatttattaaaaaaaa

SEQ ID NO: 972 - DNA, 889 bp, Homo sapiens
ttttcagattgtgactcaaagatgagatttttatttaaaaatcattcaaaggtgaaacacagcaacagcaatataatgaagtttaaagtccctgtcctcaatgaatgtacaatgcagttgggaacaaaaacaatgattattaaagtgctagttaagtcttatttttaaagagaccctatcttgtccaggatgcagtgctgtggctattcacagacgatcatatcacactccaccctcgaactcctgggctcaagctatcctaccacctcagcctcctgagtacgctgggactgtacataggcatgcaccactgcacctgggctcataagacttggataatttataaaataattctacagcctcttccttactcttcccctttatttattccaactggcatatgctcttttcctggtgagtgagtcgtctacagtgttttctggtggataatgcatcccgatcaaccagagaaaaaacagtgagaaaaatctgtgttctgttgcaatccctctgtgatttgtctaatacaatagatgtgggtggtacccctcgcagagaaaatagtattcgctttccttgtctccttgatacaggttacaaaatatccattgtcaagaatattcaaagaataaagtattagggagaaagtaaaatcccctgaactcccaacaaaaccacttttaacgttttggtgcccatactttcatgtatttcttgattcatggacaccccaaatatttatgtaaatcttaacatacatttttaaataaaattgtactacacaatcagtacaacatgctttggagaatagacacaagctaaaacaacaacaaaaaaagaaaacattgcatttaaaaaaaattttttttaataaaaaagttggcggccg

SEQ ID NO: 973 - DNA, 1098 bp, Homo sapiens
  SIMILAR (544)..(1017): 401254mologous to Homo sapiens ribosomal protein L26,accession number X69392,Smith-Waterman Score=166.
aaatttatttcccagtttactcccctcgctcaaactccgcgcccctctcgctccgagagacataggtctcgcgagatctttggtaaacttacagaaccggaagcagcgtgtagttctcttcccttttgcggccatcaccgaagcgggagcgggtaaggattcggcgggcaagcgggtgtaatcagcagccatccgttcttgggcatgggggcttccgaccgcggggaccccgagagtctcttgtcggccgagtagcagccaggaaggagagactgggatggttttttatctgttgctttcttaaatcaagggccgccgggccggagatggatggagggaccggggatttgggaactcgaaaacgagctgagggaagggagcctgtggaaatagactggagtctgggtagtgtcgtttcctagagaatggtctcgaagtaacttctcggtaaagtcttcacggaatttccagaccacacttgcccactgggaggcttttaggacccgagacgtgtgcaggcttttccaggttcggccaaaatgaaagtttaaccccctttgtgacttccgaccgagagcaagaatcgcacaaaggcatttcaaagcacccttcccacatttcgaaggaaagattatgtcttcccctctttccaaagagcctgagacaggatgtacaactgtgcggatccgatgcccgatcctgaaaggatgagtgaagttcaggttgtaccgtggacacctttaagggtccgccaaattggccaaagtagtccagggtttacaggaagaaatatgttatctacattgaacgggctgcagcgggaaaaggcttaatggcacaactgttccacgtagggcatttcacccccagcaagcaggtggttatcacctagggctaaaactgggaccaaagacccgcaaaaagatccctccgaaccggaaagcccaaatctcgcccaagtagggaaagggaaaaggggcaaatacaaggagagaacccattgagaagatgcaggaataaagtaacctcttgtaacaagctttgattcgaaacttgaaacgtcgacggcggccgcgattttagttatagtagtcggcg

SEQ ID NO: 974 - DNA, 532 bp, Homo sapiens
  SIMILAR (45)..(365): 981254mologous to Homo sapiens protein-tyrosine phosphatase,accession number U14603,Smith-Waterman Score=580.
ccccattacactcacacgcacgctcacactttttatttgccataatgaaccgtccagcccctgtggagatctcctatgagaacatgcgttttctgataactcacaaccctaccaatgctactctcaacaagttcacagaggaacttaagaagtatggagcggcgactttggttcgagtttgtgatgctacatatgataaagctccagttgaaaaagaaggaatccacgttctagattggccatttgatgatggagctccaccccctaatcagatagtagatgattggttaaacctgttaaaaaccaaatttcgtgaagagccaggttgctgtgttgcagtgcattgtgttgcaggattgggaagaaaaagaaggggagcgttcaattccaaacagctgctttatttggagaaataccgacctaagatgcgattacgcttcagagataccaatgggcattgctgtgttcagtagaaggaaatgtaaacgaaggctgacttgattgtgccatttagagggaactcttggtacct

SEQ ID NO: 975 - DNA, 249 bp, Homo sapiens
  SIMILAR (1)..(246): 1001254mologous to Homo sapiens protein tyrosine phosphatase,accession number L48722,Smith-Waterman Score=426.
atgaaccgtccagcccctgtggagatctcctatgagaacatgcgttttctgataactcacaaccctaccaatgctactctcaacaagttcacagaggaacttaagaagtatggagtgacgactttggttcgagtttgtgatgctacatatgataaagctccagttgaaaaagaaggaatccacgttctaaaaaagaaggggagcgttcaattccaaacagctgctttatttggagaaataccgacctaa

SEQ ID NO: 976 - DNA, 560 bp, Homo sapiens
tcccctataactgggtaagttacacttcacttcctctcctaaacttgctttttataaattacattatagttcacagacatatgtttgtgtactgagtacaatacaagataaacagtcaagaatccaaatcattctatttgaagctgctggtggccttttaaaatgtactgtctatccactaattgtccaataatggcatcctttcacaaaacacagtaacattacgatctttaaaaaccacacagtgaaagtaaatatttcatactacatattaacgtgaaataaaaatggtgaaataactctataatgccatgtcaagaagttattctttactcactagctcagctcaacatggattcaccttccttttaatcccaattaaagaatgcaaaattcaatctttctcgtcctcttcctccaaatgtttactgagataagggacaatatgtcacctcccaattataccaaaatgcagcacagccaatcttcaaacaagcatttgcagagacgtgtgcacatcatacaaacactatccaggatcaagctcctagaagaatcaa

SEQ ID NO: 977 - DNA, 447 bp, Homo sapiens
  SIMILAR (2)..(151): 481254mologous to Homo sapiens NAG13,accession number AF194537,Smith-Waterman Score=98.
  misc_feature (1)...(447): n = a,t,c or g
aaaggaagaaattataccaattctctgaaatctctttcagaatataaaagcagagggaatacttcgtatctcattcaatgaggctagaattaccctaatactaaaccaaatcagccattacaaggaaaataaaccctatagaccaatctctcatggacagacatgcagaaatccttaacaaaatatcagcaaattgaatccgataacgtatgaaaagaattatacnccatggccaagtgagatttagctaaggtatgtggggttggttcaacattagaaaacaaattaatgtaatccatcacacccatagcctaaagaagaaaaatcacatgatcatatcaataaatgcagaaaaagaatttgacaaaataagaaaacttcttaaacttaggaacatctacaaacggggcatatagttaacgtgataagtgatggtgagaaactcaa

SEQ ID NO: 978 - DNA, 2015 bp, Homo sapiens
  SIMILAR (900)..(1439): 531254mologous to Homo sapiens protein-tyrosine phosphatase,accession number U14603,Smith-Waterman Score=335.
  misc_feature (1)...(2015): n = a,t,c or g
cgcctcctcgctcccgccaccgccggacttcaatgcccagtccccagctcgccagcnagcttgatcctggatagtgtttgtatgatgtgcacacgtctctgcaaatgcttgtttgaagattggctgtgctgcattttggtataattgggaggtgacatattgtcccttatctcagtaaacatttggaggaagaggacgagaaagattgaattttgcattctttaattgggaagaaaaggaaggtgaatccatgttgagctgagctagtttttcgttggaatatacgttgcacatttatggcgattctgagtgtgagggcagacttctgccaggctcagcacatcattttcgctgacaagtgaagtttggaggttctatgtgccataattaacattgccttgaagactcctggacaccgagactggcctcagaaataagttggcttttttttttttttaattgcaagcatatttctttttaatgactcccagtaaaaattaagcatcaaggtaaaacaagtggaaaagtgacctacaatttttaaacttgtctcactagtgcctaaaatgtagtaaaaggctgctttaagttttgtattgtaagttggatttttttggagtccgaaggtattccatctgcaggaaattgagggcccaaattggaatttgggatttcaagtgggattcctaaatactttggcttatccttgaaggagaggaagcttcataaggaataaacaaagttgaatagagaaaacactggattgataataaggcaattttaagtggtccttttaatggttttcctgctgtgaaacaattttccagatttattgaatttttttttttcacctttccccatcacactcacacgcacgctcacactttttatttgccataatgaaccgtccagcccctgtggagatctcctatgaagaacatgcgttttctgataactcacaaccctaccaatgctactctcaacaagttcacagagggaacttaaggaagtatgggagtgacggactttgggttcggagtttgtggatggctacatatggataaaggctccagtttggaaaaaggagggattccacgttctaggattgggccatttggatgatgggagctccacccccttaattcagatagtaggatggattgggtttaaacctgtttaaaaaaccaaattttcgtgtaagagccacggttgctgtgttggcagtgcattgtgttggcagggttggggaaggggcaccggtgctgggttggcacttgctttggattggaatgtgggaatgaagtaacgaagatgcagttcagtttataagacaaaaaagaaggggagcgttcaattccaaacagctgctttatttggagaaataccgacctaagatgcgattacgcttcagagataccaatgggcattgctgtgttcagtagaaggaaatgtaaacgaaggctgacttgattgtgccatttagagggaactcttggtacctggaaatgtgaatctggaatattacctgtgtcatcaaagtagtgatggattcagtactcctcaaccactctcctaatgattggaacaaaagcaaacaaaaaagaaatccctctataaaatgaataaaatgtttaagaaaagagaaagagaaaaggaattaattcagtgaaggatgattttgctcctagttttggagtttgaatttctgccaggattgaattattttgaaatctcctgtctttttaaactttttcaaaataggtctctaaggaaaaccagcagaacattagcctgtgcaaaacctactgtttggggagcacactcttggcacatagatctccctgtggtgggatttttttccctttttttgtgggggagggttggtggtatatttttcccctcttttttccttcctctcctacatctcccttttcccccgatccaagttgtagatggaatagaagcccttgttgctgtagatgtgcgtgcagtctggcagccttaagcccactccg

SEQ ID NO: 979 - DNA, 1749 bp, Homo sapiens
  SIMILAR (85)..(1014): 381254mologous to Homo sapiens HSPC169,accession number AF161518,Smith-Waterman Score=336.
  misc_feature (1)...(1749): n = a,t,c or g
cggacgcgtgggtttttttttcgccggaaatcccggaagtgacagctttgggggtttgctgctgggtctgactcccgtcctgcgatgggttgctgacgggggaacaatccccaagaggcatgaacctggtgaaggggccgaagaaggttgagaaggtcgacaaagatgactgaattagtggcccaatggaactattgtactctaagttcaggaaatattaagacgaccaatagttgcctgtgaacttggcagactttataacaaagatgcccgtcattgaatttctcttggacaaatctgcagaaaaggctcttgggaagggcagcatctcacattaaaacgcattaacgaattgttgacagagctgaaagctttctgataatccctgccctgggaaggggataaagggaaacactaaaggtgacaaagcacgatgacctccaagcgggcgcgtntttcatcttcccccgttggtgggcctgggagatggaacggccgacacaggttcttgcttccttcgggtggttgcggcttgtgttgtttttcttgagcggagccttggaaagagataaaagcggaattttgccacacgtgtggggctggcctttccaggaggatgatgataatcgtgctcaatggcaccaaggaggatgtggacgtgctgaagacaaggatggaggagagaaggctgtagagcgaagttttaaaagaatatcaaagaaacccaaggcagcagagtctgtttccaaaacccagatgtcagtggaaggaagccccagggcccatcaaaagttaagaccagggaagccctgaagaagcccagcccttgattctagagagaagaaaaccaacttggctcccaaaagcacagcaatgaatgagagctcttctggaaaagctgggaaagcctccgtgtggagccacaaagaggtccatcgctgaccagtgaaaaatcggaagcctaacaaatccctctttaccactcacagcttccgccaaagcgctcccaaggagggagtctgccccactggggttcaccccacacgtcctacttgcttctgaagccccgcactgccaccggctcctgccccagaaggttgtttaagtttccacgtagggcaggttcgtttgtgcctctgagttgcgctgcttgtgtgttcttttctattagtttttgttgttcataaaaggtgttcctgggccagccttcaagctgggtgtggcccactctttgatgtgagggcgtgttcggttcccaggggggggacatggggaggggcttgcacagtggccccgaaggtccatgccttgccttcccaccctgccaggtgccatttggtccctttccccatggccccagggaaccgctgtggggctgcacctttttatgccttgccagtaacaagagactcccagagtccctcaccggtgcaagagttggcacatattaattaactaaaattcctaatgatccttgctaccagcaataaaatcaagtaggcccaagtgaaactgggctttaaaaaggatggattttaaaaacccctgtgcccactagaagcttcggaagggcctcgtccctctgctacagccctgggaggagccaggatccttgttggtctagctaaatactgttaggggagtgtgccccatctcatcattctcgaagatagcagagtcatagttgggcacccggtgattgggttcaaaaataaagactggtctgcctcttctcaaaaaaaaaaaaaa

SEQ ID NO: 980 - DNA, 467 bp, Homo sapiens
  SIMILAR (301)..(459): 621254mologous to Mus musculus putative,accession number AK007580,Smith-Waterman Score=147.
  misc_feature (1)...(467): n = a,t,c or g
tggtttannaaactgagacatttgaaagcgctgtggaattcctgccacccaggtaagaagaggccgctcttcctggggttgtttctccgtgtgacgtgtggcctttgagatcaactctcctgtaccagcgtaggccgcatgagtggggggcgggctcccgcggtcctgctcggcggagtggggcattcttcgggggtgcatcagagggagggcagagcctgaggatctaagcgaaggcttccccgggtgtaatttcctgggctgtttgtgaggagagatcgaattcgcctcctgctctcaggcctctctgctcctgtcttttgtttggatgccggcgctgctgcctgtggcctcccgccttttgttgctaccccgagtcttgctgaccatggcctctggaagccctccgacccagccctcgccggcctcggattccggctctggctacgttccgggctcggtctctg

SEQ ID NO: 981 - DNA, 361 bp, Homo sapiens
  SIMILAR (118)..(357): 811254mologous to Mus musculus putative,accession number AK003381,Smith-Waterman Score=304.
  misc_feature (1)...(361): n = a,t,c or g
atttcctgggctgtttgtnaggagagatcgaattcgcctcctgctctcaggcctctctgctcctgtcttttgtttggatgccggcgctgctgcctgtggcctcccgccttttgttgctcggtctctgcagcctttgttacttgccccaacgagaaggtcgccaaggagatcgccagggccgtggtggagaagcgcctagcagcctgcgtcaacctcatccctcagattacatccatctatgagtggaaagggaagatcgaggaagacagtgaggtgctgatgatgatttaaaaccccaagtttccttggtcccaagttttganaagatttttgttccgttntgtgcacccttacgaanggg

SEQ ID NO: 982 - DNA, 455 bp, Homo sapiens
  SIMILAR (229)..(351): 971254mologous to Homo sapiens cICK0721Q.5 (polypeptide from patented cDNA EMBL:E06811),accession number AL021366,Smith-Waterman Score=206.
gggaagccctccgacccatgccctcgccggcctcggattccggctctggctacgttccgggctcggtctctgcagcctttgttacttgccccaacgagaaggtcgccaaggagatcgccagggccgtggtggagaagcgcctagcagcctgcgtcaacctcatccctcagattacatccatctatgagtggaaagggaagatcgaggaagacagtgaggtgctgatgttctgtgcacccttacgaagtggccgaggtaattgcattgcctgtggaacatgggaactttccgtacctgcagtgggtgcgccaggtcacagagtcagtttctgactctatcacagtcctgccatgatgagccctgttcctgctcatcatgaagatccccgcgatacttcaacgccttctgacttccaggtgatgactgggcccccaataaatcccgtctttgggtca

SEQ ID NO: 983 - DNA, 432 bp, Homo sapiens
  SIMILAR (169)..(357): 1001254mologous to Homo sapiens cICK0721Q.5 (polypeptide from patented cDNA EMBL:E06811),accession number AL021366,Smith- Waterman Score=314.
tttcgtcacccaggtaagaagaggccgctcttcctggggttgtttctccgtgtgacatgtggcctttgagatcaactctcctgtaccagcgtatgccgcatgagtggggggcgggctcccgcggtcctgctcggcggagtggcctctctgctcctgtcttttgtttggatgccggcgctgctgcctgtggcctcccgccttttgttgctaccccgagtcttgctgaccatggcctctggaagccctccgacccagccctcgccggcctcggattccggctctggctacgttccgggctcggtctctgcagcctttgttacttgccccaacgagaaggtcgccaaggagatcgccaggtagggacctcgatgtgcagcgagaaaggatgatcatgaagggacagctgggggtggggcagaagagtgctgcttt

SEQ ID NO: 984 - DNA, 885 bp, Homo sapiens
  SIMILAR (531)..(881): 771254mologous to Homo sapiens brain acetylcholinesterase putative membrane anchor,accession number AF230924,Smith-Waterman Score=425.
  misc_feature (1)...(885): n = a,t,c or g
gcgctgttttctaatcacgtggctgccacccaggtaagaagaggccgctcttcctggggttgtttctccgtgtgacgtgtggcctttgagatcaactctcctgtaccagcgtaggccgcatgagtggggggcgggctcccgcggtcctgctcggcggagtggtgagtgaccggccccgccccgccccttccggtcctcgaagcctcgaccgctacccgcaccctaaatcccagaggttggccccctgaggtgtgagtgaaatgagcttttgctttattttccaagtttctctctcaccttcaggggcattcttcgggggtgcatccagagggagggcagagctgtaggatctaagcgaaggctttccccgggtgtaatttcctgggctgtttgtgaggagagatcgaattcgcctcctgctctcaggcctctctgctcctgtcttttgtttggatgccggcgctgctgcctgtggccttcccgccttttgttgctaaccccgagttttgctgaccaatggcctctggaagccctccgacccaagccctcgccggccttcggattccggcttctnggctaacgtttccggggctcgggtctctgcagcctttgttaacttggccccaacgagaaggttcgccaaggagatcgccagggccgtggtggagaagcgcctagcagcctgcgtcaacctcatccctcagattacatccatctatgagtggaaagggaagatcgaggaagacagtgaggtgctgatgatgattaaaacccaaagttccttggtcccagctttgacagattttgttcgttctgtgcacccttacgaagtggccgaggtaattggcattgcctgtggaacagggaactttccgtaccttggca

SEQ ID NO: 985 - DNA, 935 bp, Homo sapiens
  SIMILAR (289)..(801): 431254mologous to Homo sapiens cICK0721Q.5 (polypeptide from patented cDNA EMBL:E06811),accession number AL021366,Smith-Waterman Score=193.
  misc_feature (1)...(935): n = a,t,c or g
acatggtgcgcgctgttttctaatcacgtggctgccacccaggtaagaagaggccgctcttcctggggttgtttctccgtgtgacgtgtggcctttgagatcaactctcctgtaccagcgtaggccgcatgagtggggggcgggctcccgcggtcctgctcggcggagtggtgagtgaccggccccgccccgccccttccggtcctcgaagcctcgaccgctacccgcaccctaaatcccagaggttgggccccctgaggtgcctctctgctcctgtcttttgtttggatgccggcgctgctgcctgtggggcttcccgcctttttgtttgctaaccccgagtctttgttgaccatgggcctctgggaagccctccngacccaagccctcgcccggcctcggattccggctctggctaacgttccgggctcggtctctgcaagcctttgttactttgccccaacgagaaaggttcgccaagggagatcgccaggggccgtgggtgggagaaggcgcttagcaagcctgcgttcaaccttcatcccctcagattaccatcccatctatgaagtggaaaagggaaagattcgagggaagacagttgaggttgctggatggatggatttaaaacccaaaagtttccttgggttcccagcttttggacagattttgtttcgttctgtggcaccttacgaagtgggccgaggtaattggcattgcctgtggaacagggggaactttccgtacctgcagtgggtgcgccaggtcacagagtcagtttctgactctatcacaattcttgccatgatgagccctgttcctgctcatcatgaagatccccgcgatacttcaaaggctttcttgactttccaggtgatgacttgggcccccaataaatcccgtctttgggtcaaaaaaaaaaaaaaaagtcgacg

SEQ ID NO: 986 - DNA, 625 bp, Homo sapiens
  SIMILAR (600)..(571): 801254mologous to Homo sapiens PRO1902,accession number AF118082,Smith-Waterman Score=49.
cccacgcgtccgcagaaaaggagcactgtgcatacttaccttggaacaacatgtgcaactgggaaagccaggacacatggtcttactagttggtgtaaaatttgccaaagtccacaaaattagcaagtgacacagcagagctttaaattataatattttagaacacacactcttaatagttataatgatactctcttggtagtgggttatgagtttggttaatgactagacctctctgagtggtatgttcctcgtggatacaaatggtgttgctgagaaattgattactaaagcacttaattaataatatgatggttagtaaaacaacatggctgggggtgttggctcacacctgtaatccaagcagaattttttgggaggcagaggtgggaggatctcttgaggccaggagtttgaagccagtttgggcaacatgggaagaccctgtctctacaaaaatagacaaaaaaccaattagctgggcatggtgatgtgtgcctgtagtcccggctaactacaaggctgaggtgagatgatctcctgagctagggaggttgaggctgcagtgagcccatgattatgccactgcactccagcctctgggtgacagagcaagacctattaa

SEQ ID NO: 987 - DNA, 1401 bp, Homo sapiens
  SIMILAR (519)..(241): 641254mologous to Homo sapiens Human secreted protein encoded by gene 44 clone HTDAD22,accession number AAY02693,Smith-Waterman Score=306.
cctagaatacatgatgttttatgcagctgaacaggacaaccctgaaaagacaagaattatggtaataccaaagtgactaaggttgtcttgattccccgcccccaccacaattatgaatcaaaagatggagtctttttttttttttttttaaggtaaataccctctttagctgagtccaagactttggatattagattactgtacctaaaaagagtaaaatggtggccaggcggtggctcacgcctgcaatcccagcactttgggaggccaatggagggtggatcatctgaggtcaggagttcgagaccagcctggccaacgtggtgaaaccccatctctactaaaaatacaaaaattagccgggcgtggtggtgcacgcttgtggtcccagctactcaggaggctgaggcaggagaatcgcttgaacctaggaggtggaggttgcagtgagccaagatggcacccactgcattcctgcctggggcaacaagaaagagtaaaatggtaactatgcacaaaggatgggggaaaggtggctcacagggcttaaacatcagaggaatggagaggacaggacagtgagggaattatctggaaggtaggtaactggattgagaaccacaaaaagcatgtagatttaagcagattacgagtcattttaaacagctgtttcaaagtgagagtaaaaacaggctggagaaaatcttgggtaatattagagtaacatagtctaggataggaatccatcagttatggagatcagaggtaagatatagtcagggaaattaggattcatgcttgaagagtaatagaaaaacctaagtgaaacaggttattggaattttctttatgaagaataaaagtggaagaactgatagtctggaaaggtgaagtaatctggagtaggcagctacaaaaggtataaaatttgtggagaaggcaaaaattggggcagaaaatattaaataacaagggagtactgcagtcctctggtgggaggtagatcataaagaatctgtagaaccatttacttttcctcacagtcaactgctcttacacccagagcagtagctgtcaagtcaattttattgaaaatacgctggacttggacatcctgagtcaagctgccatcacctaaagggcctggatttaaaaggaattttcaagattattgttaacttctgggttaagtgtttagggaaaaaaatgttaaatctacttttcttatacatgattggtgtgcttagttttttatcaatttgacactacagtccaaatttgcttctgatcacactagaatagttttaccaatgttcattatttttcaacttcctttattaagaattaaggctggttgggcgcagtggcgaatgccaccgaactggactagtggtctacaat

SEQ ID NO: 988 - DNA, 363 bp, Homo sapiens
agagaaaagagacacagacccaggcctggctcaacatgctactaactaccagctctctgaagtgtcactgggaacaataacaaactccatgcgttttgctacatccccggaagaggtaaggacttgagtccacacatggatgctttcaagtccttgaggcccacagcctggtgtgtttcacgcacagataagggggtgcccatttctttctccctagagatagccagttccaagtcttttcactgttttattttgatttgctttgggtatttaccatactttttttttttcttgaggcggagtatcactttgtcgccaggctggagtgcagtggcttgatctcggctcactgcaacctctgtc

SEQ ID NO: 989 - DNA, 359 bp, Homo sapiens
cacatccatgctgggatgcacagttcttttcctaaggattgtgtttactcctgactgcaacgtcttggccactgtttggagcagtttggtctgaaggtcattaaggatctgcttgcatcttgtatcatgtccttcgttacagactgtaaagcatgttataatacaggtatgcttttttactctgattattgataatttgtatattatttctaatattattgcttctttttatgttctctctttttttctatctgtttattaatgtattttaatatttttttctttttaattttatgtttgattgttatatattattactatcattttattttattattttatatcattacttttgattt

SEQ ID NO: 990 - DNA, 782 bp, Homo sapiens
  SIMILAR (743)..(63): 451254mologous to Homo sapiens HCCA2,accession number AB028173,Smith-Waterman Score=349.
tttttttttttttttttgacctgagatgaattctttttattacgagtgaacagatggaactaaggtaagcgggtctcagccttccgctggtgcagcatctccacgcagggcctcagcacacgtcctggccttgcctgaggactgcaccatgggtgttccttgggcatggaggaggcagcaggaaggggtgacaggagcaggagcaggtgcagggcacctcagcaccacaggcctcccccacctttgagctgccaacagccaagactcctgggcgaggccgggagaggaggggtgagagggaagcacgggtctctgtgaaagcaagccccaccgcccagaggcagagcagagaccccaggtcttgcaaatcacaccctccccccacgagttcctcctttgaaggccagcagcacccgagggaggggcaggggctgcacggaggaccaggagaaaagggaaaaccccacagaagaaaactcaaagcatcagtcccatgcgtgtctgctgaacgagtgaatgggcccaaaggctcttctctacaaacggcacgcatccatccgacagggggccacaggaaaccgaccggggccgtctgcgtctgtgcctgtgcagcccacaccagtgcagcccggggccctctcagacctcaccacactgcgtgcccagcacatgtgtgcacacgcagatgcaggagagaacacacacccccgtctctttgcacacgtgtgcccctgtccggcccggggggctcatctctccttcacgtggttctgtctcgtgcc

SEQ ID NO: 991 - DNA, 1881 bp, Homo sapiens
  SIMILAR (367)..(1284): 911254mologous to Homo sapiens hnRNP B1 protein,accession number M29064,Smith-Waterman Score=1607.
atggtgtctcaagcgcactgcgctacactgcacgcgcctacccccgcggcggccacgttaactggcggtcgccgcagcctcgggacagccggccgcgcgccgccaggcctcgggacgcgggaccacgcgcctgctcccggaagacgcgttagtgggggggaaggttctagaaaagcggcggcagcggctctagcggcagtagcagcagcgccgggtcccgtgcggaggtgctcctcgcagagttgtttctcgagcagcggcagttctcactacagcgccaggacgagtccggttcgtgttcgtccgcggagatctctctcatctcgctcggctgcgggaaatcgggctgaagcgactgagtccgcgatggagaaaactttagaaactgttcctttggagaggaaaaagagagaaaaggaacagttccgtaagctctttattggtggcttaagctttgaaaccacagaagaaagtttgaggaactactacgaacaatggggaaagcttacagactgtgtggtaatgagggatcctgcaagcaaaagatcaagaggatttggttttgtaactttttcatccatggctgaggttgatgctgccatggctgcaagacctcattcaattgatgggagagtagttgagccaaaacgtgctgtagcaagagaggaatctggaaaaccaggggctcatgtaactgtgaagaagctgtttgttggcggaattaaagaagatactgaggaacatcaccttagagattactttgaggaatatggaaaaattgataccattgagataattactgataggcagtctggaaagaaaagaggctttggctttgttacttttgatgaccatgatcctgtggataaaatcgtattgcagaaataccataccatcaatggtcataatgcagaagtaagaaaggctttgtctagacaagaaatgcaggaagttcagagttctaggagtggaagaggagatggatatggcagtggacgtggatttggggatggctataatgggtatggaggaggacctggaggtggcaattttggaggtagccccggttatggaggaggaagaggaggatatggtggtggaggacctggatatggcaaccagggtgggggctacggaggtggttatgacaactatggaggaggaaattatggaagtggaaattacaatgattttggaaattataaccagcaaccttctaactacggtccaatgaagagtggaaactttggtggtagcaggaacatggggggaccatatggtggagctgaggcaagccaagtgatcattaataaagcttttcttggttccttcagtggtgttggtagtaaaatgcaaaaaatgggaaaaaaacagaatggaaagagtaaaaaagttgaagaggcagagcctgaagaatttgtcgtggaaaaagtactagatcgacgtgtagtgaatgggaaagtggaatatttcctgaagtggaagggatttacagatgctgacaatacttgggaacctgaagaaaatttagattgtccagaattgattgaagcgtttcttaactctcagaaagctggcaaagaaaaagatggtacaaaaagaaaatctttatctgacagtgaatctgatgacagcaaatcaaagaagaaaagagatgctgctgacaaaccaagaggatttgccagaggtcttgatcctgaaagaataattggtgccacagacagcagtggagaattgatgtttctcatgaaatggaaagattcagatgaggcagacttggtgctggcgaaagaggcaaatatgaagtgtcctcaaattgtaattgctttttatgaagagagactaacttggcattcttgtccagaagatgaagctcaataa

SEQ ID NO: 992 - DNA, 557 bp, Homo sapiens
cccctccccctccatgtgaagatttgggtgcttaacatatcatttttttccctgccggaattttagcattgatatgaaccatggacaagtatattctgctgccacaaagactgtaaagtgcttcatttcaacagctgaggcaagccaagtgatcattaataaagcttttcttggttccttcagtggtgttggtagtaaaatggtaggtaaaagttaggctgcaagttcaataaatcatgagatttcccatcgttacacccttgtgtattcacatttcttggatcaaacattttgagtgaactaggggtttttattaaagacatttgttgtatttatggttgtaactgtacatgcttatcaggatgagactgaaagaaggtagggcaaaaatggttgaatctattttcagatagtagttcatacttgagtgaagtgtcttgtctgcattatgaagcctggtatgtatccagtactaaataggtgggttaaatgtggtaattctagttcagtgtcttaccctgaagagaaagttgtaggttggctgttgaaattcattc

SEQ ID NO: 993 - DNA, 602 bp, Homo sapiens
  SIMILAR (3)..(176): 1001254mologous to Homo sapiens hnRNP A2 protein,accession number M29065,Smith-Waterman Score=337.
  misc_feature (1)...(602): n = a,t,c or g
atggaagtggaaattacaatgattttggaaattataaccagcaaccttctaactacggtccaatgaagagtggaaactttggtggtagcaggaacatggggggaccatatggtggaggaaactatggtccaggaggcagtggaggaagtgggggttatggtgggaggagccgatactgagcttcttcctatttgccatggcttcactgtataaataggagaggatgagagcccagaggtaacagaacagcttcaggttatcgaaataacaatgttaaggaaactcttatctcagtcatgcataaatatgcagtgatatggcagaccgacaccagacgcacgantgcacgagacgccacttttgtgaatggattggattatttaataacattaccttactgtggatggaaggattgtaaaaaaaaatgccctttgagacagtttccttagccttttaattgttgtttctttctagtggtctttgtaagagtgtagaagcattccctcccttgataatgttaaatttgtaagtttcaggtgacatgtgaacctttttaagattttctcaagttttgatagctattagcaggatctggtgtaata

SEQ ID NO: 994 - DNA, 2163 bp, Homo sapiens
  SIMILAR (1088)..(1297): 951254mologous to Homo sapiens c-fos protein,accession number K00650,Smith-Waterman Score=350.
aaccgcatctgcagcgagcaactgagaagccaagactgagccggcggccgcggcgcagcgaacgagcagtgaccgtgctcctacccagctctgcttcacagcgcccacctgtctccgcccctcggcccctcgcccggctttgcctaaccgccacgatgatgttctcgggcttcaacgcagactacgaggcgtcatcctcccgctgcagcagcgcgtccccggccggggatagcctctcttactaccactcacccgcagactccttctccagcatgggctcgcctgtcaacgcgcaggacttctgcacggacctggccgtctccagtgccaacttcattcccacggtcactgccatctcgaccagtccggacctgcagtggctggtgcagcccgccctcgtctcctctgtggccccatcgcagaccagagcccctcaccctttcggagtccccgccccctccgctggggcttactccagggctggcgttgtgaagaccatgacaggaggccgagcgcagagcattggcaggaggggcaaggtggaacagttatctccagaagaagaagagaaaaggagaatccgaagggaaaggaataagatggctgcagccaaatgccgcaaccggaggagggagctgactgatacactccaagcggagacagaccaactagaagatgagaagtctgctttgcagaccgagattgccaacctgctgaaggagaaggaaaaactagagttcatcctggcagctcaccgacctgcctgcaagatccctgatgacctgggcttcccagaagagatgtctgtggcttcccttgatctgactgggggcctgccagaggttgccaccccggagtctgaggaggccttcaccctgcctctcctcaatgaccctgagcccaagccctcagtggaacctgtcaagagcatcagcagcatggagctgaagaccgagccctttgatgacttcctgttcccagcatcatccaggcccagtggctctgagacagcccgctccgtgccagacatggacctatctgggtccttctatgcagcagactgggagcctctgcacagttttttcctttgggatggggcccatgggccacagagctggagcccctgtgcactccggaggtcacctgtactcccagctgcactgcttacacgtcttccttcgtcttcacctaccccgaggctgactccttccccagctgtgcagctgcccaccggaagggcagcagcagcaatgagccttcctctgactcgctcagctcacccacgctgctggccctgtgagggggcagggaaggggaggcagccggccccccccaaggccaccggcccgggctgggtgctttccacagaggagccccccctccttcctagaagggttcctgtagacctagggagggccttatcctgtgcgtgaaacacaccagggctggtgggccttcaaggacttgaaagcatccatgtgtgggacttcaagtccttaacctctttccggagatgtagcaaaacgcatggagttgtgtattgttcccagttgacacttcagaagagctggtagttaataagcctgttgagccaaggctggggttggtgtctcttttctccttctcccttagttcttctcatagcatttaactaatctattcgggttcattaattggaattaacctggtcgctggatattttcaaattgtatctaagtgcagctgattttatacaataactactgtgttgcctgggcaatagtgtgttcctgattaggaaatggaccaatattattactaaggaaaaggatcacggactttatttttcgggagataagaattaaagaggccaatacccaggtaactgtaagttttttctgtcaacagcaatggttcattgtaatgttactgatcatgcattgttgaggtggtctgaaatgttctgacattaacaggttttccatgaaaaccgttttattgtggtttttaatttatttattaaggatgggattctcagatatttatatttttattttattattttctaccttggaggtcttttggacatgtgggaaagtgaatttgaatggaaaaatttaaggcattgtttggcttattgttgccaggacattgtcaataaaagcatttaagttgaatgcgaaa

SEQ ID NO: 995 - DNA, 2662 bp, Homo sapiens
  SIMILAR (854)..(1522): 861254mologous to Homo sapiens hnRNP B1 protein,accession number M29064,Smith-Waterman Score=1146.
atgactatgaactttgtcgcagacagtcatactggccggaatcctctagcctcagcggctggcgccaaaaccggactccgcccacttcctcgcccctgcggtgcgagggtgtggaatcctccagacgctgggggagggggagttgggagcttaaaaactagtacccctttgggaccactttcagcagcgaactctcctgtacaccaggggtcagttccacagacgcgggccagggggggcgggaccctattccaagaggtagtaactagcaggactctagccttccgcaattcattgagcgcatttacggaagtaacgtcgggtactgtctctggccgcaagggtgggaggagtacgcatttggccggaagacgcgttagtgggggggaaggttctagaaaagcggcggcagcggctctagcggcagtagcagcagcgccgggtcccgtgcggaggtgctcctcgcagagttgtttctcgagcagcggcagttctcactacagcgccaggacgagtccggttcgtgttcgtccgcggagatctctctcatctcgctcggctgcgggaaatcgggctgaagcgactgagtccgcgatggagaaaactttagaaactgttcctttggagaggaaaaagagagaaaaggaacagttccgtaagctctttattggtggcttaagctttgaaaccacagaagaaagtttgaggaactactacgaacaatggggaaagcttacagactgtgttggtaatgagggatcttgcaagccaaaagatcaagaggattttgttttgtaactttttccatccatgggcttgaggttgatgctgccattgcttccaagacctcatttcaattaatggggaagtagttgagcaaaaacgtgctgtagcaagagaggaatctggaaaaccaggggctcatgtaactgtgaagaaactgtttgttggcggaattaaaaaaaatactgaggaacatcaccttacagattactttgaggaatatggaaaaattgataccattgagataattactgataggcagtctggaaagaaaagaggctttggctttgttacttttgatgaccatgatcctgtggataaaatcgtattgcagaaataccataccatcaatggtcataatgcagaagtaagaaaggctttgtctagacaagaaatgcaggaagttcagagttctaggagtggaagaggagatggatatggcagtggacgtggatttggggatggctataatgggtatggaggaggacctggaggtggcaattttggaggtagccccggttatggaggaggaagaggaggatatggtggtggaggacctggatatggcaaccagggtgggggctacggaggtggttatgacaactatggaggaggaaattatggaagtggaaattacaatgattttggaaattataaccagcaaccttctaactacggtccaatgaagagtggaaactttggtggtagcaggaacatggggggaccatatggtggaggaatatggaaaaacacaagcataactgagagaaaaaaatccagaaagctggatttaatacaaagtaaaaaaggcagccggacaaaggaagctcctcagcctccagtcgcctctctgtgcatgcacctcggtcactggtctcgactaatggtttctccgggagcccagttaacagggaaaaattcgcatggcctctcggtttcttcggtccgaaaatccaacgttggtccaagaaggctctgtgcggcaatgaaggccactggtccagacaatgcccaaagccaggtaagcccaccaggccatgccccctctgcggaggaccccactggaagtcggactgtgagcagcccctgcacggaccgcccccatcccttcctgagctggcctacttggatctcattggccttgctgctgaagactgacggtgccctggaacggatgccccagcaactaccatcgcttcatccaagccaaggtacccaatccatccacccagacccctccagtacttctagctttcttctaccctttcaacctcccaccctaaaacgtgcagcctttccttgtcctccatccatagttaaccctgctgtttgggatacttccacaccctcagtcgcagaacaccatacccccatccgcattacccttaaagagcccacccagttcctatcacagaagcagtatcccatcccccaagcagctctcgtaggcctacagcctatcatttctcacctcctcgccagtcacctactccgcccaacagactctccttttaacacaccaattctacctgttaaaaagccaaatggaacttatcgtttagtccaggacctcaggctcattaaccaagctgtactcccacgccacgcggggctgggtcgagacttgggctcccggagggcggcgcgtggtcccgcgtccgcgagcgtggcggcgcgcggccggctgtcccgaggctgcggcgaccgcccagttaacgtggccgccgcggggcaaaaaatgggaaaaaaacagaatggaaagagtaaaaaagttgaagaggcagagcctgaagaatttgtcgtggaaaaagtactagatcgacgtgtagtgaatgggaaagtggaatatttcctgaagtggaagggatttacagagtaa

SEQ ID NO: 996 - DNA, 1489 bp, Homo sapiens
  SIMILAR (984)..(1487): 831254mologous to Homo sapiens hnRNP B1 protein,accession number M29064,Smith-Waterman Score=713.
ggatacaaaaagtatttattttataaactttatatttaaaatagaattgtaatctgtctactcacaaaacctaatttaaaacatgatacatttatctctctagccaatttgatgttaactgttttaacaaacaacactcattttgtaaattgttttaatatcaagaacctcaactaaatgtttgttttatcagaaaacatttccccttttattttaaagagtgctttttaaatgaaggcaccaacaagaactactttcagatggtacagaatttcttatttcttgaagactctgtggttgaccacttcttcattagttacctgcagcaagacaccttccattttactaccaacaccacttgaaggaaccaagaaaagctttattgaatgatcacttggcttgcctcagctgttgaaattgaagcacttttacaggtctttggtggcagcaggactatacttgtccatgggttcataatcaatgccatggcaaataggaagaagctcagtatcggctcctcccaccataacccccacttcctccactgcctcctggaccatagtttcctccaccatatggtccccccatgttcctgctaccaccaaagtttccactcttcattggaccgtagttagaaggttgctggttataatttccaaaatcattgtaatttccacttccataatttcctcctccatagttgtcataaccacctccgtagcccccaccctggttgccatatccaggtcctccaccaccatatcctcctcttcctcctccataaccggggctacctccaaaattgccacctccaggagtagcagcagcgccgggtcccgtgcggaggtgctcctcgcagagttgtttctcgagcagcggcagttctcactacagcgccaggacgagtccggttcgtgttcgtccgcggagatctctctcatctcgctcggctgcgggaaatcgggctgaagcgactgagtccgcgatggagagagaaaaagaaacagttccgtaagctctttattggtggcttaagctttgaaaccacagaagaaagtttgaggaactactacgaacaatggggaaagcttacagactgtgtggtaatgagggatcctgcaagcaaaagatcaagaggatttggttttgtaactttttcatccatggctgaggttgatgctgccatggctgcaagacctcattcaattgatgggagagtagttgagccaaaacgtgctgtagcaagagaggaatctggaaaaccaggggctcatgtaactgtgaagaagctgtttgttggcggaattaaagaagatactgaggaacatcaccttagagattactttgaggaatatggaaaaattgataccattgggataaatactggatgggcagctggaaagaaaaaagctttggctttgttacttttgatgaccatgatcccgtggattaaattggatttgaggaaataccataccattaatgggcg

SEQ ID NO: 997 - DNA, 1943 bp, Homo sapiens
  SIMILAR (161)..(703): 471254mologous to Mus musculus putative,accession number AK002910,Smith-Waterman Score=306.
gcggccccgcgcgcagctcccggctccctcccccttcggatgtggcttgagctgtaggcgcggagggccggagacgctgcagacccgcgacccggagcagctcggaggcggttgaataatagctcttcaagtctgcaataaaaaatggcctccaacatgaactacattgcagaaaatgggaaaaaaaacagaatgggatagagtaaaaaagttcaagcaggcagagacctgtagaatctggcgtggaaaaagtactagatcgacgtgtaagtgaatgggaaagtggaaatatttcctgaagtggaagggatttacagatgctgacaatacttgggaacctgaaggaaaatttaggattgtccagaattggattgaagccgtttcttaaacttctccaggaaagctgggcaaagaaaaagatgggtaccaaaaagaaaatctttatctgaccagtgaatctgatgacagccaaattcatagaagaaaaagagatgctgctgaccaacccaaagaggattttgccagaggttcttgatccttaaaagaaataattgggtgcccacagaccagccagtggagaatttgatgtttcttcatgaaatggaaagattccagatgaggcagacttggtgctgggcgaaagaggcaaatatgaagtgtcctccaaattgtaattgctttttatgaagagaagcctacctgggcattcttgtccgagaagatgaagctcaataattgttcacattgttcttttatatatatttatatatatatatatataaaaattgggtcttagattttgatttactagtgtgacaaaataactacatcctaatgaaaatcaagtttgatatgtttgttttgaaagtagcgttggaagagttgttggtgggttttttgcatccatagcactggttactttgaacaaataaataaaagctttctgtagttgcttcctttatcagaaaagaacatttgatacccatggtatatcatttcctcttcattaaagaacagcttttctaaatgttgggggaaatgtccatagtcattactcagtcaaaacttgtgttctcatgagcctaaggaccattctagatttattacgtgttttttgtgtgtgtgtgtgtgtgtgtgtgtgtgtgtgtatccataaaatgcatatgtaaatttttttttgtttttaagcattcacccaaacaaaaaattcactggtaaacccatgtttctgagatgccattattccaagcaaaataagagataatcccttcaagttaaattgaaaattttcctgaaaccatacatttcaagtgaaataagtaattctagataggacaatttaaattggataattttaaagtgtctataattgccagtggtttatttgcaaaattccctaaaaggggaaaatttttatccactgcccatcaacagcaggtttcctcatcccagatggaggaaacctggacaaatgcctagtgtgtttttaactagctaaaccaaaactaaagttaaaatgaaccatttaaaagttttccctagcggggcccattcccttaagcaaaaatgttgggaatcccctgttgctacgattgacttaaaaggtcatgatgaatggaatatgtaagaccttggctcatagaaaccataatcagatggttagaggtgttggcagtttaggacctgctggtcataaatgtgtgaacaaccttttggtaaccttaacctattggacctggcatgtttttttctttacccccaattcattacgatggaggctcaaatcttgagtttgctttactggttcagcaaaagcccaggaagaacaactttgtagtaatcaaaatgttatccaactggtatattgtttactttattgtaaatactggtgaacagtggttaataaatagttttatattcctttatgcaaaaaaaaaaaaaaa

SEQ ID NO: 998 - DNA, 1285 bp, Homo sapiens
  SIMILAR (1175)..(1279): 681254mologous to Homo sapiens beta glucuronidase isoform d,accession number AF084256,Smith-Waterman Score=117.
tttttttttttttttcccattcaactccagaaggcttatttattgaaagaatacaatgatgtttacaaggatgcatttcacgtagccttaaaaggcttgggtatccataaagtgcatggttcatggctgttgggacttaagaaagccttctggtcaatgagccaccacatatgtcctcgggctccctccctgtcaatggaagatgtgatgagtttcagagtggtggctggatctaggcccaagcaccaaacacaaaccagtactctcctttgggtcttctgggaactaaggttttataaacttccgtaacagtggggggcagcactcagttgggttacaattcatgcccattccctgaaagtaagtccactatggggggatcccccaaaccaacccaggtaggccattaattgaggttccctgacagggcatccctaggcccaatcagtagggggaggggtctgagtagaattaccccattggtcaaactatggtatcagataataggaagcacagcccttggcattgtgtgtgagctaatcatgggtgcaccataaacaaggtgttttggatggtcagcatctcaggaagggcagatctgccattgaatattccattttgcatcacagaggagagactaattgagctacacatactacatttcagcccccatgcacaattttttcccctgcaaagaatgaagaatacttggggtgcttcttcattccatcccatgatgagagaaaggcaattgaatcctgctaatgtggcatgcaaaggaatcccagtaggaaaggttcaccatcaattccgacccaatatcttgccccatgattcatatttagggctgggaaaaatttatctacctttgggaggcagcccttgtgtaaaaaggaaaccaatgtcccagttgtggcccccaaaattggtcctgccatggtccaatgtccaaacaacacccaacaaaaggttcctggaaagttcccttttaggaataagccccatgggaagtccatttaggggatggaagcaggcccactgaagcttagctgatgctttactaatagaaaagcattatacaactaaaataaattgatgtgtgtgtgtgtcttgctctgttgctcaggctggaatgcagtagtgtgatctcagctcactgcagtctctgctcccgggttccagtgatcctcccacctcagcctcctgagtagctgggactaccactgcatgccaccatgcccagctaatttttggattttttttttttttaaagagatggggtttc

SEQ ID NO: 999 - DNA, 532 bp, Homo sapiens
  SIMILAR (154)..(450): 951254mologous to Homo sapiens proteasome inhibitor hPI31 subunit,accession number D88378,Smith-Waterman Score=502.
gtccccgggcgtctccattttggtctcaggtgtggactcggcaagaaccagcgcaagagggaagcggagttatagctaccccggccgcggagccggctcactgcactacccccgcccccttctttcctccagacgccgaagtcgcgggcgctcatggcgggcctggaggtactgttcgcatcggcagcgccggccatcacctgcaggcaggacgcgctcgtctgcttcttgcattgggaagtggtgacacacggttactgcggcttgggtgtcggtgaccagccgggtcccaatgataagaagtcagaactgctgccagctgggtggaacaacaataaagacctgtatgtcctccggtatgagtataaggatgggtccagaaagctccttgtgaaagccatcaccgtggagagcagcatgatcctcaatgtgctggacctacaagaacagtgaggagcttcggtctcgtattgtgtctggaatcatcacacctatccatgagcagtgggaaaaggctaatgtaagcagtccc

SEQ ID NO: 1000 - DNA, 3365 bp, Homo sapiens
  SIMILAR (160)..(987): 481254mologous to Homo sapiens dJ545L17.3 (proteasome (prosome, macropain) inhibitor subunit 1 (PI31)),accession number AL031665,Smith-Waterman Score=505.
  misc_feature (1)...(3365): n = a,t,c or g
ttcgtgtccccgggcgtctccattttggtctcaggtgtggactcggcaagaaccagggcaagagggtagcaaaggtatagctaccccggccgcggagccgctacanctgcactacccccgcccccttctttcctccatacgccgaagtcgcgggcgctcatggcgggcctggaggtactgttcgcatcggcagcgccggccatcacctgcaggcaggacgcgctcgtctgcttcttggcattgggaagtggtgacacacggttacttcggcttgggtgtcggtgaccagccgggttcccaatgataagaagtcagaactgctgccagctgggtgggaacaacaataaagacctgtatgtcctccggtatgagtattaaggatggggtccagaaagcttccttgttgaaagccattcaccgtgggagagcagcattgattcctcaatgttgctgggaattatgggttcacagcaaagttggcagatttgacccttgaacttgggatgattattttcgatggcagaacacctgggtgacttccacaggacctacaagaacagtgaggagcttcggtctcgtattggggcttggaattctcaacacctatccatgagcagtgggaaaaggctaatgtaagcagtccccaccgggagttcccccctgctaccgccagagaggtggacccactccggattcctccacaccacccacacaccagtcggcagcctccgctggtgtgatcccctgggcccgtttgttgtcgggggagaagacttagacccttttgggcctcggagagttgggcatgaatgtgggatcccctgagatctggtctcccaaagagcatttaatgaccccttcctcaggcctcccgaaccgactttcctccagggcgctgtgccccagggagctggctttgacccctttggacccattgggaaccagcccacccggaacctaacccagaaccatctccccccgccggggctatgatgacatgtacctgtgaaaggcccttcaaagaatgttaacatcccccaggcttccctccattctccctggagctggccaccgctgtccccccatcaagcaacccatgttcttgcaggctgggggcaagggattctgcctcatgtgtttgcagaaccggctgggatagcctccccaccccttatcagagccaagacaccgtgttgaggctctccacctaggctgcagatagctcccaaagagaaaacaggtgggtttctttcaccatcagctcctcccctttcaccaccagctcctctccactttcccaagggagactccggcaaccttcagcaacatatatcctcgaccagatggcagtgctataagaacagaacgcattttggatgttattattaagaaccaaatgtcaatacagaattcatgttgccggtttcccacttttttttttacattaatgcatagctgcttccatttatgagactttagagtttgagtttctgtagggctgaatgactctttttcctgcccagggcccattcttgcttctcaggcaccttccgtttattaattgccattgctcctgacatcactaagatgggtccccttctggctgcatgaatggaaatgagtgactggaaatcccataggccacaaggaatgactttcacaaggggcagggaacattgtgggaaagactgcatcattctggatgaggcaaaatcctcccgctattcctgtctggggccagtttttgtagggtccatcttgtggcatggggcagcagtagtcaaaaagccaaggaaaaaacagagcagacctgaaggctaatcttatttttgccactaacttagtgaatgaccctaagcaagttccttctcctcttagggccttgtgcaaagccctatgaaattggaggtggctttcctgctctaaagcattttgaatgtctcattctgtgtttggtaacccctataaactggggggcagaggaaaagaatgatgggttcaagggccatactttcccttgaacccttgtgtgggttcttgccctaaccgctgtggttttttgggaccccatggggccccagacagagcacaggagcatgggctgcctctgagtgtggtgttgaacttcgggaggagcagggagccctgcaccttgtgtcctggcccacctgacctttggtgttctccggatccttttcagcccgaggcctgacagacgcgggcagtgatgagccctgttctggagtggaaagagcacgatagagcaccaggctaagaggcacgagatcaaggcggtagtcacttccgctctgcagctagcatttcaaccatatgtggatcctttcatttctcagctccctggattccttcccctaaattaggacctattatttacctgtaggtaagcaagctactgtagctcttctgaggtatctgccaggctgttttctgtagcctcagattgcctatctgcttagcctgagaacaggtagattaaaactaaactgatgcctaggcccagggtcagtctcagatgggaagctggggcctggggtnggggaggctagcatgcgtgggctccctgggggtattttcttgttcagttccccatgggcaagcagttgattttagttaaaacacccccagagttcagggggaaggcccaacccacctttttaaacctttaggaacattttctgctttggagaaagacccagagtagatggcggaggtgcagattcgatcattactcataacctttggagagctggcaaatgggaggagtgttagtcttttgttttggaattggaccattcttgcaaccaaaaggacttagagcagtttgctcataaagacagtcctttattataaaaggaagtatttaaaggatgatagagacccatccagatagaagccagggaaggtagaataacttttaggccccttgatgtggaggaaaagataaaatttaaaccaataaatttgcccacttagattttctagcaagcaaaagtccggaaaagatagttatatacaaaattcctgttttcctgaaaacaaaattgtgattcacccttcagaattggcccatttttttttgtgagtttccttgcatcaaggacactggagaaacacagtccattgtcttaggtgttctatgggaggaagtgaatagagccttttaggaacttcctggtcaagcttatggtgcttattttgatctgggccactttccctccttccagtcctggagtaatcctcaaggagcaagttggagtgtttccaggtggtatattttgtagaacccaaaagattggagccttaacaataaacatcagcactaagtgaaaaaaaaaaaaaaaaaa

SEQ ID NO: 1001 - DNA, 1310 bp, Homo sapiens
  SIMILAR (303)..(989): 481254mologous to Homo sapiens RIT (Ric-related gene expressed in many tissues),accession number Y07566,Smith-Waterman Score=348.
  misc_feature (1)...(1310): n = a,t,c or g
tggtaatgcagtagttttgtaattctatttctcatagcatgctcaaattaaggattcattttagagcgtttcttgctatcacactgccgtggcgccatcttactcggttgcgggaggggtcacaggtcagtgccggagcctccgcgagtgaaggaagacgaagtgcgtgacccgaccggctgtggtgttccagtccccactgaccagtaggagcagcagggcgtcggcttgtgaggtggcttttcctcgggggcaacccaggaagggccccaagagggacaattggattcttggaactcggcccagttgggtagctgtctgtagcagcccccgtctggggctctcacggggagtacaaactagtgatgctgggtgctggtggtgtagggaagagtgccatgaccatgcagttcatcagccaccgattcccagaagatcatgatcccaccattgaagatgcttataagatcaggatccgtattgatgatgagcctgccaatctgggacattttggatacagctggacaggcagagtttacagccatgcggggaccagtatatgagggcaggagaagggtttatcatctgttaactcctatcacggattcgtcgaagtttcccatgaagttncggagagtttaaaccagcttatttattcgagtccgacgtacttgacgatacacctgtggttctttgtggggaaacaagtcagaccttcaaacagcttaagacaggttcaccaagggaaggaagggtttggccttggccccggagaattccagctgtccccttttttggagaacatctggctgccatacccggctactatattgatggatgtttcccccatgccccctgtacgggagataccgtaggaaagaaaaggaggcagtacctggcccatggagaaaaaatcctaagccccaaaaaccagtgtatggaaggaggctaaaaatcacccattccggaagaagaaagattcagtaacttgaagagaagatgtgaagtgtttatctgtgaactgcagtgctgtattcaaagcagtccagttaacctggcagtacttgagtatggtgcttgctcttttcactttaacttgattaggagggacatgcctactaggggtttttaatgatgttggtattttaaagtattgtctcttagtttaagtatggtttattaacccagtggagcactgtctgcttttaaattgtcacattagaatttgttctaccaatgttttgggttctgttgcgctattaattaatgtaaatttgtttatacccaggagaaaaaaaaaaaaaaaaaaa

SEQ ID NO: 1002 - DNA, 579 bp, Homo sapiens
  misc_feature (1)...(579): n = a,t,c or g
cggcggagagcggaagaaaaacagggttcatttagagcggcgccctctannnnnnnnnngttaaatgaagtcattatttagaataatcaacagtacgcaggtcccggttctaaacggaatgaaaactaccagctctcatgaaactacctgtaccctcgttaagtctcttagtgtgtggaactgtttcttcatctgaaaattgaaaacaacaagacatgcaaggtacagcatgaggtaatgtgctcagggtgctttcaacagctagacttgtatactagttccagctgcgcagctctctagctaggtgactttgaacaagcagtccaaccttctgagctcccattttctttcctgtaatagttggataaaatcacctcgtagtggcaagaatcaagagacttctcnnnnnnnnnnnnnnnnnnnnnnnnnnnnnnnnnnnnnnnnnnnnnnnnnnnnnnnnnnnnnnnnnnnnnnnnnnnnnnnnnnnnnnnnnnnnnnnnnnnnnnnnnnnnnnnnnnnnnnnnnnnnnnnnnnnnnnnnnntccgnacgcgtgggtcgagcnggatnctatgctctcg

SEQ ID NO: 1003 - DNA, 510 bp, Homo sapiens
  SIMILAR (480)..(406): 841254mologous to Homo sapiens Human secreted protein, SEQ ID NO: 4458,accession number AAG00377,Smith-Waterman Score=109.
aaaggcaccacgataaatgaagggcatttgttaggataatcaacagttaccaggtccagttctaaacggaatgaaaactaccagctctcctgaaactaactgtaccctcgttaagtctcttagtgtgtggaactgtttcttcatctgaaaattggaaacaacaagacatgcaaggtacagcatgaggtaacgtgctcagggtgctttcaacagctagacttgtatactagttccagctgcgcagctctctagctaggtgactttgaacaagcagtccaaccttctgagctcccattttctttcctgtaatagttggataaaatcacctcgtagtggcaagaatcaagagacttctcaaaagttaaacatagaggccaggcgcagtggctcacagctgtaattctaagcactttgggaggccgaggcaggtggatcacttgaggtctggagtttgaaacctgcctggccaacatggtgaaactctgtctcttccatctctactaaaaatac

SEQ ID NO: 1004 - DNA, 812 bp, Homo sapiens
  SIMILAR (540)..(812): 481254mologous to Homo sapiens Human secreted protein, SEQ ID NO: 7870,accession number AAG03789,Smith-Waterman Score=178.
ttttttttttttttagagagaaaatattatgcaaatcatatatttgataatggacatgtatccagaaaatatggagaattcttaaaactcaacattgagaaaaccaacaacccagtaaaaagatgagcaaaagatcttaatcaaagatatatacatcggcaaataatcacttgaaaagatgctcaacatcattagtcacttgagaaatgtaaattaaaaccacaatgagtgggggaagggaaggagagggagagatttgttaaaggatacaaaaatacaactagataagaggaataagttctagtgttcaataccactgtagggatgactatagttaacaataatatatagtttcaaatagctagaaggagaatattgtacgttcccaatacaaagaaatgatgttcgagatgatgatatgctaattaccctgaatctgaatcactacacatttatacatatcaaagccattactatgtactcccatgaaaacgtataattattatttgtcaattgcaaaaataaaattttaatttagtttgttgaggcagggtcttgctctttcacccaggctggagtgtactagcaccatcacagcacactgcagcctcaacctcccaggcttcaaacaatcctcccattctcagccttctgagtagctggggaccacagacacacaccaccacatccagctagtttttttaattttggagagacagagttttgccatgttgcccagggtggtctcaaatttcctgagtgcaattgatccacctgcctcagacttctaaagtgctgggattacagatgtg

SEQ ID NO: 1005 - DNA, 1222 bp, Homo sapiens
  SIMILAR (675)..(983): 481254mologous to Homo sapiens Human myelin oligodendrocyte glycoprotein gene,accession number AAZ29204,Smith-Waterman Score= 164.
tgccgctcgagttttttttttttttttttttttttaagagccggagtcttgctctgtcaccaggctggagtgcagtggtgtgatctcagctcactgcaacttccgtctcctgggttcaagaattttcctgcctcagcctcccaagtacatgggactacaggcacgccccaccatgcccagctcatttttgtatttttaagtagaagaacaggggtttccacccatgttggcccccggatggatccttggatctccttgacccctcatggatcccgccccgtccttggccctcccccaaagtgctggggatccacagccgtgagcccacccacaccctggcccctcctatttattcctctttaaagagagagaaaactatgagaggcccaaaattatttaattaaatcctttacccttagcacaagggaaaaaaatggaatttgccctaatatagggtgatgaagcatacacaatgaattagaaacaatcacatttttagtaaaaggcaaaaatttgagacttataaagctatatggtagcttatttttgggtggggaagaaatgagaaaagaatataacatctcttactggcaatgacacattttgataaaaaatcttattgtcctttcctactagaatgatccactgtaaggcaaaaataatatacaagcaaagttttttttttggagacggagtctcacctctgtcaccctaggctggagtgcagtgtggcacaatctcagctcactgcaacctccaccttctgggctcaagcgactctcccacctcaacctcccaaataccgggactacaggccaccatgcccagcaaatctttgttttgttgttgttgttgttgttttgctttttgtgttttggtagagatgggggtttcaccatgttggccaggctgatctcaaactcctgacctcaagtgatccacccacctcagcctcccaaagtgctgagattacaggcatgagcccccgtgcctggccatgggttttgtgtttcatttaacgctttgaaagcccccttttttcaaagattatatgaaaagctttttccagttttttaaatatttgatccaagggtaatgttctttggtataaggagtgaggtatagatccagccttatatttttctttttttttttgagacggagtcttgccttgtcacccaggctggagtgcagtggcgcgatctcggctcactgcaatctc

SEQ ID NO: 1006 - DNA, 423 bp, Homo sapiens
  SIMILAR (113)..(277): 891254mologous to Homo sapiens Extended human secreted protein sequence, SEQ ID NO. 229,accession number AAY35980,Smith- Waterman Score=252.
ccgggtcgcccacgcgtccggagcgagccagttgccggattattctatttcccctccctctctcccgccccgtatctcttttcacccttctcccaccctcgctcgcgtagccatggcggagccgtcggcggccactcagtcccattccatctcctcgtcgtccttcggagccgagccgtccgcgcccggcggcggcgggagcccaggagcctgccccgccctggggacgaagagctgcagctcctcctgtgcgggtactgacttgggcaacagcagtgactacaagtgccatactgaccaattggaagagtctttgcttatcggagctgttctaaaaggcttattagtttttggtcttcattctatttaatgttttcatgcctttataaactttttacttccagcccaatttttcccattggg

SEQ ID NO: 1007 - DNA, 727 bp, Homo sapiens
  SIMILAR (2)..(724): 981254mologous to Homo sapiens Human NSPLP protein B,accession number AAW53948,Smith-Waterman Score=1186.
  misc_feature (1)...(727): n = a,t,c or g
catggcggagcgtncggcggccactcagtcccattccatctcctcgtcgtccttcggagccgagccgtccgcgcccggcggcggcgggagcccaggagcctgccccgccctggggacgaagagctgcagctcctcctgtgcggtgcacgatctgattttmtggagagatgtgaagaagactgggtttgtctttggcaccacgctgatcatgctgctttccctggcagctttcagtgtcatcagtgtggtttcttacctcatcctggctcttctctctgtcaccatcagcttcaggatctacaagtccgtcatccaagctgtacagaagtcagaagaaggccatccattcaaagcctacctggacgtagacattactctgtcctcagaagctttccataattacatgaatgctgccatggtgcacatcaacagggccctgaaactcattattcgtctctttctggtagaagatctggttgactccttgaagctggctgtcttcatgtggctgatgacctatgttggtgctgtttttaacggaatcacccttctaattcttgctgaactgctcattttnagtgtcccgattgtntatnagaagtacaaggttccaagcaaaactccctggaatcgccaaaaaaaaggcagaataagtacatggaaaccagaaatgcaacagttactaaaacaccatttaatagttataacgtcgttacttgtactatga

SEQ ID NO: 1008 - DNA, 463 bp, Homo sapiens
  SIMILAR (150)..(290): 931254mologous to Homo sapiens Human NSPLP protein B,accession number AAW53948,Smith-Waterman Score=227.
ccggccggattccctgtcgacgatttcgcctcggagcaggcggagtgaagggacttgagcgagccagttgccggattattctatttcccctccctctctcccgccccgtatctctttttacccttctcccacccttcgctcgcgtagccatggcggagccgtcggaggccactcagtcccattccatctcctcgtcgtccttcggagccgagccgtccgcgcccggcggcggcgggagcccaggagcctgccccgccctggggacgaagagctgcagctcctcctgtgcggattcctttgtttcttcctcttcctctcagcctgtatctctattttcgacctcacaagtgcacgatctgattttctggagagatgtgaagaagactgggtttgtctttggcaccacgctgatcatgctgctttccctggcagctttcagagtcatcagtgtgggttcttacct

SEQ ID NO: 1009 - DNA, 2660 bp, Homo sapiens
  SIMILAR (203)..(787): 561254mologous to Homo sapiens neuroendocrine-specific protein-like protein 1,accession number AF119297,Smith-Waterman Score=413.
  misc_feature (1)...(2660): n = a,t,c or g
aaattcccgggtcgacgatttcgtctgtcctcggagcaggcggagtaaagggacttgatcgagttcagttgccggattattctatttcccctcccatctctcccgccccgtatctcttttcacccttctcccaccctcgctcgcgtagccatggcggagccatcggcggccactcagtcccattccatctcctcgtcgtccttcggagccgagccgtccgcgcccggcggcggcggggagcccagggagcctgccccgcccctggggaccgaagagctgcagctcctccctgtgcggtgcacgatctgattttctggagagatgtgaagaagactgggtttgtctttggcaccacgctgatcatgctgctttccctggcaagctttcagtgtcatcagtgtggatttcttacctcatcctggctctttctctctgtcaccatcagcttcaggaatctacaagttcgtcatccaagctgtacagaagtcagaagaaaggccatccatttcaaaagcctaactggaacgtagacattactctgtcctcaaaaagcttttccataaataacatgaatgctgccattttgcacatcaacatgttcctgaaactcattattcgcctctttctggtagaagatctggttgactccttgaagctggctgtcttcatgtggctgatgacctatgttggggctgtttttaacggaatcacccttctaattcttgctgaactgttcattttcagtgtcccgattgttctatgaaggaagtacaagacccagattgattcactatgttggcatcgcccgagatcagaccaagtcaattgttgaaaagatcccaagcaaaactcccctgggaatcgccaaaaaaaagggcaggattaagtacatggaaaccaggaatgcaaccagttacttaaaacaccatttaattagttataacgtcgttacttgtactatgaaggaaaatactcagtgtcagcttgagcctgcattccaagctttttttttaatttggtgttttctcccatcctttccctttaaccctcagtcatcaagcacaaaaattgatggactgataaaagacctattcttagacctcagaagaagaaagaatcaaatttcataggataagtcaatacctttaatggtggtagtagcctttacctggtagcttgaaagggggaaagattggaggttaagagagaaaatgaaaggaacacctctgggtccttctgtccagttttcaggcactagtcttactcaggctatccatttatagtttgccccttaagaagtcatgattaacttatggaaaaaattatttgggggacagggagtgtggataccttcccttgggtttttttttgcagccctccaaatccctatcttccctgcccccacaatgtgaggcagctaccccctgaaaactcccttttcctttaaatgatttaacctatcaacttgaataaataacttaataggtgaataagtgataattccctgattcccaagaatgcccatcctgataaaaaagaataggaaatgggaaagtggggacttgaggagggagttcagccaggcatgctgcggttgggcggtcactccctctgccactatccccagggaaggaaaggctccgcagtttgggaaagtggtttctacgtcactggacaccggttctgagcattagtttgagaactcgttcccgaatgtgctttcctccctctcccctgcccacctcaagtttaataaataaggttgtacgttttcttactatgaaataaatgtctgtaactgctgtgcactgctgtaaacttgttaggagaaaaaaataacctgcatgtggggctccctcaggttnattggaggtttttggtgatcctatcttcagtctgggggggggaacattcttcaagagggtgaaaatacaggaaagcctttttttcttgatctttttcccgaggtttcaaatctccgattcccatttgggggggcaagtttttttcttcaccttcaatatgagaattcagcgaacttgaaagaaaaatcatctgtgagttccttcaggttctcactcatagtcatgatccttcagagggaatatgcactggcgagtttaaagtaagggctatgatatttgatggtccccaaagtacggcagctgcaaaaagtagtggaagggaaatttgtctacgtgtccttggaaaaattagtttaggaatttggatgggtaaaaaggtaccccttgccttactccatcttattttcttagcccccctttgaagtgttttaactgggtttcaatgtccttagtaggaagtgccattctcccatcctcatcctctgccctccccaggaagtcagtgattgtcttttttgggcttccccctccaaaggacctttttgcagtggaagtgccacatcccagttctttttcttttgtggctgctgtgtttagataattgaagagatctttgtgccacacaggatttttttttttttttaagaaaaacctatagatgaaaaattactaatgaaactgtgtgtacgtgtctgtgcgtgcaacataaaaatacagtagcacctaaggagcttgaatcttggttcctgtaaaatttcaaattgatgtggtattaataaaaaaaaaaaaaaacac

SEQ ID NO: 1010 - DNA, 797 bp, Homo sapiens
  SIMILAR (429)..(55): 451254mologous to Homo sapiens PRO2987,accession number AF116719,Smith-Waterman Score=170.
  misc_feature (1)...(797): n = a,t,c or g
gacactcgctttttggaacgtctgaggttatcaataagctcctagtcccagacgcccatgggtcatttcacagaggaggaccaaggctactatcgacaagcctgtggggcaaaggtgaatgtggaaagatgctggaggagaaacccctgggaaggctccctggttgtctaccccatgggaccccagaggtttctttgaccagctttgggcaacctgtcctctgcctctgccatccatgggcaacccccaaagtcaagggcacatggccaagaagggtgctgacgatccttggggagatgccattaaagcacctgggattgatcttcaaagggcaccttttgcccaagcctgaagtgaacttgcacttgttgacaagcttgccatgtgggattccttgaggaatttcaaagcttcctgggggaaattttgcttggttgacccttttttggccattcctttttcggcaaaagaatttcaccccttgaggtgccaggtttttcttgggcagaaagatgggtgacttggagttggccagtgcccttgttccttccagattaccactgaagcctcttggcccatgaattcagaagctttcaaggataaggctttattcttgcaagcaattacaaataataaatctatttctgctaagagatcaccaaannnnnatnntnnnnnnncccccggattttttatttagcgggccgcacctttttccccttttagggggggtaaatttatattgggccttgggccggggttttcaaaagcggggggannnnnnnnnnaaagagccc

SEQ ID NO: 1011 - DNA, 747 bp, Homo sapiens
  SIMILAR (329)..(358): 1001254mologous to Homo sapiens Human secreted protein, SEQ ID NO: 6186,accession number AAG02105,Smith-Waterman Score=47.
atgaattctttgcttgggctgattattagacgaacatttattgagcaccaaccatatacgacaaacgatgtactagaaaattcagccaatgagagtgcgagagtgcatcttgtgttggccaatgagaacagcgacccgtgcgcagggccgcccaatggggcgcaagcgacgcggtatttgaatcctggaacaaggctacagcgtcgaagatccccagcgctgcgggctcggagagcagtcctaacggcgcctcgtacgctagtgtcctcccttttcagtccgcgtccctccctgggccgggctggcactcttgccttccccgtccctcatggcgctgctccgacgcccgacggtgagtgtgcccggggaccgctctcagaggcgagtccgtcggccccacagctcccctgtcgcttctctcatctgctccgagcttctccgtcccaaccggggctgcttttctcttctccggagctcactgcttcgcccgcgtccctggccctgcggccggtcctctccggcccgcctttccccgtctggattccgccctcccctaacccctccctgccccggggtgggagaagtgtaggaaagcgcttccgagatggcgcctgtcaagtgtccagtgatttggagaatattgacacaggagttaattctaaagttaagagtcatgtgactattaggcgaactgttttagaagaaattggaaatagagttacaaccagagcagcacaagtagctaag

SEQ ID NO: 1012 - DNA, 816 bp, Homo sapiens
  SIMILAR (1)..(306): 821254mologous to Homo sapiens cyclin B2,accession number AB020981,Smith-Waterman Score=426.
atgaaggaagagaatctctgccaagctttttctgatgccttgctctgcaaaatcgaggacattgataacgaagattgggagaaccctcagctctgcagtgactacgttaaggatatctatcagtatctcaggcagctggaggtaggttttgcagtccataaacccacatttcttagatggaagagatataaatggacgcatgctgccatcctagtggattggctggtacaagtccactccaagtttaggcttctgcaggagactctgtacatgtgcgttggcattatggatcgatttttacagctttcacttcctgctgaagatagggaagctttgggtacctcatctccacaacactctggggctctaggagacgtgggctataaaagtggattcattctgtctccacatccctgcatgtccaagatagaaccagaagatgagaaattgtcatttttattcattggtccatttctgaagaaccccagtcccagagcaaatggtgaccccatgtttctctgcttgaatgaggatgaggcacaacagcttgaagaaaccaaatggactggatgccaaaagcaactttgtgaccccctatcagaggaagtcaagactggtgagaaattggtgcagaccaaaggagagaggacatcgaggatcagagaggttcagtttcttgcccagaatcacactaccagaaggtggcagagctgggatttgggcactagcagtctgactccagagcctgtgttctcactggaaatcaatgttagagaacaacgagatgaggataacattcaagtcttgagaggttag

SEQ ID NO: 1013 - DNA, 1575 bp, Homo sapiens
  SIMILAR (1110)..(1370): 481254mologous to Mus musculus putative,accession number AK013312,Smith-Waterman Score=129.
  misc_feature (1)...(1575): n = a,t,c or g
gaggctacagcgtcgaagatccccagcgctgcgggctcggagagcagtcctaacggcgcctcgtacgctagtgttcctcccttttcagtccgcgtccctccctgggccgggctggcactcttgccttccccgtccctcatggcgctgctccgacgcccgacggtgtccagtgatttggagaatattgacacaggagttaattctaaagttaagagtcatgtgactattaggcgaactgttttagaagaaattgggaaatagagttacaaccagagcagcacaagtagctaaggaaagctcaggaacaccaaagttccaagttcaacccaccaaaacaacaaatgtcaacaaacaacttgaaacctactgcttcctgtcaaacccagtaccagatgggaaaagtttggctcccaaagggtccttctcccacacctggaggatgtctnccatgaagggaagagaatctctgcccaagcttttttctgatgccttgctcctgcaaaatcgaggacattgataacgaagattgggagaaccctcnggctctgcagtgactacgttaaggatatctatcagtatctcaggcagctggaggttttgcagtccataaacccacatttcttagatggaagagatataaatgggcgcatgcgttgccatcctagtgggattggctggtacaagtccactccaagtttaggcttctgcaggagactctgtaccatgtgcgtttggcattatgggatccgatttttaacaggttcagccagtttcccggaagaagcttcaattagttgggattactgctctgctcttggctccaaagtatgagaaaatgttttctccaaatattgaagacttttgtttacatcacagacaatgcttatcccagtttcccaaattcgagaaatggaaactctaattttgaaagaattgaaatttgagttgggtcgacccttgccactacacttcttaaggcgagcatcataagccggagaggttgatgttgaacagcacactttagccaagtattttgatggagctgactctcatcgactatgatatggtgcattatcatcctttctaaggttagccagcagctgcttccctgcttgtctcagaaggttctagacaaaggaaaaatggaactttaaagccagcagtattaccacaaggatacacaagagaatgaagtattggaagtccatgccagcaccatggcccaagaatgtggtgcaaagtaaatggaaaacttaaacctaaattccatcggccatcaaagaataaagtatgcaaagcagcaaactccctgaaagatcagcatgatccctcagctgaactcaaaagccgtcaaagaccttggcctccccaactgataggaaggtcctaggctgccgtgggccctggggatgtgtgcttcattgtgccctttttcttattggtttagaactcttgattttgtacatagtcctctggtctatctcatgaaacctcttctcagaccagttttctaaacatatattgaggaaaaataaagcgattggtttttcttaaggtaaaaaaaaaaaaaaaaaa

SEQ ID NO: 1014 - DNA, 869 bp, Homo sapiens
  SIMILAR (693)..(812): 681254mologous to Homo sapiens Human secreted protein, SEQ ID NO: 7888,accession number AAG03807,Smith-Waterman Score=131.
tttttttttttttttttaatttaaagaaattatctttatttttatttgttcatctagacatgccaatggctacttaggccacattttgagcaaaactcacaaggtagttctttttttttttttttttttttttcaaacctcacatgtgtatacaaaatgacacagtttaaaggatttgtttaaaagaacaaagcatgagaaatacagggagatacaagctcataaccaaacctaaataagtaagcagatctgattcaacacgagaaaagattacaaaacaagacctagttttgtaggaagcactatctgaagacaaagttgcaggacacgctgcaagtccctttgcggggagccataagcaggggagaaataacctggtttctacttaccctaacaggggagttatggggtaggtcaagggttttcctaaattaaggtcctgacaattcatcactgttattaaaaggaagagcagatttttcctatcacggcctggcagtgatatgtattctctctctgtcttaatttaatcttaactttaccgtcagcttacgtacacacagtcctttgattcctttcttctcaagcaatgaaagaattaaacctggcaagtcaactattgatggtccatggacaaggagaacaagattgtaaagaaaaaatctgtggatgatccaatagctgtgggattttttgtttgtttgtttgagacggattctagctctgttgccaggctggagtgcagtggtgcgatctcagttcactacaacttccacctcccaggttcaagcgattctcctgattctcgaagcatgccaattgtagatcgccagtgatgattctccagcacagacatattctgatatagg

SEQ ID NO: 1015 - DNA, 513 bp, Homo sapiens
  SIMILAR (51)..(512): 891254mologous to Homo sapiens CUA001,accession number AF248964,Smith-Waterman Score=707.
gaggaagggggggttttgtttcgagaccctagtcagcgtggtggaattcctgggataagtcatccccagaggaggctctgaaaggtctggtggataagcttcaagcgttaaccggcaatgagggccgcgtgtctgtggaaaacatcaagcagctgttgcaatgtttagtcccaggaagcaccactctgcacagtgctgagattttggctgaaatcgcccggatccttcggcctggtggatgtctttttctgaaggagccagtagagacagctgtagataacaatagcaaagtgaagacagcatctaagctgtgttcagccctgactctttctggtcttgtggaagagaaagagctgcagcgggagcccctaacccctgaggaagtacagtctgttcgagaacaccttggtcatgaaagtgacaacctgctgtttgttcagatcacaggcaaaaaaccaaactttgaagtgggttcttctatgcagcttaagctttctatcaccaagaagtctt

SEQ ID NO: 1016 - DNA, 820 bp, Homo sapiens
  SIMILAR (335)..(502): 661254mologous to Homo sapiens CUA001,accession number AF248964,Smith-Waterman Score=186.
ggtcatgaaagtgacaacctgctgtttgttcagatcacaggcaaaaaaccaaactttgaagtgggttcttctaggcagcttaagctttccatcaccaagaagtcttctccttcagtgaaacctgctgtggaccctgctgctgccaagctgtggaccctctcagccaacgatatggaggacgacagcatggatctcattgactcagatgagctgctggatccagaagatttgaagaagccagatccagcttcccctgcgggcttgcttcttgtggggaagggaaaaagaggaaggcctgtaagaactgcacctgtggccttgccgaagaacttggaaaaagagaagtcaagggaacagatgagctcccaacccaagtcagctttgtggaaactgctaccgtggagcgatgccttccggctgtgccagctgcccctaccttgggatgccagccttcaaacctggggaaaaggtgcttctgagtgatagcaatcttcatgatgcctaggaggttcctgacatgggacccatctgctcctccagccaactcctgtccctcacatcccaccatggtggctcctcccacctcctctggatttgttcactctgagatctgtttgcagagtgggtgcttagcagacagagtgaagctggctgggggggcacagtggtgtgttagtgctgctgtgttattcaaaagaccaaggtattatgggacctggtttcagaatgggatgggtttcttcacctcatgttaagagaagggagtgtgtcctgaagaagcccttcttctgatgttaaaatgctgaccagaacgctcttg

SEQ ID NO: 1017 - DNA, 1271 bp, Homo sapiens
  SIMILAR (154)..(699): 561254mologous to Homo sapiens CUA001,accession number AF248964,Smith-Waterman Score=389.
  misc_feature (1)...(1271): n = a,t,c or g
cggaagcgagctcatgcggcagtcttgattccctttttggccagcagtttttcaggtctgtcagtactgcactgcaagaatggcagattttgggatctctgctggccagtttgtggcagtggtctgggataagtcatccccagtgggaggctcttaaaggtcttggtggataagcttcaagcgtttaaccgggcaatgagggccgcgtgtctgtgggaaaacatcaaggcagctgttgcaattctgcccacaaagaatcccagctttggacattattttgttcaggtttagtcccagggaaggcaccactctggcacagtgcttgagatttttgggctggaaatccgcccggattccttcggcctgggtggatgttctttttcctgaaggagccagtagagacagctgttagataacaataggcaaagtggaagacagcatctaagctggtgttcagcccttgactctttctggtcttgtgggaagttgaaagagctgcagcgggagcccctaacccctgaggaagtacagtctgttcgagaacaccttggtcatgaaagtgacaacctgctgtttgttcagatcacaggcaaaaaaccaaactttgaagtgggttcttctaggcagcttaagctttccatcaccaagaagtcttctccttcagtgaaacctgctgtggaccctgctgctgccaagctggtggaccctctcagccaacgatatggaggacgacagcatgtgcatcttctgtggatgtagtttaactcaccgttggcctcttgagcatgtggtccaggttgaaacatgatggatcaacccaaaaggaggacaagggtggacacccttctttaccccctgnactcccaagtttccctctcgaagccctgnaagtcactttagcttttcaattaagcagaagacccacgacctgtatcactcattgctttgaacactctcccaggatctcattgactcagatgagctgctggatccagaagatttgaagaagccagatcccagccttctgcgggctgcttcttgtggggaagggaaaaagaggaaggcctgtaagaactgcacctgtggccttgctgaagaactggaaaaagagaagtcaagggaacagatgagctcccaacccaagtcagcttgtggaaactgctacctgggcgatgccttccgctgtgccagctgcccctaccttgggatgccagccttcaaacctgggggaaaaggtgcttctgagtgatagcaatcttcatgatgcctag

SEQ ID NO: 1018 - DNA, 903 bp, Homo sapiens
  SIMILAR (21)..(107): 751254mologous to Mus musculus putative,accession number AK011782,Smith-Waterman Score=119.
ggctagcaaaccgagcgatcatgtcacacaaacaaatttactattcggacaaatacgacgacgaggagtttgagtatcggttagtgctggcgcgggagcaactagcgacgggtcgtgagctttggccgctgagggcacaaggaattagtaacaggaactgaggcgatagaattggcgcatgcgtacgagacatgtcatgctgtcccaaggacatagccaagctggtccctagaacccattctgatgtctgaatctgaatggaggaatcttggcgttcagcaagaagtcagggatgggtccatttatatgatccatgaacccagaacctcacatcttgctgttcccggcgcccactaccccaggaaacccaaggaaatgaagctgggcaagctaacttttcagccttcaagcttttacacagctggtccttacttgcctaacatctttcttgataacattatttatgttggccttcttgttttcttcacttttgatatttaaaaagatgttcaaatacactggtttgaatgtgctgggtaactgcctttgcttccttaagtaggagccaccaccgaccataggcccaggccagatggaggtgctctgtgggggcccacaggcctaagctgaggtgtgaccccagaagccacgatgtgcttctgtatccaggaacacacttgggcaggatgggagggaaggcatctggagtttggaggaccatgggctgtttacaggggttcatgttaaacttgctgtttttgttttttcctgccgggtgttgtatgtgtggtcacttgcggactcatgcctcagctgccccggatacttaccgttttgttcagcagctctgttcatgttaaaagccttgattaaagaggaagtttttataatctaaaaaaaaaa

SEQ ID NO: 1019 - DNA, 745 bp, Homo sapiens
  SIMILAR (34)..(645): 371254mologous to Homo sapiens 23 kD highly basic protein,accession number X56932,Smith-Waterman Score=176.
agaagaaaagcctttcccaagcggctgccgaagatggcggaggtccaggtcctggtgctttgatggtcaaggcccatctcctgggcccgcctggcgggccatcgtggctaaaccaggtactgctgggccggaaaggtgggtgttcgtacgcttgtgaaggcatccacattttctggcaattttctacagaaccaagtctgcagtaccttggcttttcccctccaagcggaatgaacaccaaccctttcccaaggccccttaccacttcgggggcccccagccgcatcttcgtggcggacccgtgcgaggtatgcatgccccacaaaaccaaagcggaggccaggccgctcttggacccgtctcaaggtgtttgacggcatcccaccgccctacgacaacgaaaaagcgggatggtggttcctggctgccctcaaggctcgtgcgttttgaagcctacacagaaagttttgcctatttggggcgcctgggctcccgaggttggctggaacgctatccggccagtgacagccccccctggaggagaaagaggaaagagaaaagccaagatccacctaccggaagaagaaatagcttcatgaggctaccggaaacaggcccgagaagaaacgtggagaaagaaaattgacaaatacacagaggtcctcaagacccacggactcctggtctgagcccaataaagactgttaattcctcaaaaaaaaaaaaaaaaaaaagggcggccgct

SEQ ID NO: 1020 - DNA, 2679 bp, Homo sapiens
ttcgaatggcaatcttgctagttgcgctacctaacagtaccatcttggatccttcaaaaccaaagacttgccccagcactgctgtggaaccacctggcttatgacccctatggatgatctttaggaaaagcagccctttacttttaatacaggctttaatgaactatacctgttaagttccaaaggtcaaaatggaggcatttgctgtctaatattcaaacatagaaagggagctgcttttaaagaattccctgcaaatactgaaagcagtcatgcgaatggagggtgctcttgtgtagctggtcagggactttttttttcttttctcctgaactacatgattctaattggaatgttcatttgcctctttttactcttttaaatgcttgtaggtggcttggggtgtgctatcgtgctgttcctactcagtaaacaggtgtgatgagttaacaagaaataacactgtttgagaactagctttgaataataatttttccctttgtacatgacctgctgaatttcggtacagtgtttttgtagctaacttattttgtcatgcacataatgtatatttgttatgcactacttttgtatatctggtttttcccaacagttaacatttttagggcacacttttcactgacgggatatctctttatgccaatacctcaatttttccatattggcaaagagtagcctttttgtaccttttattacctgagagatccttcatataccttcattttttaatataaataattttaataaattttattttcttatattcctgctttttatacatttccagtgctctgcatacattttaaattatgaatgtcgtgcactggcaatgctattttagagtctgcagagaagagaaagcatgttgcttaaacatccttccccagcaccagctattggtgtacctataatttaagaaatagtctatgtaaagtcacaaattaatgaaaaaaattcgcatgaaaatgacagataacactgtagttcctaaaaaaaaaatttaaatgcattaaggcttaaggtaggaaatttaaaataaccaaaattgttctacagcttcttactaagtttttaaaattattcataaaatgcagacatttttggtgaatgtttagccatttttaatattaataaattgatgttaagtgtttgattcagagatgtctgctcttttaaattatatataaggaaaaaaaatagcctgccttgggacaggtgtgtaatgttagtgtgcatgactaatgtaagaaattgttattctactaatatttacttgtgattgtgtgacaagtgtgtttacagattattggttacacttcaatttacaggggcataaacaatgattatctattactctggaactttatggattacatgttcttcaggattacatgggattgtagttgggagttacccatgtaactcaaacataattaacatgtaattagtttacagattgtagggcatcacttcaattcaccaagcatgtagttctagcgcactagcatggcgccagccatgtacttacaatgtagttacagagtaattacatggtgatttttgcaatgtaaaataaagtgtttctgattattttctatgtaaaaggaaccctctcctttccccttctggtccctgcgctttggggattaatatatatacttctccatacacagacctctgcagaatgcaaaataaaaccttgcagtggaatgaatttagcattttatgagagtgctgttggaaagacttgataattcaccccttttgttcttgaagagttgaatcttctggtaaaaaggtgatttaaaacttgaatgtgatgaattgtggcaagttaacttcaagttatgtgcaatacttatttcaaacttttgaaagatctttgcagtgtaactctvtgrtrtttaattgcagacatttaaaaatgtcattttctactgttaagagtaatcctctttcttgctggtgtttctaaagaaaagaatcacgaaatcaatctttctactaatgtaaatttgagattatttttaaaaatggaataaaagaggttttggtcatttgctttattttattatcttattttaaagctactgtgattgatagcattgtaagaatcgggacaatattgtattcaactgttttattttttatatttttaaaatttaaagtataattagttcttataactttcatccaaatttttgctatattttttggaagtgaaactttttagcaagtgggtgtctagtttttactaatccctaattttttttccagggtattgctcatattatcagaaggaaaagttatttaagtatgtcagttaattgtactacttgggctgaatttccatatagtttttactgtgtatggggaggttgtaggtatttattatagcattttaaataaggggtaattcatttttttattaaagtcattttcacgttaagttcctatttttgtatgttctactcttaagttatataacacagttccttttttaaaagagttcatttgttgaagtgctagtgaaaaattaatgttattaaatagtttgcaaatgactatttataccagtatgcatataatttttaaatatttgtatggggagaggtgttgaatgaataaaacttttaactcagaaaaaaaaaaaaaaaa

SEQ ID NO: 1021 - DNA, 408 bp, Homo sapiens
  misc_feature (1)...(408): n = a,t,c or g
attgaaatgcaatggcgcgatcataactattgcattttttnnnnnnnnnnnnnnnnnnnnnnnnnnnnnnnnnnnnnnnnnnnnnnnnnnnnnnnnnnnnnnnnnnnnnnnnnnnnnnnnnnnnnnnnnnnnnnnnnnnnnnnnnnnnnnnnnnnnnnnnnnnnnnnnnnnnnnnnnnnnnnnnnnnnnnnnnnnnnnnnnnnnnnnnnnnnnnnnnnnnnnnnnnnnnnnnnnnnnnnnnnnnnnnnnnnnnnnctcgcaagaccttttatctgaaaaccagccaagctttattcacgacacacttcttcccttcactctcccacttgtgtggtcaactccctgcagaactcccaaactgccgttcttttcgatatctcacgaaggtgtttgagagggcaaacatcg

SEQ ID NO: 1022 - DNA, 1532 bp, Homo sapiens
ggttttgttccagttgacaattatattacacattgtaagttaataaattggcattctcctttaaaaaataacaaaaaaaatttaatagtcttatacagttactttcccatgaagggttagcttgaaaagtaaaaagcaacgaataaaaatatcatcacctattgtctcttttgtggtcgaaccttttcttgctgcctgctttgagcgaaccgtggatgtggtcactgagtctggggaggagccctttatcttctttgtggatgcccccagcacagcccaagtgcttcctttgtttcccactgagcctttagcaaatcccacctttcctcctgcacgacagaagaggattgttcttgggaatgcaccttgttctactgccgcagcaagtaggcagctggagactgttactaggggtctccttcacctccccagcgtaaagtacatcccatgctaggagcaggccgttccctgagaacctcattaaacccggcgttcttgtcacgcgctccgctcagggccaccaggccaccagcccgaccagacctgcaccgaggcccagccccagaacaggctgcagagacccccgcccccaaggcgggctccctccaaacgggactccatactccttgctggctcaagttttgtttcgctctttttccctgtaattcctttattgggcaaaactgggacaaacgcaggtggacattttaaagtgaaagcttcatgaaacagcccattccacgccgtcaagagatctgcttaagcacattcaagggaacgaatagcccccacccaccaaaaaagaaatgttcgttccatattctcctgaacagaggattgaaacatcgattcccccccccttcaaaggaacaggaaggccacggggcaaggacggacttgggagcggcctcctttctctctggagggaaaggctggagcgctgcctccacttttaagtccacgaaccacgaagggtgaggatccctcagaaactttagcgcaggggagcgggcaggagggcgattgtttaaatcgatggcagcaccttcattaatctgctttccggccatcttcagcagagccattcaccaggaaacgactagaaggtgggcctgcgcccctcagatatcccggggccggcaacgagccgggcagggacgccgaaggaaggccgtgaggagccctcgctggccggccaagatggccaccttcacatggccgaccgccaccggctccctgccacccggcatctagaggcgggacggccagaaagaccccagccgcagcacaaaacctccgcgattcccgccgcctccgctgggggacgcgacctccgggaaggctatcccggccaacggtcggaagggaggtgccatgtcaccgcacaggggagcgggtccagcaagccccagtcgctttttctcccacatcaaacaaggaagagcaatcccccacgtctcctcgcgtctgcatttttctcctagctctagcggctcaagatagctgaacggtctctggagggccggattgcc

SEQ ID NO: 1023 - DNA, 810 bp, Homo sapiens
  SIMILAR (120)..(170): 1001254mologous to Homo sapiens mutant beta-globin,accession number AY013301,Smith-Waterman Score=87.
  misc_feature (1)...(810): n = a,t,c or g
ccactgaagcgctcagatggctgtaacgacggccgacccacgcgtccgcccacgcgtccggacacaactgtgttcactagcatcgctcatacagacactattggtgcacctgactcactgaggagaagtctgccgttactgccctgtggggcaaggtgaacgtggatgaaagttggtggtaaggccctgggcaggctgctggtggtcctaccctgggaccccaaaaggtcctttnaaagccctttgggggaatctgtcccaactccctgaatgctgttaatggggcaaacccctaaaggtgaaaggctcaatggcaaaagaaaaagtgctcgggtgccctttaagtgatggccctggcttcacctgggacaaccttcaagggtcacctttgcccacactggagtgagcttgcactgttgacaagcttgcacgttggattcctgaagaactttcaggcttcctgggggcaacgtggcttggtcttgtgttgcttgggcccattcacttttgggaaaagaatttcaaccccaccagttgcaggcttgcctaatcaagaaaattggttggcttggtgttggctaaatgcccttgggccacaagtaatcacttaagcctcgctttccttgctggtccaatttccaattaaaaggttcctttggttccctaagtccaaatacttaaactggggggatattattgaaagggccttgagcattttggattttgcctaataaaaaaaatttatttttcatcgcatacaagaataaaacaagcgcggccgattaagaggatacttcaggggcgcaagat

SEQ ID NO: 1024 - DNA, 411 bp, Homo sapiens
  SIMILAR (92)..(163): 1001254mologous to Homo sapiens MSSP-2,accession number D82361,Smith-Waterman Score=121.
aacctctacatttctaatttgccactctccatggatgagcaagaactagaaaatatgctcaaaccatttggacaagttatttctacaagggatactacgtgattccagtggtacaagtcgtggtgttggctttgctaggatggaatcaacagaaaaatgtgaaggctgaacaatcatggatttttctgatcaattgtgctttaggaaattattgacagttttgcacaggttcttgaaaacgttatttataatgaaatcaactaaaactatttttgctataagttctataaggtgcataaaacccttaaattcatctagtagctgttcccccgaacaggtttattttagtaaaaaaaaaaaacaaaaaacaaaaacaaaagatttttatcaaatgttatgatgcaaaaaaag

SEQ ID NO: 1025 - DNA, 503 bp, Homo sapiens
  SIMILAR (94)..(501): 811254mologous to Homo sapiens Human APC protein (splice variant 2),accession number AAB23012,Smith-Waterman Score=551.
aattcggcacaaggaggagagcccgagacttggaaaccccaaagtgtccgcgaccctgcacggcatgctcccttccagcttcatgggcaaagtgtggaaacagcagatgtaccctcagtacgccacctactattacccccagtatctgcaagccaagcagtctctggtcccagcccaccccatggcccctcccagtcccaggcacaaactccagttttaagtccttcccttcctgatatgtctctatccacacattcgtctgttcaggctggtggatggcgaaaactcccacctaatctcagtcccactatagagtataatgatggaagaccagcaaagcgccatgatattgcacggtctcattctgaaagtccttctagacttccaatcaataggtcaggaacctggaaacgtgagcacagcaaacattcatcatcccttctgcgagtaagcacttggagaagaactggaagttcatcttcaattctttctgcttcatcaga

SEQ ID NO: 1026 - DNA, 795 bp, Homo sapiens
  SIMILAR (127)..(585): 981254mologous to Homo sapiens MSSP-1,accession number D82351,Smith-Waterman Score=774.
atggtttggtacatgacattcaacagcaaaactctactaacactcaacttttgccaaaaggagccacaggaatccacaacatccttacgtggccttaaatatcaaagtcactcaccagcagtattacacagtagcaccagcagcaactcaggatgggatcagctcagcaaaacgaacctctatatccgaggactgcctccccacaccaccgaccaggacctggtgaagctctgtcaaccatatgggaaaatagtctccacaaacgcaattttgcataagacaacgaacaaatgcaaaggttatggttttgtcgactttgacagccctgttgcagctcaaaaagctgtgtctgccctgaaggccagtggggttcaagctcaaatggcaaagcaacaggaacaagatcctaccaacctctacatttctaatttgccactctccatggataagcaagaactagaaaatatgctcaaaccatttggacaagttatttctacaaggatactacgtgatgccagtggtacaagtcgtggtgttggctttgctaggacggaatcaacagaaaaatgtgaagctgttactggtgcaaagtccttcttggacgcaacctcaaccatatattctacagcaccccggtgccgtgttaactccctcaatggagcacaccatgtcactacagcccgcatcaatgatcagccctctggcccagcagatgagtcatctgtcactaggcagcaccggaacatacatgcctgcaacgtcagctatgcaaggagcctacttgccacagtatga

SEQ ID NO: 1027 - DNA, 1671 bp, Homo sapiens
  SIMILAR (249)..(1418): 441254mologous to Homo sapiens MSSP-2,accession number X77494,Smith-Waterman Score=580.
tttgccttcgccggctgcatgaattcggcacgaggccgccgccgacgccgccgctgccgtcgtcgccggaaagggagaggcaggagagcccgagacttggaaaccccaaagtgtccgcgaccctgcacggcaggctcccttccagcttcatgggcaaagtgtggaaacagcagatgtaccctcagtacgccacctactattacccccagtatctgcaagccaagcagactctggtcccagcccaccccatggcccctcccagtcccagcaccaccagcaatgataaccaccggtgccattagtagcaactcaagatgggatcagctcagcagaacgaacctctatatccgaggacttgcctccccacaccaccgaccaggacctggttgaagctctgtcaaccatatggggaaaatagtcttccacaaagggcaattttgggataaggacaacgaacaattgcaaaggttatgggtttttgttcgatttttgacagcccatgcagcagctcaaaaaagctgtgtctggccctgaaggccagtgggggttcaagctcaaaatgggcaaagcaacagggacaagattcctaccaacctctacattttctaatttggcactctccatggatgtagcaagaactagaaaatatgctcaaaccattttggacaagttatttctacaagggatactacgtggattccagtggtacaagtcgtggtgtttggctttgctaggatggaatcaacagaaaaatgtgaagctgttattggtcattttaatgggaaaatttattaaggacaccaccaggggtttcttgcccccacaggaaccttttattgtgttaagttttgctggatgggagggacaggaaaaaggggacagaaccccaaacaaatacatccctaatgggaagaccatgggcataggaggaagggagaggtgagactttgctgggattgacacttactttacggacccaactacagctgctatacagaacggattttatccttcaccatacagtattgctacaaaccgaatgatcactcaaacttctattacaccctatattgcatcaacgggttcatgccttccaggtgcaaagtccttcgtgggatgcaaccttcaaccatatattctacacgaccctggtgccgtgttaactccctcaatggagcacaccatgtcactacagcccgcatcaatgatcatcccctctggcccagcagatgagtcatctgtcactatgcagcaccggaacatacatgcctgcaacgtcagctatgcaaggagcctacttgccacagtatgcacatatgcagacgacagcggttcctgttgaggaggcaagtggtcaacagcaggtggctgtcgagacgtttaatgaccattctccatatacctttcaacctaataagtaactgtgagatgtacagaaaggtgttcttacatgaagaagggtgtgaaggctgaacaatcatggatttttctgatcaattgtgctttaggaaattattgacagttttgcacaggttcttgaaaacgttatttataatgaaatcaactaaaactatttttgctataagttctataaggggcataaaacccttaaattcatttagaagctgttcccccgaacaggtttattttagtaaaaaaaaaaaaaaaaaa

SEQ ID NO: 1028 - DNA, 2243 bp, Homo sapiens
  SIMILAR (23)..(97): 1001254mologous to Homo sapiens YC1 gene,accession number AAT90335,Smith-Waterman Score=144.
gaattcgggcccttccagcttcatgggcaaagtgtggaaacagcagatgtaccctcagtacgccacctactattacccccagtatctgcaagccaagtttggaaggcattcgggaataccaagtgaaaaggaagagtgaagaacagaaaaatgttagtgggatggcaaacactgtgaacattgctgtttctagtgggccagaaaaatcagtctctggtcccagcccaccccatggcccctcccagtcccagcaccaccagcagtaataacaacagtagcagcagtagcaactcaggatgggatcagctcagcaaaacgaacctctatatccgaggactgcctccccacaccaccgaccaggacctggtgaagctctgtcaaccatatgggaaaatagtctccacaaaggcaattttggataagacaacgaacaaatgcaaaggttatggttttgtcgactttgacagccctgcagcagctcaaaaagctgtgtctgccctgaaggccagtggggttcaagctcaaatggcaaagcaacaggaacaagatcctaccaacctctacatttctaatttgccactctccatggatgagcaagaactagaaaatatgctcaaaccatttggacaagttatttctacaaggatactacgtgattccagtggtacaagtcgtggtgttggctttgctaggatggaatcaacagaaaaatgtgaagctgttattggtcattttaatggaaaatttattaagacaccaccaggagtttctgcccccacagaacctttattgtgtaagtttgctgatggaggacagaaaaagaggcagaacccaaacaaatacatccctaatggaagaccatggcatagagaaggagaggtgagacttgctggaatgacacttacttacgacccaactacagctgctatacagaacggattttatccttcaccatacagtattgctacaaaccgaatgatcactcaaacttctattacaccctatattgcatctcctgtatctgcctaccaggtggcaaaggaaaccagagaaaacaagtatcggggctctgctatcaaggtgcaaaagtccttcgtggatgcaaccttcaacccatatatttctaccagcaccctggtgccgtgttaactcccttcaatgaagcacacaatgtcactaccagcccgcatcaatgattcagcccttctggccccagcagatgagtccatctgtccactagggccagcacccggaaccataccatgccctgcaaccgtccagcctatgcaagggagccctacttggcccacagtattgcacatattgcagactgacagcggttccctgttgagggaggcaaagtggtcaaacaggcaggttggctgttcgaggacgtcttaatgacccattctccatataccgtttcaaccctaataagtaacctgtgagaaaggcacaaaagggtgttcttacatgaagaagggtgtgaaggctgaacaatcatggatttttctgatcaaattgtgctttaggaaattttattgacagttttgcacagggtttcttgaaaacggttatttataatgaaatcaactaaaactatttttggctataagttctataaggtgcataaaacccttaaattcatctagtagctgttccccgcgaatcaggtttattttagtaaaaaaaaaaaaaacaaaaaacaaaaatcaaaagatttttatacaaatgttatgatgcaaaaaaagaaaaagaaaaaaaaaaagaaaagaaaacttcaattttctgggtatgcacaaagaccatgaagacttatccaagtgcatgaccggatttttgtggttttgttcattttgtgtttaatttgtgtttttttttttccagctgtatgaaatgggctttctgaagtttaaatagtccgacttcacccatggtgttctgtgcttgcagtgcgagtgttgctgtaattcagtgttgccgtcagtgtctcttttcttagctttctgtctttctttcaacgtagtgtgaagtgtcttatccttttctatgaattccaatttgccttaactcttttgatgctgtagctgtttcagtaaaagttagttcaaactaatgatgtagaatgctttgaccaaatgagctggtctattatgccttgtaaaacagcagcatagggcttttaaaaggtagtcaataaaagttgctgaaattttggcttttttaaaaaaaaaaaaaaaaaa

SEQ ID NO: 1029 - DNA, 1288 bp, Homo sapiens
  SIMILAR (392)..(514): 391254mologous to Homo sapiens Human secreted protein, SEQ ID NO: 7874,accession number AAG03793,Smith-Waterman Score=50.
acttaaatatagttatattttcataacatggcttaataatttattgggccatcccagctgggatgtataaatcaaaaccacagcaagtgattttaacgtttaaacaggacagtcctacaaaaaaagaaaattcaaatggctcaaacaaataaacagatacctaacttcattcttgtttgttttaaagagataaggtctcactctgttgcctagactctggagcatagtggtgcaatcatggctcactgcagcctcaaatttctgggcttaagcaatcctcctgcctcagcctcccaagtagctgggacttcgggtgtgcagtaccacacttcactaatttaaaaaaaaaaaaattgtagtgatgaggtcttaccatgttgccaacctcatcttgaacttcgtggcctcaagcgatcttccttcctgtgtagcgcctcaaagggctgagattataggtgtgaaccaccacgcccagtccccaaccttattcttaagtgaatatacaaaattctactgagattaaaacgccatttttaaagtaagagattaggaaagatcaaaacatttgataacacttacaaagatttaataggcactctcatgcattgtgggtgggactgtaaactggcacaatccttatagatggcaacttgccaatatctatcaaaagtaaaaatgcacatatcttaacctagttaattctaactttagatttccagcttacagtaaactcactcatgtgcaatgtgacctatataaaaggttataaaatgaatcattatttataatagcaaaaggttaggaaaaaaaatgtcagcagggactgctcaaatatattatggtacattcatacaataacatctgcaatttatagacccaagaatcaagaaactcttcatggtaacgacatggggacaatctccaaaaatatgtttacacagagaagacaagctggaagaacaggtatacaccggtaccattacccccttagggaaaaatacctctagagggatatttaaggaaaagataacactttttgggaagagaaaatgagttctaaaggagggaaggagacttcactgtttatcgttctgtgtcttttgaattttgaacaattttgaaatgaaaacatcccaatggaaatacaagtcttttaggtaagttcaaatgagcatgtattatatttctttcatctgactgataaacttttccacaatttcattgagtctttcaggctccattagtttatttaccaactcctgctcaacagccattagggctgggccag

SEQ ID NO: 1030 - DNA, 412 bp, Homo sapiens
  misc_feature (1)...(412): n = a,t,c or g
gatgattgacactcatacaccatcgtgagctatcgaaaagagcggcagtttgggagttctgcagggagttgaccacagaagtggtagagtgaaggcaagaagtgtgtcgtgaataaagcttggctggttctcagataaaaggtcttgcgagnnnnnnnnnnnnnnnnnnnnnnnnnnnnnnnnnnnnnnnnnnnnnnnnnnnnnnnnnnnnnnnnnnnnnnnnnnnnnnnnnnnnnnnnnnnnnnnnnnnnnnnnnnnnnnnnnnnnnnnnnnnnnnnnnnnnnnnnnnnnnnnnnnnnnnnnnnnnnnnnnnnnnnnnnnnnnnnnnnnnnnnnnnnnnnnnnnnnnnnnnnnnnnnnnnnnnnnnnnnnnnnnnnnnnnnnnnnnnnnnnnnnnnnnnnnnnnnntcccg

SEQ ID NO: 1031 - DNA, 528 bp, Homo sapiens
  SIMILAR (205)..(528): 1001254mologous to Homo sapiens Human Protease and associated protein-2 (PPRG-2),accession number AAY70008,Smith-Waterman Score= 546.
acaaaagaaaagctaagtgaatttttgcacattctacacacagtgcctgtaaatctcatttgtactttcagtttgcccttaattttttttgttagtgtttagaaaacaatgttttaaacattcttcagtgttctgatttcttattaccccctttcctcttgggcttttgaactgtatttgatgttgctttgggataatgtttataagtcttccagtatgaatcccacagaaaccaaggctgtaaaaacagaacctgagaagaagtcacagtcaaccaagctgtctgtggttcatgagaaaaaatcccaagaaggaaagccaaaagaacacacagagccaaaaagcctacccaagcaggcatcagatacaggaagtaacgatgctcacaataaaaaagcagtttccagatcagctgaacagcagccatcagagaaatcaacagaaccaaagactaaaccacaagacatgatttctgctggtggagagagtgttgctggtatcactgcaatatctggcaagccgggtgac

SEQ ID NO: 1032 - DNA, 864 bp, Homo sapiens
atgttcccggggaaggacaagcgggccagcaggcgggccgcggccaatagtccccaaggcgcacggggacaaggagaggcacacaggccaggccgcgtccacgcacaggcagggccacgcgcagtggcggaaggccaggcacgggcacagggcgcacaggcgcggccaaagcggcccaagttggaaggtggtggaaggatgggcggcgtcacatggtcaggcagtcagcaggggcttgggcggaatgggggtaagccaggggtgcacacggggaggccgtggttggccacaggcacacatgccacatggggcagttgcacaagggcatggcaggtcatgcaggtcacccaggcagcaccaccagcaggggcagagggttctgcccacctggcaccgccttgggatgtgcggagctcagtgccagcccggtcccggccaagcgagtgtgagcccggcgcctccaacgcaacaccccgcgccctcgccggctccccgccgtgcggatcggagccagccggttgttgccatggcattcgccagtggtggtacaagacggtaaataggagcggttgtgcctgggcaggacccgaagggagtgtgttggaagggagtgtgtttgctttgcccttctgggcgtgggatgaagcgttgtccggggtttggcggggaaggggtgcggaccgggtggacctcctcgcagaccttcagagggcgattgttggacgtacttcgccgacgcaaaggagaggcagctgcaatgtgaggcaaggagaaaatccaaacatcaaggggcagaagcaactgagatctgagaccaagacccttgagagagcggtggaggggtggaggaaagaaagcgagaaa

SEQ ID NO: 1033 - DNA, 4259 bp, Homo sapiens
  SIMILAR (2322)..(4256): 951254mologous to Homo sapiens CALPASTATINE HUMAINE,accession number A47413,Smith-Waterman Score=3196.
caagtgataagaccagcagatcagaggcacaagcccttgttcataccttctttgttgtggagtggtcagatgccttatttgtgggaattgatgaaaatattttggcagttcaaagaattgtcaggaaggctgtagaaacagacttacaaacttctagggagagcattggtgttgccgcgggcgcaagccccaagctccaccagcagagagagaagaagaggagaagaggagaagcagtgggatgtcagagactacagttggacattggagataagcagccgtccactgacagcaaagctaaaagagcactgactggaacattcctttctggggcttcaggaattgcaggtacctccctagacgctgccatggcacctacagagtttgcttcctggtggcgcccaaaggcactcgcctcggctcctgcaccacccacctgcgctccccgtcccacgagggatcttgctgctattcccgactttcagtctggtgctatggaaaactggggactgacaacatatagagaatctgctctgttgtttgatgcagaaaagtcttctgcatcaagtaagcttgacatcacaatgactgtggcccatgaactggcccaccagtggtttgggaacctggtcactatggaatggtggaatgatctttggctaaatgaaggatttgccaaatttatggagtttgtgtctgtcagtgtgacccatcctgaactgaaagttggagattatttctttggcaaatgttttgacgcaatggaggtagatgctttaaattcctcacaccctgtgtctacacctgtggaaaatcctgctcagatccgggagatgtttgatgatgtttcttatgataagggagcttgtattctgaatatgctaagggagtatcttagtgctgacgcatttaaaagtggtattgtacagtatctccagaagcatagctataaaaatacaaaaaacgaggacctgtgggatagtatggcaagtatttgccctacagatggtgtaaaagggatggatggcttttgctctagaagtcaacattcatcttcatcctcacattggcatcaggaaggggtggatgtgaaaaccatgatgaacacttggacactgcagaagggttttcccctaataaccatcacagtgagggggaggaatgtacacatgaagcaagagcactacatgaagggctctgacggcgccccggacactgggtacctgtggcatgttccattgacattcatcaccagcaaatccgacatggtccatcgatttttgctaaaaacaaaaacagatgtgctcatcctcccagaagaggtggaatggatcaaatttaatgtgggcatgaatggctattacattgtgcattacgaggatgatggatgggactctttgactggccttttaaaaggaacacacacagcagtcagcagtaatgatcgggcgagtctcattaacaatgcatttcagctcgtcagcattgggaagctgtccattgaaaaggccttggatttatccctgtacttgaaacatgaaactgaaattatgcccgtgtttcaaggtttgaatgagctgattcctatgtataagttaatggagaaaagagatatgaatgaagtggaaactcaattcaaggccttcctcatcaggctgctaagggacctcattgataagcagacatggacagacgagggctcagtctcagagcgaatgctgcggagtcaactactactcctcgcctgtgtgcacaactatcagccgtgcgtacagagggcagaaggctatttcagaaagtggaaggaatccaatggaaacttgagcctgcctgtcgacgtgaccttggcagtgtttgctgtgggggcccagagcacagaaggctgggattttctttatagtaaatatcagttttctttgtccagtactgagaaaagccaaattgaatttgccctctgcagaacccaaaataaggaaaagcttcaatggctactagatgaaagctttaagggagataaaataaaaactcaggagtttccacaaattcttacactcattggcaggaacccagtaggatacccactggcctggcaatttctgaggaaaaactggaacaaacttgtacaaaagtttgaacttggctcatcttccatagcccacatggtaatgggtacaacaaatcaattctccacaagaacacggcttgaagaggaaataaagatgaaattaaatatcaaaattctaatcgatgatatcagtggggtccgcagaccgtgggggtgcaaacgggccccgcttgagagctatcgcatagcggctgtaaaaacagaacctgagaagaagtcacagtcaaccaagccaaaaagcctacccaagcaggcatcagatacaggaagtaacgatgctcacaataaaaaagcagtttccagatcagctgaacagcagccatcagagaaatcaacagaaccaaagactaaaccacaagacatgatttctgctggtggagagagtgttgctggtatcactgcaatatctggcaagccgggtgacaagaaaaaagaaaagaaatcattaaccccagctgtgccagttgaatctaaaccggataaaccatcgggaaagtcaggcatggatgctgctttggatgacttaatagatactttaggaggacctgaagaaactgaagaagaaaatacaacgtatactggaccagaagtttcagatccaatgagttccacctacatagaggaattgggtaaaagagaagtcacaattcctccaaaatatagggaactattggctaaacccatagggccagatgatgctatagacgccttgtcatctgacttcacctgtgggtcgcctacagctgctggaaagaaaactgaaaaagaggaatctacagaagttttaaaagctcagtcagcagggacagtcagaagtgctgctccaccccaagagaagaaaagaaaggtggagaaggatacaatgagtgatcaagcactcgaggctctgtcggcttcactgggcacccggcaagcagaacctgagctcgacctccgctcaattaaggaagtcgatgaggcaaaagctaaagaagaaaaactagagaagtgtggtgaggatgatgaaacaatcccatctgagtacagattaaaaccagccacggataaagatggaaaaccactattgccagagcctgaagaaaaacccaagcctcggagtgaatcagaactcattgatgaactttcagaagattttgaccggtctgaatgtaaagagaaaccatctaagccaactgaaaagacagaagaatctaaggctgctgctccagctcctgtgtcggaggctgtgtctcggacctccatgtgtagtatacagtcagcaccccctgagccggctaccttgaagggcacagtgccagatgatgctgtagaagccttggctgatagcctggggaaaaaggaagcagatccagaagatggaaaacctgtgatggataaagtcaaggagaaggccaaagaagaagacctggaaaagcttggtgaaaaagaagaaacaattcctcctgattatagattagaagagggcaaggagaaagatggaaagccactcctgccaaaagagtctaaggaacagcttccacccatgagtgaagacttccttctggatgctttgtctgaggacttctctggtccacaaaatgcttcatctcttaaatttgaagatgctaaacttgctgctgccatctctgaagtgctttcccaaaccccagcttcaacgacccaagctggagccccaccccgtgatacctcgcagagtgacaaagacctcgatgatgccttggataaactctctgacagtctaggacaaaggcagcctgacccagatgagaacaaaccaatggaagataaagtaaaggaaaaagctaaagctgaacatcgagacaagcttggagaaagagatgacactatcccacctgaatacagacatctcctggatgataatggacaggacaaaccagtgaagccacctacaaagaaatcagaggattcaaagaaacctgcagatgaccaagaccccattgatgctctctcaggagatctggacagctgtccctccactacagaaacctcacagaacacagcaaaggataagtgcaagaaggctgcttccagctccaaagcacctaagaatggaggtaaagcgaaggattcagcaaagacaacagaggaaacttccaagccaaaagatgactaa

SEQ ID NO: 1034 - DNA, 1777 bp, Homo sapiens
  SIMILAR (526)..(1359): 991254mologous to Homo sapiens testis calpastatin,accession number U58996,Smith-Waterman Score=1432.
gaattcggggggagtctccctgacttccagcaacaatccttgagtctgggactgccctggcctaagatgggccagtttctatcttcgactttcttggagggctcaccggccacagtgtggcacgataagctttgtgacggtgaacgcagaggagcaagagaagcagttcgtatcttccaggaccaagcaaaaagctaaagaagaaaaactagagaagtgtggtgaggatgatgaaacaatcccatctgagtacagattaaaaccagccacggataaagatggaaaaccactattgccagagcctgaagaaaaacccaagcctcggagtgaatcagaactcattgatgaactttcagaagatttcgacctgtctgaatgtaaagagaaaccatctaagccaactgaaaagacagaagaatctaaggccgctgctccagctcctgtgtcggaggctgtgtctcggacctccatgtgtagtatacagtcagcaccccctgagccggctacctttgaagggcacagtgcccagatgatgctgtagaagccttggctgatagcctggggaaaaaggaagcagatccagaagatggaaaacctgtgatggataaagtcaaggagaaggccaaagaagaagaccgtgaaaagcttggtgaaaaagaagaaacaattcctcctgattatagattagaagaggtcaaggataaagatggaaagccactcctgccaaaagagtctaaggaacagcttccacccatgagtgaagacttccttctggatgctttgtctgaggacttctctggtccacaaaatgcttcatctcttaaatttgaagatgctaaacttgctgctgccatctctgaagtggtttcccaaaccccagcttcaacgacccaagctggagccccaccccgtgatacctcgagtgacaaagacctcgatgatgccttggataaactctctgacagtctagaacaaaggcagcctgacccagatgagaacaaaccaatggaagataaagtaaaggaaaaagctaaagctgaacatagagacaagcttggagagagagatgacactatcccacctgaatacagacatctcctggatgataatggacaggacaaaccagtgaagccacctacaaagaaatcagaggattcaaagaaacctgcagatgaccaagaccccattgatgctctctcaggagatctggacagctgtccctccactacagaaacctcacagaacacagcaaaggataagtgcaagaaggctgcttccagctccaaagcacctaagaatggaggtaaagcgaaggattcagcaaagacaacagaggaaacttccaagccaaaagatgactaaagaaatacaagttaaggtatctggtatctgcatgtaaaatcttcagctggtggatggtgacttttgaagaacaaaaggctttggcaacagaaaacaattgttctgggtgatttctagaatggtttttgttgagtctctgaacatcctaaatattggtttgttattcttttccagaaagaaaatgaatttgactggttcacctgtgtactgagtattgataaactttgaatttttttaattgccttcaattgggagagaaagctttatatttgtgtgaggacttctgcatcttacagtcagcacagaacacactgagacttgaatcaagtcagcaacagagcaaaataaaggttagataagtccttgtgtagcaaatttcgagcataagaaataaaatctaattaattcttagggt

SEQ ID NO: 1035 - DNA, 4588 bp, Homo sapiens
  SIMILAR (1043)..(2398): 501254mologous to Homo sapiens Human Protease and associated protein-2 (PPRG-2),accession number AAY70008,Smith-Waterman Score= 845.
agtgtgagcccggcgcctacaacgcaacaccccgcgctcctctccggctcccccgccgtgcggatcggagccagccggttgttgccatggcattcgccagctggtggtacaagacgcatgtcagtgaaaaaaccagtgaatcgccttccaaaccatgagaaaagaaaggatcatatgagaaaaaagcagcaagcctcggcagcagtcaatcctccagaacctatgctggtggaacagcctctgtcaccaaggtgtcagctttctctggtgcaaccagcaagtcttacagtatgaatcccacagaaaccaaggccattccagtcagccaacagatggaaggaccacatcttcctaacaagaaaaaacacaaaaaacaggctgtaaaaacagaacctgagaagaagtcacagtcaaccaagctgtctgtgggttcatgagaaaaaatcccaagaaggaaagccaaaagaacacacagagccaaaaagcctacccaagcaggcatcagatacagggaagtaacgatgctcacaataaaaaagcagtttccagatcagctggaacagcagcccatcagagaaatcaacagaaccaaagactaaaccacaagacatgatttctgctggtggagagagtgttgctggtatcactgcaatatctggcaagccgggtgacaagaaaaaagaaaagaaatcattaaccccagctgtgccagttgaatctaaaccggataaaccatcggggaaagtcaggcatggatgctggtttgggattgacttaatagatactttaggaggacctgaagaaactgaagaagaaaatacaacgtatactggaccagaagtttcagatccaatgagttccacctacatagaggaattgggtaaaagagaagtcacaattcctccaaaatatagggaactattggctaaaaaggaagggatcacagggcctcctgcagactcttcaaaacccatagggccagatgatgctatagacgccttgtcatctgacttcacctgtgggtcgcctacagctgctggaaagaaaactgaaaaagaggaatctacagaagttttaaaagctcagtccagcagggacagtcagaagtgctgctccaccccaagagaagaaaagaaaggtggagaaggatacaatgagtgatcaagcactcgaggctctgtcggcttcactgggcacccggcaagcagaacctgagctcgacctccgctcaattaaggaagtcgatgaggcaaaagctaaagaagaaaaactagagaagtgtggtgaggatgatgaaacaatcccatctgaagtacagattaaaaccagccacggataaagatggaaaacccctattgcccagagcctgaagaaaaacccaagcctcggagtgaatcagaactcattgatgaactttcagaagattttgaccggtctgaatgtaaagagaaaccatctaagccaactgaaaagacagaagaatctaaggccgctgctccaggctcctgtgtcggaggctgtgtctcggacctccatgtgtagtatacagtcagcaccccctgaggcgggtaccttgaagggcacagtgcaagatgatgctgtagaagccttggctgatagcctggggaaaaaggaagcagatccagaagatggaaaacctgtgatggataaagtcaaggagaaggccaaagaagaagaccgtgaaaagctttggtgaaaaagaagaaacaattcctcctgattatagattagaagaggtcaaggattaaagatgggaaagccactccttgcccaaagagtcttaaggaacagcttccacccatgagtgaagactttccttctggatgctttgtctgaggacttctctggtccacaaaatgcttcatctccttaattttgaagatgctaaacttgctggtggccatctctgaaagtggtttcccaaaacccccggttttccacgacccccaggctggagccccatccccgtgatacctcgcagagtgaccaaggccctcggtgattgcattggataaactctctgacagtctagggacaaagggcagcctgacccaggatgaggaacaaaccaatgggaaggttaaagttaaagggaaaaagctaaagctgaacatagagacaagcttgggagaaagagatggacattattcccacctgaatacagacatctcctgggatgataatgggacaggacaaaccagtggaaggccaccttacaaagaaatcagagaatcaaaggaaccctggcgaatgaccaaggaccccattgatgctctctcagaagatcttggacagcttgtccctccactacagaaacctcacagaacacagccaaaggataagtgcaagaaggctgcttccagtctccaaagcaccctaagaatggaggtaaagcgaaggattcagcaaaggcaacagaaggaacttccaaagccaaaagatgactaaagaaatacaagttaaggtatctggtatctgcatgtaaaaatcttccagctggtgggatggtgacttttgaagaaccaaaaggcttttggcaaccagaaaacaattgttctggggtgatttctagaatggtttttgttgagtctctgaacaatcctaaatattggtttgttattcttttccaggaaggaaaatgaaatttgactggttcacctgtgtactgagtattggataaactttgaatttttttaattgccttccaattgggagagaaagctttatatttgtaagaaatatatttggataaagtttccttaaagccaacaccaaaaaaacaaaaggaaaagcctaagtgaattttttgccacattcctacacacagtgcctgtaaatctcatttgtattttcagtttgcccttaaattttttttgttagtgtttagaaaacattgttttaaacattcttcagtgttctgatttcttattaccccctttccctcttgggcttttgaactgtatttgatgttgctttggggataatgtttataaggtcaaacataggatatggtaccattgggcacatatctcctcttggggctgctaataataaattaataaccaggtaacctggacaaaccaggaagcaccaaaccccttttccagtttgaactcttctttgccaggtgtgaggacttctgcatcttacagtcagcacagaacacactgagacttgaatcaagtcagcaacagagcaaaataaaggttagataagtccttgtgtagcaaatttcgagcataagaaataaaatcttaattaattcttagggtactcatctgacttgaactctgttgggtttactgtggtagtaaaactgtgctttctattatctatacataaaacctgagcagcaactgtgtctttagagctattgccacattagcctttgcactgtatagcgtctggctttatggaacttaagtttaccaaatataaaaagaaacttctgcttttaaaaaaattatatatatatattaaatttgaaacctgcatttctcccacagcaatgtaagaagtaggctctgatgtcctaccactttgaatggttttctaatatcttaatgaatagttcctgaacattgcactgatatcatcgattagaattttgatatttaatttcatctttatttcctgggtagagaatgcagggaaaagatgtcaggtacataacataaaacaggattggggaatttattgtttcccaaaggggcatgggctttccttaggcatcagtttggaggcttttgttatggacttaggctgacttgtgggcagcgggggcaaggcaaaaaccattaacactgcttataaatggcaccacatcttgttaacctcccccccaaatactctctgaaagtcatgcacatacctatgggattttacacaccaccagcttaaaatgctatgtctctatccatcagaaatacgtcattattctatttttaaggcagcaacaagaaaagaaaaaacacttttcctgagggatttctaaccatgtatctaatcctcccatttgggcagtataggtgtttgcttttttgttttctttttttaagaaaaaccttgaaacctttgacactggacagatgtggtttgcaaggatacggctggcagtattactaattttccatgtggtaacctggaaagtattttttaaatggcatacccaaaatccagaagtttaaagatgcctataaaagtaaacaacatttatttaaaaagaactctgaatatgccttcttttttaattagaaatatcttcgagacttgggtgtttgttaataactaataactggagtaagctacaggatctaaagcagccctttttacagtctagttaggagagagaaaataattgcaaatatccacttagaggcaaagaacaatttttttttatcaaaaaggtttctgcacattgttgtggcaatattgtatctgtttagaaaatgggcttttccaaaagcaaacaaagataggttcctcaggtgaccaaaactgaaaatcaatatttccatgtttcattaatcaaggcataaaatacaattaaagcaaaatattttacatt

SEQ ID NO: 1036 - DNA, 955 bp, Homo sapiens
  SIMILAR (35)..(136): 971254mologous to Homo sapiens Human secreted protein encoded by gene 19 clone HRSMC69,accession number AAW75214,Smith-Waterman Score=164.
ggaattctcagcaagcatagtgggaatctgcaccatgccctgggctctgctcctcctgaccctcctcactcactctgcagtgtcagtggtccaggcagggctgactcagccaccctcggtgtccaaggacttgagacatgaccgccacactcacctgcactggtaacagcgacaatgttggctatcaaggagcagcttggctgcagcaccaccagggccaccctcccaaactccttttctctaggaataacaaccggccctcagggatccataaacgattctatggctccaactctggaacaacagccactttgaccatcagcgggactccaggctatggatgagggatgactattactgtaactcccgggacagcagtggtaaccatctgagggtgttcggcgggagggacccaagttgacccgtccctaagggtacgccaagggatgcccccttgggttaattttgttcccggcccttcctctgaggaagcttcaagcccaaacaaggcccacactggtgtggtcttcataagtgactttcttaccccgggaaacccgtgacaagtggccctggaaggcagatagccagcccccgttcaaggcgggagtggagacccccccacaccctcccaaacaaagcaacaacaagtacacggacagtcagctatctgagcctgacgccttgaccaggtggaagtccccacagaagcttacagcttgccagggtcacgcattgaaggggagcaccgttggagaagacagtggcccctaccagaatgtttcattaggttctcaaaccctcacccccccaccacggggagactagagctgcaggaaccccaggggagggggtctctctctccccatcccaagtcatccagcccttctccctgcactcaataaaccctcaataaatattctcattgtcaatcagaaaaaaaaaaaaaaaaaaa

SEQ ID NO: 1037 - DNA, 401 bp, Homo sapiens
  SIMILAR (349)..(74): 811254mologous to Homo sapiens F-box protein FBX9,accession number AF176704,Smith-Waterman Score=405.
taacttaggtgctcttttgcgctatatactttaattcatgcaaaagtgatagaggactggacttgaggctctacagaggcctttctgagaaagctgtgtagctccttactctggcgaagaacaagggggtgtacatcttgtcaatctcaaaagcactgactgcagtctcaccagttgatttgtaagtaatgtgacaagaatgatgtatccagatgagtttgttgaacctctggtgaccactggaacatagctgtagccccacatgaaaactctgatctgcttcttgtacagggacacgactataaatacagatattttggtctgattgtctgtgtcttgtgacaagcgatagtgacccctgaagagcctcagtccattgttccacgtttaagaactaggaa

SEQ ID NO: 1038 - DNA, 447 bp, Homo sapiens
  SIMILAR (345)..(446): 881254mologous to Homo sapiens dJ341E18.2.2 (novel PUTATIVE protein (PUTATIVE isoform 2)),accession number AL031178,Smith- Waterman Score=159.
  misc_feature (1)...(447): n = a,t,c or g
agcggcccgnnagnataaccctgggggttcgnactgacggctatganancnnnnaanggngnnagggaacaacacagaactttaattaaacactattttacttttattcagtgagtaaaacttaaaagttgaacagtttcccgtgaggaagataaaatatctttggttctttgttgctggactaacaggtagtcagcaatatatgctttaatgttttacccgttctttaacccgcggtatttcagtgttggtttcatagctatgaataggcatacggactaatagataaggacatattttatactttgagtggggggtgcgtattggacttccttttcttattacataggtacataagattctttcctgatggccatgtgatgatgttgacaacccctgaagagcctcagttcattgttccaccgttaagaactatgaataccaggg

SEQ ID NO: 1039 - DNA, 380 bp, Homo sapiens
gatgtactaatagtagcttcttgccaaagggcttcttattacttcatggtggaaaacaatgttttatttatgtagctatttaccatccaggcaggtaacttattgagtaccacgggtgactattatgcttcgaggggtacgaagctgtataagacagggttcctcagaggaccccagaggatggaaagggtagggggaagagggggacaggcagagatttgttaaaggatataaaattacagctagataggaggcacatgttctagtgttctatagcactgtaggatgactatagttaacaatgatacatagtttcatatatatatatatatatatatatatatatatatatatatatatatatatatatatatatatat

SEQ ID NO: 1040 - DNA, 417 bp, Homo sapiens
tatatatatatatatatatatatatatatatatatatatatatatatatatatatatatatatatatatatatataatcttgaccagtcctggtcatttgctcccctccttgtctgtggaccatgataagcccaagtagtgacttcagagctgggtaacagaaattaaagtgaaaagacctttacgtggagaatttgcatgcgtaatataggaaggtgttctttaggtatgttacaggattactttaaaccatttgactttcgctccaaagttatgttggtagtatagcaaattatgatgaatagctttaattgtatgtttaaaagtctcatatgttcacatgcttaaatctgggtatcagaatttaagcaattcttgaaatgtattgtctccttaatatactaattacaaagcaaa

SEQ ID NO: 1041 - DNA, 888 bp, Homo sapiens
  SIMILAR (322)..(801): 981254mologous to Plasmid F Protein E,accession number M12987,Smith-Waterman Score=809.
atgacaatggtagaagttacgatattaatgatcatgggactctatagaatctatggtttcgctgttgcagtggtgtccatgatcctatcttacaatgtctgctctgaaggtgaagtggtctctgtaatgttctccttcgtcgttacatcatcaagttgtggaatgcatcgtagcaccctgctctcgagtgtatatagtcacctgatatttgattctgcctacgtgattaacaatgtagctgatgcgctgtcacgaggctttagcatgcactgcatgcattgtgacaatctaaaaacttgtcacacttcacatggatctgtcatggcggaaacagcggttatcaatcacaagaaacgtaaaaatagcccgcgaatcgtccagtcaaacgacctcactgaggcggcatatagtctctcccgggatcaaaaacgtatgctgtatctgttcgttgaccagatcagaaaatctgatggcaccctacaggaacatgacggtatctgcgagatccatgttgctaaatatgctgaaatattcggattgacctctgcggaagccagtaaggatatacggcaggcattgaagagtttcgcggggaaggaagtggttttttatcgccctgaagaggatgccggcgatgaaaaaggctatgaatcttttccttggtttatcaaacgtgcgcacagtccatccagagggctttacagtgtacatatcaacccatatctcattcccttctttatcgggttacagaaccggtttacgcagtttcggcttattgaaacaaaagaaatcagggttcctctagagtcggcacacacctgtaatcccagctacttggaggctgagacaggagaatcacttgaacccggaaggcagaggttgcagtga

SEQ ID NO: 1042 - DNA, 655 bp, Homo sapiens
  SIMILAR (54)..(329): 821254mologous to Homo sapiens F-box protein FBX9,accession number AF176704,Smith-Waterman Score=401.
agaaagtggctgaatgagaaatgtagattgcagagggcaactggtgtgtttatatgcctgacattatttgggttttcccccctcaggcagaagctgaggaagattgtcattctgatactgtcagagcagatgatgatgaagaaaatgaaagtcctgctgaaacagatctgcaggcacaactccagatgttccgagctcagtggatgtttgaacttgctccaggtgtaagctctagcaatttagaaaatcgaccttgcagagcagcaagaggctctctcccagaaaacatcggcagatacccaaaggaaaacaagaacaggcaaaagaagaaaagttaagtattatagatattgtaacaaattacattttttttttttggcacatggaaattttcactgacacagtaagtaggcattataaccagactttcgggacataaacacatatcttgtaaaataaaaattttgactagtatactagtttatatatttctcacaatttcttctaggtactttggatggtaccactactcctgcatggcttttttctctgtgggtacactgtcttcattgagctgtcttttgttaatttatagacctctgggattcatgtggttcctaaaagattggtgtctctgaatttattaacagaacca

SEQ ID NO: 1043 - DNA, 2340 bp, Homo sapiens
  SIMILAR (37)..(1248): 501254mologous to Homo sapiens NY-REN-57 antigen,accession number AF155114,Smith-Waterman Score=802.
gtcggcgcaggtttccgcagctgagggggcagctccgcggcggcgtccggggtctccagtagggctgacgctccggtgctcgcacaatcccccgcctcggctggcaacgggcgtccctccactccccgagtccccggcagccgccgccaccccagcgcgccccgatctggccccctgccccgcgaagatggctgccgtacgccgggcccgcagttattgccgctgcctggtgcggcttctccgaccgagaacttctgctaagctccgctgcagaagacaaggcaaggagtagacacccggacacccagcacccctcctccggggggcggtgcagagggggcacggagagcccctcgagcgcagcaggccgccccgccagcatggcagaagctgagtgaagattgtcattctgatactgtcagagcagatgatgatgaagaaaatgaaagtcctgctgaaacagacgtgcaggcgcttattcccattgatccaagctcaatggaagcttgaacctgctccacgtgtaacctctagcagactagaaaatcgaccttgcagagcagcaagaggctctctccagaaaacatcggcagataccaaaggaaaacaagaacaggcaaaagaagaaaaggctcgagaactcttcctaaaagcagtagaagaagaacaaaatggagctctctatgaagccatcaagttttatcgtagggctatgcaacttgtacctgatataggagttcaagattactttttacccggtctccagatggtgatggcgttggaaacagctacattgaagataatgatgatgacagcaaaatggcagatctcttgtcctacttccagcagcaactcacatttcaggagtctgtgcttaaactgtgtcaagcctgagcttgagagcagtcagattcacatatcagtgctgcaaatggaggtcctgatgtacatcttccgatgggtggtgtctagtgatcttgaccttacatctttgggagcagttgtcgctggtgtgccagaggattcctaacatcctgtgcccagagacccctgaaaatatgcccgtcctggccctgctttgaaagtttgggggcagaaagcttgtattaaacttgtttccgttacacgtcctgggagagaggatgttttttaggaacggcctcctgtttcggttttgatggcgtgtatatcagtaaaaccacatatattcgtcaaggggaacagtctcttgatggtttctatagagccctggcacccaagtggaatattacaggtacataagattctttcctgatggccatgtgatgatgttgacaacccctgaagagcctcagtccattgttccacgtttaaggaactagggaataccagggactggatgcaattcctactggggtcactatccgcttgtcaccaagacacaggacaatcaggacccaaagtatttggctgttaataactaaggaaaaaaggaaggaaaaaccactttgactattaaatacaggatatttttcgtcgtgttccctgttacaaggaggcagatccatagttttcctgtggggggctaccagctatgtttccagtggtcaccagaggttcaccaaaactcatctggaaccatcattcttgtcacattaccttacaagtagatcaactggtgagactgcagtcaagtgcttttgagattgacaagatgtacacccccttgtttcttcgccagagtaaggagctacacagctttctcagaaaggcctctgtagagcctcaagtccagtcctctatcacttttgcatgaattaaagtatataggcgcaaaagagcaccttaagttattaaatgtgtgtgtgtgtgtgtgtgtatatatatatatatatatatatatatatatatatatatatatatatatatatatatatatatggaattggaacttattttaaattgttggagttcttttaagaagaatataaattgattatttttttttatttaaagggatagttgattcctggggtgttttgaaattaagttggaattaagttgccttaagcatatttatgttggtaagaaacccttaatatgaggtttatcatgcccctttttcaagcagatttatgagcagatttctgtcacataagtcgtcttctgcttgagtatcctaatatttcaatgcatcaggggagcgctccactggataagcattttatttcccgcatggcatagtgtttttgcacctaaaaggctcaaagtgtgagaacctggttcctggatttgtttgaaattatttcaccaataaaagatcataaataaaatggtttctttcaagaaaaaaaaaaaaaa

SEQ ID NO: 1044 - DNA, 726 bp, Homo sapiens
  SIMILAR (269)..(376): 971254mologous to Mus musculus putative,accession number AK002848,Smith-Waterman Score=186.
gttttggccagaagttttaaaaatgacttacaccaattcagtgtgtcagggacagaggttttactgaagaccagttgtaggttaattgaagatgtatatgctccctagcaggttcttcagactcaagcaattttgtacgcatttatgtgttcagtggattggctgcttatgtttcgcaagtgttagtgcaaagataaccctcctaaaatgcaagaatgatggatttggatctgagttttagctccattttcattgtaatttgaatttcaggcgccaagcccatctttgtgtgcttgcatccaactgtgatgagcctatgtatgtcaagttggtggaggccctttgtgctgaacaccaaatcaacctaattaaggtaaggctgctaaggattgtgttgggactaatgttcagtgatgcttgtatatgggggtaaattctgtgaagtctcaagctgttcattttgtgcaggtgtaaacattacgtgcacctgatactgtcggccattttaaagatgattgtaggtagaagcattttatacctgcagaattgaatcctaattttgacgttggtatacaacaaagattagtagcaggcttgtaggtgatcttagtgctgtacatgatgacaactggctccctctactgaactgccatgaggaaactgccatgtcacccttctgattacagccaccttttggggttcatttaattttggtagtggtaatgg

SEQ ID NO: 1045 - DNA, 850 bp, Homo sapiens
  SIMILAR (2)..(193): 851254mologous to Homo sapiens dJ55C23.6.1 (novel protein, isoform 1),accession number AL032821,Smith-Waterman Score=250.
tgtattggaccgagttccagatgggccagtatttattgctatgtgttttctagtgagagtaatggatgcagttagctttgctgcagcaatgactgcatcttcttctatcctggcaaaggcttttccaaataacgtggctacggtattgaattccctgaatgggcagtttgacagaatgagttccctgggcctcggtgggccacgcctccgcaaagaaggacaacgcgaagctgcccgcgtagtgcctgttgcactcgccaaggaccggcctggcagagatagaaaactcgcagtacgtttgcctcagaaccgcctcaatccggaaacagaaactccccaggcccggcactgcgggagccacctctttcgaggaggttgtgaagactgccctcatccacgatggcctagcacgtgtaattcgcgaagctgccaaagccttagacaagtacgtgtatcagtctcaatactgtgggttcttgcaaccggaacaaaactgccacccaagggaagaaggcatggagttcatggtgttagcgcaaaagttctgaatggcatccgtcctaccggaaacctaggaaaagccattctcagggaccttaacgacttcaatgtccttaaggctcgtaacatggctttactattgccagtttttaaagtatgtctgcacaaacacaatcaggaaaagaaggctgtgaacctgaagaaaaaatatgaaaaggatattgctccacaacaagctaaaggaaaacctgaggcagttaaagagggagttgccaaggctgagaaaggtaagaaaaaggaagaggaggaaaatgaggaagatgaagaggatgaggaggaggaagattaa

SEQ ID NO: 1046 - DNA, 965 bp, Homo sapiens
  SIMILAR (155)..(409): 521254mologous to Mus musculus putative,accession number AK002848,Smith-Waterman Score=139.
cggacgcgtggggtcgcgcggaggcggaggccttgaggtgcgttcaagattcagcttcaccctgttatcccaccttctaggccaagcaaggcatttctccggaaggtgtaatggacgttaatactgctttacaagaaggttctgaagcttgcccctcatccacgtatggacctagacacgtgggaattcgcgaagctgaccaaagcccttagacaagcgccaagcccattctttgtgtgcttgcatccaacctgtgatgagccctatgtatgtcaagttggtggaggccctttgtgctgaacacccaaatcaacctaaattaagggttgattgacaacaatgaaactagggagaatggggttagggccttttgttaaaatttgacagaggaggggggaaaccccgtaaaagttggtttggtttgcagttgttgttagtagttaaggtaagtcaccgtttattctagggatgaaggttatgctgggtaatcatataaaaccttgtattgaaataagttgaggatcttataaaaggaaaaaactgattcaacaggtttaaagcattttctgcatttcaggaaaaaaataaaagctgtaatttacaagccagccaatgaatctgcttacctgattgtgtttgtgcagacatactttaaaaactggcaatagtaaagcccatgttacgagccttaagggacattgaagtcgttaaggtccctgagaatggctataacaaatcttagtgatgggaaacatttttataagacatagctaattgttgaagctcccctataattgatactaatagcttggtgaaattcctaaatattaacaagaaattgcatgcgtgttttgttttttttaaggactatggcaaggagtctcaggccaaggatgtcattgaagagtatttcaaatgcaagaaatgaagaaataaatctttggctcccaaaaaaaaaaaaaaaa

SEQ ID NO: 1047 - DNA, 654 bp, Homo sapiens; identical to SEQ ID NO: 244
  SIMILAR (24)..(449): 1001254mologous to Homo sapiens alpha globin,accession number V00488,Smith-Waterman Score=733.
  misc_feature (1)...(654): n = a,t,c or g

SEQ ID NO: 1048 - DNA, 703 bp, Homo sapiens
  SIMILAR (86)..(418): 481254mologous to Macaca mulatta alpha-globin,accession number J04495,Smith-Waterman Score=182.
  misc_feature (1)...(703): n = a,t,c or g
ccccgactcttctggtccccacagactcagagagaacccacccatggttgctgtctcctgccgacaagaccaccgtcaagggcccgcctggggtaaggtcggcgcgcacgctgtgcgcagtatgtgtgcggaggccctggagaggatgttcctgtccttccccaccaccaagacctacttcccgcacttcgaacctgagccacggtttctgcccaggtttaagggccacgggcaaggaaggtggccgacgcgcttgaccaacgccgtggcgcaacgtgggacggacattgcccaacgcgctgttccgcccttgagcgaccttgcacgcgcacaagctttcgggtgggacccggttcaactttcaagctcctaaaggccactggcctgcttggttgaccctggcccggcccaccttccccggccgagttcaacccctggcggttgcaacgtcttccctgggacaaagtttcctgggtttcttgttgaagcaccgttgcttgaaccttccaaattaccgttaaagcttggaagcctcgggtgggccatgctttctttgcccctttggggcttccccccagggcccttcttccctttctggaaccgtaacccccgtggtcttttgaataaaattttgaattgggggggcaaaaaaaaaaaaaaaaaaaagatctttnaatttaagggggcggaaagtttatttcaa

SEQ ID NO: 1049 - DNA, 1155 bp, Homo sapiens
  SIMILAR (957)..(1046): 1001254mologous to Homo sapiens NADH:ubiquinone oxidoreductase ASHI subunit,accession number AF044958,Smith- Waterman Score=169.
ggatacagtgatgacttggtctgcctctaggtggcagggagccattttgggttttcgaacagaaaagtgacataatgaatgctgagttcttaggaagattaatccaggagtagtctccaggatgtactggaaggagagaagctgaaagcagggaggctgctgtgtttgcagttggctgcccagtgctacctctgcagagacaatcaatgtcctgaaggtagctggtatgtctgtgtgcactgacacgagccttcctaccaagccccaggggctccatgctggagaatgcacgtagggctagggtgagcactaacttcacttcaggagagcaaggaacagtgtggctcttccatttttcaagtctgtaagcacatcacccttttgttcttcccttgagctgtgttctctgacagctgttttgttggtaaagccagcagcccctaaagcacgtcccagccttgtttcctctgtgctttcccccaccactgctgctgcaacgcctcatttgctgggccactttagtggtgggaaccattaagaggctgagtgacttaaaggagattgagtctgtctcgaccccgagagagagtgggatggatggatgcatcgtctcatttagaaagtgtttgcctctgactctaacacactcttctctcttttctttacctccctccctgtcttcctcccttcccctcctttccctaaccccctttccctccccctttctccttctctctcacagtgtaggcaccacttctcctaacaatttaaggctttcctctctgccttgggctgaagtgaggaagaggagtgctgttcctgccttcctagcccagctgggtctgaccagaggctactgtgtacccatttaccatgcgtgattgttaactcagagtggggtgtagccaggtattgactgaatgtatgttcttgctgacctgtgtttttttctgtagggaccaaagcagtatccttacaataatctgtacctggaacgaggcggtgatccctccaaagaaccagagcgggtggttcactatgagatctgaggaggcttcgtgggcttttgggtcctctaactaggactccctcattcctagaaatttaaccttaatgaaatccctaataaaactcagtgctgtgttaaaaaaaaaa

SEQ ID NO: 1050 - DNA, 656 bp, Homo sapiens
  SIMILAR (64)..(279): 861254mologous to Pongo pygmaeus alpha-2 globin,accession number M12429,Smith-Waterman Score=320.
  misc_feature (1)...(656): n = a,t,c or g
atcgagaccatattccatgtggnggaattccacagactcagagagaacccaccatggtgctcgtctcctgccgacaagaccaacgtcaaggccgcctggggtaaggtcggcgcgcacgctggcgagtatggtgcggaggccctggagaggatgttcctgtccttccccaccaccaagacctacttcccgcacttcgacctgagccacggtttctgcccaggtttaagggccacgggcaagaaggtggccgacgcgctgaccaacgccgtggcgcacgtgggacgacatgcccaacgtcgctgtccgccctgagcgacctgcacgcgcacaagctttcgggtgggacccggtcaattttcaaagctcctaaagccaattgccttgcttgggtgaaccttgggccgcccacctccccggccgagtttcaacccctggcggttgcaacgtcttccctggggacaaagtttcctgggctttctgttgaagcaccgttgctgaccttccaaataacctttaaaggttggaagcctcgggtgggccatgctttctttgccctttgggcttccccccagcccctcctcccctttcctgcacccgtacccccgtggtctttgaaataaagtcttgagtgggcggcaaaaaaaaaaaaaaaaaaa

SEQ ID NO: 1051 - DNA, 295 bp, Homo sapiens
  SIMILAR (1)..(294): 951254mologous to Homo sapiens dJ402G11.6 (novel protein similar to Xenopus gamma-tubulin interacting protein (yeast SPC98 homolog) (isoform 1)),accession number AL022328,Smith-Waterman Score=505.
  misc_feature (1)...(295): n = a,t,c or g
tggtggcccaacaccccgggagacagtgtctntnaagaactaggccctgggaggagcggggacgctgaggacctctctccaaattggcctctcaactcacaggaagacacagctgcccagagcagcccaggccgtggtgaggaggcggaggcatcggcggcggaggctcagggtggggagcaggcctacctggcaggcctggcagggcagtaccacttggagcggtacccggacagttacgagtccatgtccgagccgcccattgctcatcttttgcgccccgtgctttcccggg

SEQ ID NO: 1052 - DNA, 598 bp, Homo sapiens
  SIMILAR (525)..(361): 591254mologous to Homo sapiens PRO2550,accession number AF130089,Smith-Waterman Score=168.
tttttttttaacaggaggaaaaaaaaatttaataatatatgtttgcacaggagttccacgaaatatgagactccaagaagggtcagatgattgacactcatacaccatcgtgagctatcgaaaagaacggcagtttgggagttctgcagggagttgaccacagaagtgggagagtgaagggaagaagtgtgtcgtgaataaagcttggctggttttcagataaaaggtcttgcgagtggccaggtgtggtggctcactcctgtcacgtcccagcactttgggaggccaaggcgggcggctcatgaggtcaggagttcgagaccagcctggccaacatagtgaaaccccgtctctactaaaaatgcaaaaaattagctgggcatggtggcaggcactgtaatcccagctacttgggaggctgagacaggagaatcacttgaatccgggaggcagaggttgcagtgagctgagatcgcgccattgcattccaatcccgggtgactgtgtgagactccatctcaaaaaaaaaacggaggaaaaaggtcttgtgagtaataaatgttgtctggagcagacctcaggagaagaggtgagagtc

SEQ ID NO: 1053 - DNA, 911 bp, Homo sapiens
  misc_feature (1)...(911): n = a,t,c or g
atggataataaattagatgaacgggtcactcaagggtcctttggtgatgggcgagacagagaaaggggcaggaagcgtaagaaggttggaactttctaccagagacagggcaggctacaccgaggaggtgatattgaagcagagacccagaggagagcacacggccgcggagatgacgtcacgcaagcaacggcgctngacgtcacatatcaccgtggtgatgggcgtcacgtggccatgtagacgtcacgaagagatatagcgatggcgttcgtgcagattgcaggcacgttcgcacacagacatggggaacttggcatgacgtctcaccgagatgcagcgacgacgtcacgggccatgtcgacgtcacacatattaatgtcacacagacgcggcgatggcatcacacagacggtgatgatgtcacacacagacacagtgacaacaacacaccatgacaaccgacacctatagatatggcaaccaaacatcacatgcacgcatgccctttcacacacactttcttacccaaattctcaccttagtgtcacgttcccccgaccctgggcacacgggggcaaggtacccaccaggatccattccccttcccgcacagccctggggccccagcaccttgccctcctccagcttcctggggcctcccaggccatttccttcacccccagtgcctggacccggaggtgagaacaggaagccattcacctccgctccttgagcgtgagtgtttcccaggacccccctcggggccctgagccgggggtgagggtcacctgttgtcgggaggggagccactccttctcccccaactcccagccctgcctgtggcccgttgaaatgttggtggcacttaataaaaaattagtaaatccttaaaaaaaaaaaaaaaaaaa

SEQ ID NO: 1054 - DNA, 455 bp, Homo sapiens
  SIMILAR (199)..(303): 971254mologous to Homo sapiens HSPC179,accession number AF161527,Smith-Waterman Score=182.
  misc_feature (1)...(455): n = a,t,c or g
agggtgagcaggccngnnnaattganaattgatgacccttagaccatgcggtggaattcgctggtgcaaacagctgcacagcaagtggcagaggataaatttgtttttgacttacctgattatgaaagtatcaaccatgttgtggtttttatgctgggaacaatcccatttcctgagggaatgggaggatctgtctacttttcttatcctgattcaaatggaatgccagtatggcaactcctaggatttgtcacgaatgggaagccaagtgccatcttcaaaatttcaggtcttaaatctggtaattattgaacatctacttgctgcctactttcaacatctgcatgtgtgtgtgaatattaaatatcacaccaagacattgttcagaggagacagaatagtgagctgagataaatgagaatctctctatggaagattagactggagcatgaact

SEQ ID NO: 1055 - DNA, 1114 bp, Homo sapiens
  SIMILAR (391)..(786): 411254mologous to Homo sapiens HSPC138,accession number AF161487,Smith-Waterman Score=179.
cccggaagtacttgttgcctgagcagtgggctgcttaggaagagaaggtcagagttcgcgggggcagaggcattcttgccgctggcccagtcactatgtagtggaggggcagacaccctcccgcaaattctggaaggttcttagtctcgactagggcagtagccccaggactcctagtcgccggcttcaggtcactgccggctgaacggagctgccgtcgccatgtttggctgcttggtggcggggaggctggtgcaaacagcttgcacagcaagtggcagaggataaatttgtttttgacttacctgattatgaaagtatcaaccatgttgtggtttttatgctggggaacaatcccatttcctgagggaatgggaggttctgtctactttttcttatcctgattcaaatggaatgccagtatggaaactcctaggatgctgtcacgaatgggaagccaagtgccatcttcaaaatttcaggtcttaaatctggagaaggaagccaacatccttttggagccatgaatattgtccgaacctccatctgttgctcagattgggaatttcaggggaattattagacagtatggctcagcagactcctgtaaggtaatgctgctggtatcctcagtttgactcattcactcagttcacacaaaagatgttggacaatttctacaatttttgcttcatcatttgctgtctctcaggcccagatgacaccaagcccatctgaaaatgttcattccggccaaatgtggttctgaaatggtatgaggcattttctgtctccaatattaaggctttttataactgaatatctattttgtctatgaatatattccttttttgacatttaaacatattcttttattgtgaacatcagcactgcatgccattaaagtatgtactatagagatctgatgagaaacagttcttaccctaaatattttgttatattgtcgccattatgaatttataaagacaggaaaatatagttgcctatgttttagggaccactattaaagcttataaatatttgtgtattttcatttagaagtaccatctatgagagtagtttatactgcactgtgtacatgaatggctaatga

SEQ ID NO: 1056 - DNA, 861 bp, Homo sapiens
  SIMILAR (436)..(735): 731254mologous to Monodelphis domestica ribosomal protein S4 Y isoform,accession number AF051137,Smith-Waterman Score=379.
tcactggctgttaggcagaggtctctgtttcttatcccatgggtcgctccatgggctgcttgagtatgctctcaatatggcagctgacattccataggacaagtgatccaggaacaatactttgcatctttcaatccaatcaagttgactctcaatattgaccgtcacaatcacattgtaatgaaaggtagaacatctgattaaaatatttgctttctctattataagaacttcactgggtcctatattgggcactgcctgtgtactcaactcttcttttagacattgcctgctggattcacggatgtcatcagcattcacaagacgggagagaatttctgtctcatctgtggcatcaatggtcgctttgctgtacattgtattacactggaggaggccaagtacaagttgtgcaaagtaagaaaaatctggttccacgatgctcacaccatccactaccttgactccttcgtcaaggtgaatgacactgtttagactggcaagatcactgatttcatcaagtttgacactggtaacctgggaagaattggtgtgatcaccaacagaaagaagcaccgtggatcttttgatgtggttcatgtgaaagatgccaatggcaacagatttgccccttggctttccaacatttttgttactggcaagtgcaacaaaccatggatttctcttccccgaggaaagggtatccgcctcaccattgcttttcactctgataagtggttctgcagtgacatctctgtacagaatctgtgcaagcgtttttctcagggagataccgggataaagaatagcgaggccagaaggtgttctaatcttcaggtttagtcggcattgccggatcat

SEQ ID NO: 1057 - DNA, 1126 bp, Homo sapiens
  SIMILAR (52)..(489): 511254mologous to Monodelphis domestica ribosomal protein S4 Y isoform,accession number AF051137,Smith-Waterman Score=273.
  misc_feature (1)...(1126): n = a,t,c or g
ggtcgaccggcaccggaagacggaggtcctctttcgttgcctaacgcagccatggctcgtggtcccaagaagcatctgaagcgggtggcagctccaaagcattggatgctggataaattgaccggtgtgtttgctcctcgtccatccaccggtccccacaagttagagagagtgtctccccttcatcatttttcctgaggaacagacttaagtaatgccctgacaggagactgaagtaaagaagattttgcatgcagcgggttcattaaaatccgatggccaggtccggaactgatataacctacccttgctgggattcatggatgtcatcaagcattgacaaagacgggagagaattttccgttctgatctaattgacacccaaggggtccgcttttgctgtaacatcgtattacaccttgaggaggccaagtacaaagttgtgccaaaatgagaaagatcttttgtgggccaacaaaaggaatcccttcatctggtgacctcatgatgccccgcaccccatcccgcctacccccgaaaccccctcatccaaggtgaaatgaatacccattccagattgattttagagactggccaagatttactgatttcnattcaaagttcgaccacttggtaaccctgtgttatggtgacctggaggtgcctaacctaggaagaaattgggtgttgatcacccaacagaggagaggcacccctggatcttttgaccgttggttcacgtgaaaagatgccaatggcaacaagcttttggccacttcggacttttccaacattttttggttattgggcaagggcaacaaaccatgggatttctctttccccgaggaaagggtattccgcctcaccatttgcttgaagagagagacaaaagactggcggccaaacagagcagttgggtgaaatggggtccctgggtgacatggtcagatcttttggtaccgtaattaaaaaccattgtggcaggattaatagcaaacaaaaaaaaagggggcgccgtttaaaaaattacaactttaattacgccggtctgccgaggttaaagctttttaaagggggcccaatatatcatttacttgcccggggttataaagaccggagagggaag

SEQ ID NO: 1058 - DNA, 442 bp, Homo sapiens
  SIMILAR (1)..(111): 1001254mologous to Mus musculus putative,accession number AK002998,Smith-Waterman Score=187.
cgcatccgcaaactctgtctcaacatctgtgttggggagagtggagacagactcacgcgagcagccaaggtgttggaacagctcacagggcagacccctgtgttttccaaaggtgcgggagtatgagttaagaaaaaacaacttctcagatactggaaactttggttttgggatccaggaacacatcgatctgggtatcaaatatgacccaagcattggtatttacggcctggacttttatgtggtgctgggtaggccaggtttcagcattgcagacaagaagcgcaggacaggctgcattggggccaaacacagaatcagcaaagaggaggccatgcgctggttccagcagaagtatgatgggatcatccttcctggcaaataaattcccgtttctatccaaaagagcaataaaaagttttcagtgaaaaaaaaaaaaaaa

SEQ ID NO: 1059 - DNA, 224 bp, Homo sapiens
gggggggccgttttaaagaacccttgggggggccaaagttaacgcgggctggcaaggaaaaagttttttccttatggggggccgatttaaaacctgggcccggcccgtgttttaacaacgccggaaggggaaaatttgttacttgggaatttttggaaagaaccttaattttgggggggggacatattggcccaacctccctacagaaattaaaggctttaggg

SEQ ID NO: 1060 - DNA, 434 bp, Homo sapiens
  SIMILAR (245)..(382): 1001254mologous to Mus musculus putative,accession number AK002998,Smith-Waterman Score=246.
cactggaaaataggctgggttaggggggtgctgaaagttccagcctccaaagcaaacttatagtatggctgtgtgttgcgtgggatgctggtggcagctttgtcagacacagatcatgggtcttgctccagaatccattgggctgccaagtgactctttgaagatctgtctgtaatgtgtgagtcttgtccatctgctcttgactctgagctggctaggtgactgttggttattcctgggacaggtgctgggtaggccaggtttcagcatcgcagacaagaagcgcaggacaggctgcattggggccaaacacagaatcagcaaagaggaggccatgcgctggttccagcagaagtatgatgggatcatccttcctggcaaataaattcccgtttctatccaaaagagcaataaaaagttttcagaaaaatgtg

SEQ ID NO: 1061 - DNA, 669 bp, Homo sapiens
  SIMILAR (31)..(591): 431254mologous to Mus musculus putative,accession number AK002998,Smith-Waterman Score=218.
gatcatggcgcaggatcaaggtgaaaaggagaacccccatgcgggaaacttcgcattccgcaaactcgttctcaacatctgttgtgggggagagtggagatcagaccgacgcgagccagcccaggtgttggagccagctcaacagggcaagaccccctgtgttttcccaaaagcctagcatacacctgtcaaatccctttgggcatcccggagaaaatgaaaagattgcctttcccactgccaccagttccgagggggccaaggcccgcagaaatctctgcagaaggggtcttaaaaggttcagcgagtatggagttcaggacaacaccaccttctcaggatactgggaaacttttggttttgggatcccaggaacacatcgatctgggtatcaaatatgacccaagcattggtatctacgggcctgggacttcctatgtggtgctggggtaaggccaggttttcagcatccgcagaccaagaagccgcagggacaaggctgcattgggggccaaacacagaatccagcaaagaggaggccattgcgctggtttccagcagaagtatgatgggatcatccttcctgggcaaataaattccccgtttctatccaaaaagagcaataaaaagttttcagtgaacaaaaaaaacaataaaaaaataactctc

SEQ ID NO: 1062 - DNA, 978 bp, Homo sapiens
  SIMILAR (390)..(310): 961254mologous to Homo sapiens Human secreted protein SEQ ID NO: 108,accession number AAB28060,Smith-Waterman Score=132.
tacatgttaagtacggtttaatcacaactttgaacaagaattttatcataaattagtaagaagtagaacataaaaaaagttacacatgctagatattaagttatttaaaaaatgaaaactgaagtcaattttattacaaaagattaaactcattagccaccaaaaagaaatataattccaactcagaattgaaagtaattttttattgataaacatttacactagaattagaaatgtcagtagaaaaataaaatttaaataattttctattgtacaaagatttgatcattttgactggtagcagttaggtgaaataacataatataaaaagttaagctgatctgagtcacaaccagccttatagagggcccaaaaaagaaatgcaagtaccccgacatttctggattatggtctgctaatggcaccgatgcttcacattccaggaaatggttacttagggaaggttgatatgtgctgcagcataataggaacttaattcaaaccagagcaaccagaaaggatactgggaggcaaaagccaaaatacaatttaaaatcttaaaaaaaataaggaacggtttaaaggtaattaatgaacttttcctcacctagtgtaaaacattttcatagaagtaagattttgtggtcacaaaaaaaagcacagatacctcttttagaatattcatgatgctcttgtgtatggaacttaagttttcatggaaatgctttccacctcaaaaccccgtattcaagaatcaagaaggccaagcactgatggctcatgtctatagtcccatcacgttgggaggccgaggcgggtggatcacttgaagtcaggagtttgagaccagcctgtccaacataatcaaaccctgtctctactaaaaatacaaaaattagctgggccttgtggcgggtgccagtaatcctagctactcagcggccaaggcaggacaatcacttgaacccaggtcgacgc

SEQ ID NO: 1063 - DNA, 367 bp, Homo sapiens
  SIMILAR (1)..(90): 1001254mologous to Mus musculus putative,accession number AK012284,Smith-Waterman Score=160.
cagggtgtcttgacccatggccgtgtccgcctgctactgagtaaggggcattcctgttacagaccaaggagaactggagaaagaaagagaacccaagattcagcgtcttgttactccacgtgtcctgcagcacaaacggcggcgtattgctctgaagaagcagcgtaccaagaaaaataaagaagaggctgcagaatatgctaaacttttggccaagagaatgaaggaggctaaggagaagcgccaggaacaaattgcgaagagacgcagactttcctctctgcgagcttctacttctaagtctgaatccagtcagaaataagattttttgagtaacaaataaataagatcagactctgaaaaaaaa

SEQ ID NO: 1064 - DNA, 1163 bp, Homo sapiens
  misc_feature (1)...(1163): n = a,t,c or g
tcgctttttttcgggggggagtgtgcgtggggtttgccatgcagactcgtgcatgcaacgcattaaccatcggcctaccctgaggaggatgatgaccgactgatgcaccattgccactgactagatctagctgagaagacatgtacccgatctggcgctctaaggagggagaatgctctatgcctcatttaaataacataactccgtatttgaaagttgccttagctgcttacgcttgctgatagccagtattggatgctgctcatgaaagaggatggagcccatctcggcccttatctattctaggacgcactatatgtgactgtgactttcaaggacatttgtttgccatttgctgatttttttttgggaagttaatttctaacattctttcactgataaatgaagaaaagtattgcacctttgtaatgcaccaaatgaattgagtttgtaattaaaaaaatttttttccctttcagtcattgtcttatatgcttagccatagatttgcagctccagtagtatatgggagttcctaggaatgcagctgaagacctgttatgttagagggaaataccgaggggtggtgctagaagaacagaacatcctgtggaaatgaatccacatccctctccaagttagggaggatggaaggccctgccttccattaagaaagctggggggtaagggtgggggtgggggagaaccacttaaccaacatggggacccagtccaggggaatcccccttatttcctgttttgccatatgaggaacccctagagcagcccaggtgaggctttctaagttttaataaaaatcatggaaagactcttaatgcagactcttcgttaagtgttaatagggatttttttcagctttattttgggttgcagtttccaattttttaaaaatgtttgaggtaaatcttttcccaccttcccaaacctaattcttgtaagatgcattaagtgttgaaccaatgcttttctcatgtctcaattcttvgatatatgcattcttttcagatgtattaaacaaacaaaaacccttcnnnnnnnnnnnnnnnggggggcgcccttttaaaagaacccttggggggcccaattttaccgggggcaggcaaggtaaagtttttttctttagggggggccaaataaaaccc

SEQ ID NO: 1065 - DNA, 413 bp, Homo sapiens
  SIMILAR (38)..(217): 751254mologous to Homo sapiens T-cell receptor beta,accession number M14157,Smith-Waterman Score=197.
aaggggtcctgtctgctctaccccttgctggtaggacaccgaggtaaagccacagtctgctctaccccaggcctcggcgctgacgatctgggtgtcctaccagcaaggggtcctgtctgccaccatcctctatgagatcctgctagggaaggccaccctgtatgctgtgctggtcagcgcccttgtgttgatggccatggtcaagagaaaggatttctgaaggcagccctggaagtggagttaggagcttctaacccgtcatggtttcaatacacattcttcttttgccagcgcttctgaagagctgctctcacctctctgcatcccaatagatatccccctatgtgcatgcacacctgcacactcacggctgaaatctccctaacccagggggaccttagcatgcctaagtg

SEQ ID NO: 1066 - DNA, 968 bp, Homo sapiens
  SIMILAR (165)..(332): 941254mologous to Homo sapiens T-cell receptor beta- chain,accession number K02778,Smith-Waterman Score=268.
ccactctgagaggggctgtgctgagaggcgctgctgggcgtctgggcggaggactcctggttctgggtgctgggagagcgatggggctctcagcggtgggaaggacccgagctgagtctgggacagcagagcgtgcagcaccggtttttgtcctgggcctccaggctgtgagcacagatacgcagatgtttggcccaggcacccggctgacagtgctcgaggacctgaaaaacgtgttcccacccgaggtcgctgtgtttgagccatcagaagcagagatctcccacacccaaaaggccacactggtgtgcctggccacaggtttcttaccccgaccacgtggagctgagctggtgggtgaatgggaaggaggtgcacagtggggtcagcacagacccgcagcccctcaaggagcagcccgccctcaatgactccagatactgcctgagcagccgcctgagggtctcggccaccttctggcagaacccccgcaaccacttccgctgtcaagtccagttctacgggctctcggagaatgacgagtggacccaggatagggccaaacccgtcacccagatcgtcagcgccgaggcctggggtagagcagactttggcttcacctccggtaaagtcttaccagcaaggggtcctgtctgccaccatcctctatgagatcttgctagggaaggccaccttgtatgccgtgctggtcagtgccctcgtgctgatggccatggtcaagagaaaggattccagaggctagctccaaaaccatcccaggtcattcttcatcctcacccaggattctcctgtacctgctcccaatctgtgttcctaaaagtgattctcactctgcttctcatctcctacttacatgaatacttctctcttttttctgtttccctgaagattgagctccaaccccaagtacgaaataggctaaaccaataaaaaattgtgtgttggga

SEQ ID NO: 1067 - DNA, 1214 bp, Homo sapiens
  SIMILAR (534)..(701): 941254mologous to Homo sapiens T cell receptor beta chain,accession number AF043183,Smith-Waterman Score=286.
cgctattctttcttcaaagcagtcatgggaatcaggctcctctgtcgtgtggccttttgtttcctggctgtaggcctcgtagatgtgaaagtaacccagagctcgagatatctagtcaaaaggacgggagagaaagtttttctggaatgtgtccaggatatggaccatgaaaatatgttctggtatcagcgacaagacccaggtctggggctacggctgatctatttctcatatgatgttaaaatgaaagaaaaaggagatattcctgaggggtacagtgtctctagagagaagaaggagcgcttctccctgattctggagtccgccagcaccaaccagacatctatgtacctctgtgccagcagtttattcaatagcgggtaccaagagacccagtacttcggcgccaggcacgcggctcctggtgctcgaggacctgaaaaacgtgttcccacccgaggtcgctgtgtttgagccatcagaagcagagatctcccacacccaaaaggccacactggtgtgcctggccacagggtatcttccctgaccacgtggagctgagctggtgggtgaatgggaaggaggtgcacagtggggtcagcacggacccgcagcccctcaaggagcagcccgccctcaatgactccagatactgcctgagcagccgcctgagggtctcggccaccttcttggcagaacccccgcaaccacttccgctgtcaagtccagttctacgggctctcggggaatgacgagtggacccaggatagggccaaacccgtcacccagatcgtcagcgccgaggcctggggtagagcagactgtggctttacctcggtgttcttaccagcaaggggtcctgtcttgccaccatcctctatgagatccttgctaggggaaggcccaccctgtattgcttgtgctggtaagcgccccttgtgttgatggccaatggtcaaagagaaaggatttctgaaggcagccctggaagtggagttaggagccttctaacccgtcatgggtttcaatacacattcttcttttgccagcgcttctgaagagctgctctcacctctctgcatcccaaatagatatccccctaatgtgcatgcacacctgcacactcacggctgaaatctccctaacccagggggaccttagcatgcctacgctgactaaaccgaataaaaatgttctggtctggcctgactctg

SEQ ID NO: 1068 - DNA, 465 bp, Homo sapiens
aaggtcaagggtggatagctgatggactgtgatgacaacatgtaatatcacagctacttgaaagtgctggaataggcagtgccttagaaacaagtggttagatggttattttagtcagaaaacagcagttatagttgaatatttagaaaaatgtttttctttttttcctcatagtaccatttgaagatgtttagtggttctaacaccaatttaaagtctttccacaaaaatgaactccaaaccttttcgtacatcacttgaagttatctgaggagaaatgggaataaatgaacacttttgagtttactaataaaacctagtttttaaaactatgcaacagtaaattacttctaaaagatggtttcatctcaagttttccacacaaataaaaaaacgtgttataatcgcacctcatcttttaaccctctcagcactcaaactaatattttgctttagaacctgaat

SEQ ID NO: 1069 - DNA, 2981 bp, Homo sapiens
  SIMILAR (993)..(1118): 781254mologous to Homo sapiens unknown,accession number AF218032,Smith-Waterman Score=161.
ttccttccttccgcccgcccgccggcccgccctaagagttgaccacgccgcaatgaagagcttcttacagtgaaagcaaagtaggtcgagtccactgaaaatgcctttaagggacaaatactgtcagactgaccaccatcatcacggatgctgtgaaccagtttatatcctggaacctggagatcctcctttgttacagcaaccactacagacatccaaatctggtattcaacaaataattgagtgctttcgatcaggaactaaacaacttaagcatatattattaaaagatgtggaccactaatttttgaatgtaagttatgccgcagtctcttcagaggattaccagatttaattacccataaaaaattctactgcccaccaagtctccagatggatgacaaccttcctgatgtaaatgataaacaaagccaagccataaatgatctcctagaagccatatattccagtgtgggacaaacgagaatatattattaagctagaacccatagaaactaatcaaaatgcagtatttcaatatatttcgaggactgataatcctattgaagtcacagagtcaagcagtactcctgaacaaaccgaagttcagatacaggaaactagcactgaacagtcaaaaacagtaccggttacagatacagaggtggaaactgtagagccccctcctgttgagattgttacagatgaagttgcacctacatctgatgaacaacctcaggagtcgcaggctgacttggaaacttctgacaattctgattttggtcaccagttgatatgttgtctttgtagaaaagaattcaattctagacgaggtgttcgccgtcacattcgaaaagtacacaagaaaaagatggaagaactaaaaaagtacattgaaacacgaaagaatccaaaccaatcctcctaaaggacgccagtaaggaatgttctagttccattaagtaggagttgtccagtatgttgtaaatccatttgctacaaaagcgaatgtaaggaggcattttgatgaagttcatagaggactaaggagggattcaattactcctgatatagcaacaaaagcctgggcaacctttgttcctgggttctatttctcctaaaaaatcttttaagactcgaaaacaaaagtcttcttcaaaggctgaatacaatttaactgcatgcaaatgcctcctttgcaagaggaaatatagttcacaaataatgcttaaaagacatatgcaaattgtccacaagataactctttctggaacaaactctaaaagagaaaaaggccctaataatactgccaacagttcagaaataaaagttaaagttgaaccagcagattctgtagaatcttcacccccttccattacccattctccacagaatgaattaaagggaacaaatcattcaaatgaaaaaaagaacacaccggcagcacagaaaaataaagttaaacaagactctgaaagccctaaatcaactagtccgtcggctgcaggtggccagcaaaaaaccagaaaaccaaaactttcagctggctttgactttaagcaactttactgtaaactttgtaaacgtcagtttacttccaaacagaacttgactaaacacatcgagttgcacacagatggaaataacatttatgttaaattctacaagtgtcctctttgcacttatgaaactcgtcggaaacgtgatgtgatacgacatataactgtggttcataaaaagtcatctcgttatcttgggaaaataacagccagtttagagatcagagctataaaaaagcctattgattttgttctaaataaagtggcaaaaagaggcccttcgagggatgaagcaaaacatagtgattcaaaacatgatggcacttctaactctcctagtaaaaagtatgaagtagctgacgtcggtattgaagtaaaagtcacaaaaaacttttctcttcacagatgcaataaatgtggaaaggcatttgccaaaaagacttaccttgaacatcataagaaaactcataaggcaaatgcttccaattcacctgaaggaaacaaaaccaaaggccgaagtacaagatctaaggctcttgtctgataacttcaagtgatgtacgaaaaggtttggagttcatttttgtggaaagactttaaattggtgttagaaccactaaacatcttcaaatggtactatgaggaaaaaaagaaaaacatttttctaaatattcaactataactgctgttttctgactaaaataaccatctaaccacttgtttctaaggcactgcctattccagcactttcaagtagctgtgatattacatgttgtcatcacagtccatcagctatccacccttgaccttgtgcatttggtcgacagtttctacaaaaatgttacaaattttgttttctaaacaatttgttgattaagtgatcaacaacctgaagaaaatatcaatttttaattgacaaagactttatatcttagtgattttagttttgtttctctttatttggcaacattttcatctgaattgtatagatatatgattttctagtgagtgtatgttaggaacaaaagacaaaatagtatcaacacattataaatatttagcttactaaatatttgtaattatttttacatccatttatttctagcttgttctccagcacttcagtgtttgaaagtttcatcctaaaatatatactacaggaaagctgcagttcattttcatgcatggatcattacatttttcacttgtaaatgtaggtttttatgaaaattaaacattcccctatttttctttaaattttatacaaagcactttaatgatagatgcaaccttatttttcagttcctatttttttaaagaccacacatttactaatgttaatatgaaggtaataaatagcttactgatattttatggatgcagacaatccatgcacaaccacttcttatgatactagtttat

SEQ ID NO: 1070 - DNA, 614 bp, Homo sapiens
  SIMILAR (93)..(362): 981254mologous to Homo sapiens ribosomal protein,accession number D23660,Smith-Waterman Score=460.
  misc_feature (1)...(614): n = a,t,c or g
tcgaatcccagagttcgaggtggtgggactcaccgctctggccagggtgcttttgnaaacatgtgtcgtggaggccgaatgtttgcaccaaccaaacctggcgccgttggcatcgtagagtgaacacaacccaaaaacgatacgccatctgttctgccctggctgcctcagccctaccagcactggtcatgtctaaaggtcatcgtattgaggaagttcctgaacttcctttggtagttgaagataaagttgaaggctacaagaagaccaaggaagctgttttgctccttaagaaacttaaagcctggaatgatatcaaaaaggtctatgcctctcagcgaatgagagctggcaaaggcaagaagcctgtggtaggtaagaaaggaaagaaggctgctgttggtgttaagaagcagaagaagcctctggtgggaaaaaaggcagcagctaccaagaaaccagcccctgaaaagaagcctgcagagaagaaacctactacagaggagaagaagcctgctgcataaactcttaaatttgattattccataaaggtcaaatcattttggacagcttcttttgaataaagacctgattatacaggcagtgagaaaaaa

SEQ ID NO: 1071 - DNA, 1546 bp, Homo sapiens
  SIMILAR (2)..(889): 431254mologous to Mus musculus putative,accession number AK012432,Smith-Waterman Score=364.
cttttcctgtggcagcagccgggctgagaggagcgtggctgtttctctcttccgccattggcgtgtgctcgcccactgactatcggtgtacttccgaaaagggggagtcatctggcaaaaatgtcactttgccctgctgtattcaaggctcctattccgaccagatattgtggaactttgttcaaacccaaacttgcgcaaaaacaacagacagccctatgctgtcagtgaattaagcaggtcatcagactaagtgctgaagtcttggggtactggcagagctggtggctcgaaattcccagaagttcgaggtggtgggactcaccgctcttggccagggtgcttttgggaaacatgtgtccgtggaggcccgaatgttttgcaccaaccaaaaccctgggccgccgttggaatccgtagagtgaacacaaccccaaaaaacgatacgccatctgttctggccctggctggcctcagccctaaccagcaactgggtcatgtctaaaaggtcatcgtattgaggaagttcctgaaacttcctttggtaagttgaagataaagttgaagggttacaagaagaaccaaggaagctgtttttgctccttaagaaactttaaagcctggaatgatatcaaaaaaggtctatgcctctcagcgaattaagagcttgccaaaggcaaaatgagaaaccgtcgccgtattccaggggcagggggcccgtgcatcatctataatgaggataatggtattcatcaaggccttcagaaacattcctgggaattactctgcttaaatgtaagcaaagctgaacattttgaagccttgctcctgggtgggcatggtggaacgtttctgcattttggactgaaaagtgcttttccggaaagttaggatgaattgtacggcacctggcggtaaagcccgcttcccctcaaagaagtaactaccattctttcccattgcacaagattgattaatacagattcttagcagaattcttgaaaagccccagagatcccaaagagcccctccgggccaccacgccaagaagatccatcgccagagtcctaaagaagaaccccactgaaaaaactttgagaaatcatgttgaagcttaaaccccatatgcaaaagacccatgccgccggaaccacccattcttcgcccaggcccaggaatcacaaagctccggggtggataagggcaagttgttgcaccagcggcacttacaagccaaatcagatgagaaggcggcggttgcaggcaagaagcctgcggtaggctaagaaaggaaagaaggctccttgttggtgttaaaaaagcaaaaaaagcctctggtggggaaaaaaggcagcagctaccaaagaaaccagcccctgaaaagaagcctgcagagaagaaacctaactacagaggagaagaagcctgctgcataaactcttaaatttgattattccataaaggtcaaatcgattttggacagcttcttttgaataaagaacctgattatacaggcagtgagaaacatgaaaaaaaaaaaaaaaaa

SEQ ID NO: 1072 - DNA, 558 bp, Homo sapiens
  SIMILAR (239)..(505): 921254mologous to Gallus gallus ribosomal protein S6,accession number AF208228,Smith-Waterman Score=394.
cctgggaggtgttcagctgttttcagatgaaggtggaacctttccctttcccgcacttgtctgccagaaacttctttgagttggaccgttaaccccaaactccgtacttcctagaggaagcgtatgcccacagaagttggcctggacgctctgggtgaaggattgaagggtttatgtggtccgaatccagtggtggaaacgacaaaccaaggtttccccatgaagcagggtgtcttgacccatggccgtgtccgttaagaaacctaggaccaaagcacccaagattcagcgtcttgttactccacgtgtcctgcagcacaaacggcggcgtattgctctgaagaagcagcgtaccaagaaaaataaagaagaggctgcagaatatgctaaacttttggccaagagaatgaaggaggctaaggagaagcgccaggaacaaattgcgaagagacgcagactttcctctctgcgagcttctacttctaagtctgaatccagtcagaaataagattttttgagtaacaaataaataagatcagactctgaaaaaaaaaaaaa

SEQ ID NO: 1073 - DNA, 2199 bp, Homo sapiens
  SIMILAR (1)..(2196): 851254mologous to Gallus gallus p95-APP1,accession number AF216970,Smith-Waterman Score=3198.
atgtcccgaaaggggccgcgagcggaggtgtgtgcggactgcagcgccccggaccctggctgggcatccatcagcaggggtgtgctggtgtgtgacgagtgctgcagcgtgcaccggagcctgggacgccacatctccattgtcaagcaccttcgccacagcgcctggcctcccacgctgctgcagatggtgcacacgcttgccagcaacggggccaactccatctgggagcactccctgctggaccccgcacaagtgcagagcggccggcgtaaagccaacccccaagacaaagtccaccccatcaagtcagagttcatcagggccaagtaccagatgctggcatttgtgcacaagcttccctgccgggacgatgatggagtcaccgccaaagacctcagcaagcaactacactcgagcgtgcggacaggcaacctggagacatgtctgcgcctgctctccctgggtgcccaggccaacttcttccacccagagaagggcaccacacctctgcacgtggctgccaaggcaggacagacactgcaggccgagctgcttgtagtgtatggggctgaccctggctcccctgatgttaatggccgcacacccattgactatgccaggcaggcggggcaccatgagctggcggaaaggctggttgagtgccaatatgagctcactgaccggctggccttctacctctgtggacgcaagccggatcacaagaatgggcattacatcatcccacagatggctgacagccttgacttatccgaattggccaaagctgctaagaagaagctgcaggcgctcagcaaccggctttttgaggaactcgccatggacgtgtatgacgaggtggatcgaagagaaaatgatgcagtgtggctggctacccaaaaccacagcactctggtgacagagcgcagtgccgtgcccttcctgcctgttaacccggaatactcagccacgcggaatcaggggcgacaaaagctggcccgctttaatgcccgagagtttgccaccttgatcatcgacattctcagtgaggccaagcggagacagcagggcaagagcctgagcagccccacagacaacctcgagctgtctctgcggagccagagtgacctcgacgaccaacacgactacgacagcgtggcctctgacgaggacacagaccaggagcccctgcgcagcaccggcgccactcggagcaaccgggcccggagcatggactcctcggacttgtctgacggggctgtgacgctgcaggagtacctggagctgaagaaggccctggctacatcggaggcaaaggtgcagcagctcatgaaggtcaacagtagcctgagcgacgagctccggaggctgcagcgagagatccacaagctgcaggcggagaacctgcagctccggcagcctccagggccggtgcccacacctccactccccagtgaacgggcggaacacacacccatggcgccaggcgggagcacacaccgcagggatcgccaggccttttccatgtatgaacctggctctgccctgaagccctttgggggcccccctggggacgagctcactacgcggctgcagcctttccacagcactgagctagaggacgacgccatctattcagtgcacgtccctgctggcctttaccggagcaagctttcccgccacggcagtggagccgacagtgactatgagaacacgcaaagtggggacccactgctggggctggaagggaagaggtttctagagctgggcaaagaggaagacttccacccagagctggaaagcctggatggagacctagatcctgggcttcccagcacagaggatgtcatcttgaagacagagcaggtcaccaagaacattcaggaactgttgcgggcagcccaggagttcaagcatgacagcttcgtgccctgctcagagaagatccatttggctgtgaccgagatggcctccctcttcccaaagaggccagccctggagccagtgcggagctcactgcggctgctcaacgccagcgcctaccggctgcagagtgagtgccggaagacagtgcccccagagcccggcgccccagtggacttccagctgctgactcagcaggtgatccagtgcgcctatgacatcgccaaggctgccaagcagctggtcaccatcaccacccgagagaagaagcagtga

SEQ ID NO: 1074 - DNA, 207 bp, Homo sapiens
  SIMILAR (1)..(153): 1001254mologous to Homo sapiens ARF GTPase-activating protein GIT1,accession number AF124490,Smith-Waterman Score=239.
agcatggactcctcggacttgtctgacggggctgtgacgctgcaggagtacctggagctgaagaaggccctggctacatcggaggcaaaggtgcagcagctcatgaaggtcaacagtagcctgagcgacgagctccggaggctgcagcgagaggagctagaggacgacgccatctattcagtgcacgtccctgctggcctttaccgg

SEQ ID NO: 1075 - DNA, 1065 bp, Homo sapiens
  SIMILAR (631)..(1041): 991254mologous to Homo sapiens ARF GTPase-activating protein GIT1,accession number AF124490,Smith-Waterman Score=698.
atgacctggcagcgagggaaccgcagctttgtcttcaggggccaagacacaagcgccgtggtcatggagattgaccacgaccgccgggtggtgtacacagagactctggcactggctgggcaggaccgggagctgctgctggctgctgctcagcccactgaggaacaggtgctgagccggcttaccgcgcccgtcgtcaccactcagcttgacaccaagaatatctcctttgagaggaacaagactggcatcctgggctggcgcagtgaaaagacggagatggtgaatgggtatgaagctaagacagggcgagtggataagaactacccactggtcactgggcacactgcccctgtgctggatattgactggtgtccacacaatgacaacgttatcgccagtgcctcagacgacaccaccatcatgggggccgccagctccgcagagcaaaggccagagccagggcctaaggagaggagagagagcaatcaccctgctgcccctctcagagaacccgagggccaacaagcctgggcccagcgtctctcacctgcacacaccctcttcggcacagcctccctctaccggggagttggctcggagggagcaggccctgaaaggctttcacagctggaagggaagaggtttctagagctgggcaaagaggaagacttccacccagagctggaaagcctggatggagacctagatcctgggcttcccagcacagaggatgtcatcttgaagacagagcaggtcaccaagaacattcaggaactgttgcgggcagcccaggagttcaagcatgacagcttcgtgccctgctcagagaagatccatttggctgtgaccgagatggcctccctcttcccaaagaggccagccctggagccagtgcggagctcactgcggctgctcaacgccagcgcctaccggctgcagagtgagtgccggaagacagtgcccccagagcccggcgccccagtggacttccagctgctgactcagcaggtgatccagtgcgcctatgacatcggcaaggaacttggaaacaatggtttttaa

SEQ ID NO: 1076 - DNA, 1302 bp, Homo sapiens
  SIMILAR (665)..(519): 791254mologous to Escherichia coli tetracycline resistance protein,accession number L29404,Smith-Waterman Score=209.
ttactggaacgttgtgagggtaaacaactggcggtatggatgcggcgggaccagagaaaaatcactcagggtcaatgccagcgcttcgttaatacagatgtaggtgttccacagggtagccagcagcatcctgcgatgcagatccggaacataatggtgcagggcgctgacttccgcgtttccagactttacgaaacacggaaaccgaagaccattcatgttgttgctcaggtcgcagacgttttgcagcagcagtcgcttcacgttcgcagtaaggcaaccccgccagcctagccgggtcctcaacgacaggagcacgatcatgcgcacccgtggccaggacccaacgctgcccgagatgcgccgcgtgcggctgctggagatggcggacgcgatggatatgttctgccaagggttggtttgcgcattcacagttctccgcaagaattgattggctccaattcttggagtggtgaatccgttagcgaggtgccgccggcttccattcaggtcgaggtggcccggctccatgcaccgcgacgcaacgcggggaggcagacaaggtatagggcggcgcctacaatccatgccaacccgttccatgtgctcgccgaggcggcataaatcgccgtgacgatcagcggtccaatgatcgaagttaggctgcctggacagcatggcctgcaacgcgggcatcccgatgccgccggaagcgagaagaatcataatggggaaggccatccagcctcgcgtcgcgaacgccagcaagacgtagcccagcgcgtcggccgccatgccggcgataatggcctgcttctcgccgaaacgtttggtggcgggaccagtgacgaaggcttgagcgagggcgtgcaagattccgaataccgcaagcgacaggccgatcatcgtcgcgctccagcgaaagcggtcctcgccgaaaatgaccacagagcgctgccggcacctgtcgtcgtgcaagtgcgtgtctccttcagagaaaagcgtgccgaggtagactaggccccgggcagcaaaaaccctgtcccgtcgccagcgccccgcaccgccagagcgactggagcagacgcgagcgctgggcacgtagccggtggcgcgcacgctcagcccgaggccgcacgggaggctgtctggcgtgcgcgcccccgcggcggtgggcggggtccggggcggggccgcaggagcagtaggtgttagcagcttggtcgcgacaggtgcgctaggtagagcgccgggacaagtcaggcggttgatgctgtcatctgggatctcagctggggccat

SEQ ID NO: 1077 - DNA, 1063 bp, Homo sapiens
  SIMILAR (109)..(285): 911254mologous to Homo sapiens ARF GTPase-activating protein GIT1,accession number AF124490,Smith-Waterman Score=273.
  misc_feature (1)...(1063): n = a,t,c or g
ggcattttagattatctggataacatatcccctcagcaaatacgaaaactcttctatgttctcagcacactggcatttagcaaacagaatgaagccagcagccacatccagcaactacactcgagcgtgcggacaggcaacctggagacatgtctgcgcctgctctccctgggtgcccaggccaacttcttccacccagagaagggcaccacacctctgcacgtggctgccaaggcaggacagacactgcaggccgagctgcttgtagtcgccgcaaagaatccggaaaaacgtgaatataccaccgaaaacggatctccggctgaaacccctacgtgtagcgcaggaaaacgaggaacaccacgaaccaagatgtcggacatctccagcgaggacctgcgtcgtgaaattcaggcggttttgaaggacgccgatttggcgaccatttcggcaaagagggtgcgcgagcaggtggagggaaagctgaactgctcgttgctgagccgcaagaaggagttcgacaagatcgtgatggaggtgatcaacgagcagcaggacgaggaggacgaagacgatgacgagggcaaggatcccgatgccgatcccgacgatgagagcgagcccagcgaggaggaggaccccagcagcagcgaggaggaggccgccaagaagaagaagcagacccccaagaagaggccacagcccacgaagcacaaggcgcccaagaagaagcgcaagaccctaaatgccgacgattccggcaccgctgatgaacgactgccnnnnnnnnnnnnnnnnnnnnnnnnnnnnnnnnnnnnnnnnggtgtagagtacaatagcacacttcacacttgtcctgaagtggttggtgccttagtgacccatatctgcagtgggaatgaagctgaagttgatactgccttagatgtccttctagagttggtagtgttaaacccatctgctatgatgatgaatgctgtctttgtaaagctcagcaaccggctttttgaggaactcgccatggacgtgtatgacgaggtggatcgaagagaaaatgatgcag

SEQ ID NO: 1078 - DNA, 1602 bp, Homo sapiens
  SIMILAR (238)..(432): 981254mologous to Plasmid ColBM-Cl139 D protein,accession number J03312,Smith-Waterman Score=327.
atggggtaccgagctcgaattcgtaatcatgtgtggctggctacccaaaaccacagcactctggtgacagagcgcagtgccgtgcccttcctgcctgttaacccggaatactcagccacgcggaatcaggggcgacaaaagcttggccgctttaatgcccgagagtttggcaacttgatcatcgacattctcagtgagagcaagcggagacagcaggcaagagctgagcagccccacagtgcagctgctgctgacggtgtgacgttctctgttccggtcacaccacatacgttccgccattcctatgcgatgcacatgctgtatgccggtataccgctgaaagttctgcaaagcctgatgggacataagtccatcagttcaacggaagtctacacgaaggtttttgcgctggatgtggctgcccggcaccggcaaccaacaaggaggaaagcccccgcagtgctcggccagtgccgcgccatcgccaccagggagcgacccggctggttccacgtggcagaggttcgcgcctcgcggcgcgggaggagcccgacgccacagtgtgcagaccctggctgggcatccatcagcaggggtgtgctggtgtgtgacgagtgctgcagcgtgcaccggagcctgggacgccacatctccattgtcaagcaccttcgccacagcgcctggcctcccacgctgctgcagtcaggcttccccggcccctcgcgcagagccgctccacgggcagcccggggccccaccccacgcactgaagaggccgcctgggctgccatggccctgaccttcctgctggtgctgctcaccctggccacgctctgcacacggctgcacagaaacttccgacgcggggagagcatctactgggggcccacagcggacagccaggacacagtggctggaagccctgatcatggtcttctggcttttgcctaccataggcttgtccggtttctcctctgggtcctctgccctggttgggccttcttcctagtgaactcttctaggggtggggtcttcaaccccatcctccacccctgcccccgccacggccaagccagatttgcaggggtggggagggctgaggatgtcaccttcctctaccacccctgtgcccatccctggctgaagctccagcttgccctcctggcctatgcttgtatggctaacccttccctcacccctgacttcagcctcacgcaggatcgggtggacatcgagcagctggatccccgcggccggactcccctgcacctggccaccacgctggggcaccttgagtgtgcccgtgtgctcctggcgcacggcgagacgtgggcacgggagaatcgcagcggctggacagtgctccaggaggctgtgagtacccaggacctggagctggtgcagctggtgcttcggtaccgggactaccagcgggtggtgaagcggctggcgagcattcccgtgctcctggagaagctgcgcaagcaaaggagctatctccctggtaggcccctggcacggctgcggaggtccgtgaactctagcggggctgtgggcatgattaagagtgagagtatggggcgctggtttgtgggcccataa

SEQ ID NO: 1079 - DNA, 737 bp, Homo sapiens
  SIMILAR (4)..(639): 931254mologous to Homo sapiens STE20-like kinase,accession number AF263312,Smith-Waterman Score=987.
agaaaacaggagtggctttcaaagcagaaggagaatatacagcatttccaagcagaagaagaagctaaccttcttcgacgtcaaagacaatacctagagctggaatgccgtcgcttcaagagaagaatgttacttgggcgtcataacttagagcaggaccttgtcagggaggagttaaacaaaagacagactcagaaggacttagagcatgccatgctactccgacagcatgaatctatgcaagaactggagttccgccacctcaacacaattcagaagatgcgctgtgagttgatcagattacagcatcaaactgagctcactaaccagctggaatataataagcgaagagaacgagaactaagacgaaagcatgtcatggaagttcgacaacagcctaagggtttgaagtctaaagaacttccaaataaaaaaagcagttttcagggttacctgcaaaattcccaaaccagacagtacaaagcattaagaaatcacctgctggagactacaccaaagagtgagcacaaagctgttctgaaacggctcaaggaggaacagacccggaaattagctatcttggctgagcagtatgatcacagcattaatgaaatgctctccacacaagccgtgagtttgctttttttggggcaaaacaaatttagtgccccttttcttccaccacctgaatgaaatcacagcaattaaagtactagttggaaatgatagctctcctg

SEQ ID NO: 1080 - DNA, 4503 bp, Homo sapiens
  SIMILAR (1099)..(1629): 501254mologous to Rattus norvegicus G protein-coupled receptor kinase-associated ADP ribosylation factor GTPase- activating protein,accession number AF085693,Smith-Waterman Score= 341.
atggacgatatcccgcaagaggcccggcagtaccggcataaccaagcctatgcctacagcatccagggtgacggtgccgaggatgacgatgagcgcattgttagatttcatacacgcgttatcaatcacaagaaacgtaaaaatagcccgcgaatcgtccagtcaaacgacctcactgaggcggcatatagtctctcccgggatcaaaaacgtatgctgtatctgttcgttgaccagatcagaaaatctgatggcaccctacaggaacatgacggtatctgcgagatccatgttgctaaatatgctgaaatattcggattgacctctgcggaagccagtaaggatatacggcaggcattgaagagtttcgcggggaaggaagtggttttttatcgccctgaagaggatgccggcgatgaaaaaggctatgaatcttttccttggtttatcaaacgtgcgcacagtccatccagagggctttacagtgtacatatcaacccatatctcattcccttctttatcgggttacagaaccggtttacgcagtttcggcttagtgaaacaaaagaaatcaccaatccgtatgccatgcgtttatacgaatccctgtgtcagtatcgtaagccggatggctcaggcatcgtctctctgaaaatcgactggatcatagagcgttaccagctgcctcaaagttaccagcgtatgcctgacttccgccgccgcttcctgcagcacatatttgttcttcgggagcgccctgaaaccgtgttaatagatctcattcagaggacaaaggatgcagtaagagagctggacaatctgcagtatcgaaagatgaagaaactccttttccaggaggcacataatggaccagcagtagaagcacaggaagaagaagaggaatatggctggaatctggaccgagcctatgactatgtgaaagaaagacgaacggtaaccaagcccaacccaagcttcatgagacaactggaagagtatcaggggatcttgctggcaagacccaagagaactgcttacatttatggctccgtgtatcggcgttgtggttatgcagaccacaaggtagaaataaaacaccctggctgggcatccatcagcaggggtgtgctggtgtgtgacgagtgctgcagcgtgcaccggagcctgggacgccacatctccattgtcaagcaccttcgccacagcgcctggctctcccacgctgctgcagatgggtgcacacgcttgccagcaacggggccaactccatctgggagcactccctgctgggaccccgcacaagtgcagagcgggccggcgttaaagcaaacccccaaggacaaagttccaccccttcaagttagagtttcattcaggggccaagttaccagattgttgggattttgttgcacaagttttcctttgccgggacgattgatgggagttaaccgccaaagaccttcagcaaagcaaactaacactcgagcgtgcggaacaggcaaaccctggaagacatgtctgcgcctgctctcccctgggtgccccaggccaacttcttccacccagagaagggcacccacacctctgcacgtggctgccaaggcaggacagacactgcaggccgagctgtcttgtagtgtatggggctgaccctggctcccctgatgttaatggccgcacacccattgactatgcccaggcaggcggggcaccatgagctggcggaaaggctggttgagtgcccaatatgagcctcactgagcggctggccttctacctctgtggacgcaagccggatcacaagaatgggcattacatcatcccacagatggctgacagatctcggcaaaagtgcatgtctcagagccttgacttatccgaattggcccaaagctgcctaagaagaagctgcaggcgctcagcaaccggctttttgaggaactcgcccatggacgtgtatgacgaggtggatcgaagagaaaatgatgcagtgtggctggctacccaaaaccacagcactctggtgacagagcgcagtgccgtgcccttcctgcctgttaacccggaatactcagccacgcggaatcaggggcgacaaaagctggcccgctttaatgcccgagagtttgccaccttgatcatcgacattctcagtgaggccaagcggagacagcagggcaagagcctgagcagccccacaggcaacctcgagctgtctctgcggagcacagagcgacctcgaggaccaacacgactactacagcgtggcctctgacgaggacacagtagcacgagcccctgcgcagcaccggcgccactcggagcaaccgggcccggagcatggactcctcggacttgtctgacggggctgtgacgcctgcaggagtacctggagctgaagaaggccctggctacatcggaggcaaaggtgcagcagctcatgaaggtcaacagtagcctgagcgacgagcttccggaggcttgcagcgagagatccacaagctgcaggcggagaacctgcagttccggcagcctccaggggccggttgcccacacttccattccccagttgaacggggcgggaacacacacccttgggcgccaggcggggagaacaacaccgcaggattcgccaggccttttccatgtatgaacctggctctgccctgaagccctttgggggcccccctggggacgagctcaatacgcggctgcagcctttccacagcactgagctagaggacgacgccatctattcagtgcacgtccatgctggcctttaccggccagtaggttctgagccccagggggttctgggctctgtgctgaattcggggcttaagatgattagactgacctggtccctcatacttgttgcaacctccacacttggctctaggagatccccaatgaaaaccagatcacccccttaaaagaaaaacaggagaggctttcagagcagaaggagaatatacagcatttccaagcagaagaagaagctaaccttcttcgacgtcaaagacaatacctagagctggaatgccgtcgcttcaagagaagaatgttacttgggcgtcataacttagagcaggaccttgtcagggaggtggacatcgagcagctggatccccgcggccggactcccctgcacctggccaccacgctggggcaccttggagtgtgcccgtgtgctcctggcgcacggcgcagacgtgggcagggagaatcgcagcggctggacagtgctccaggaggctgtgagtacccgggacctggagctggtgcagctggtgcttcggtaccgggactaccagcgggtggtgaagcggctggcgggcatccccgtgctcctggagaagctgcgcaaggcccaggacttctacgtggagatgaaatgggagttcactagctgggtgcccctggtgtccaagatctgccctagtgacacctacaaagtgtggaagagcggccagaacctgagggtagacaccacactcctgggctttgaccacatgacctggcagcgagggaaccgcagctttgtcttcaggggccaaggtcaggcaggcaggaaacacaagcgccgtggtcatggagattgaccacgaccgccgggtggtgtacacagagactctggcactggctgggcaggaccgggagctgctgctggctgctgctcagcccactgaggaacaggtgctgagccggcttaccgcgcccgtcgtcaccactcagcttgacaccaagaatatctcctttgagaggaacaagactggcatcctgggctggcgcagtgaaaagacggagatggtgaatgggtatgaagctaagcatgaatctatgcaagaactggagttccgccacctcaacacaattcagaagatgcgctgtgagttgatcagattacagcatcaaactgagctcactaaccagctggaatataataagcgaagagaacgagaactaagacgaaagcatgtcatggaagttcgacagcagcctaagagtttgaagcacatatttgttcttcgggagcgccctgaaaccgtgttaatagatctcattcagaggacaaaggatgcagtaagagagctggacaatctgcagtatcgaaagatgaagaaactccttttccaggaggcacataatggaccagcagtagaagcacaggaagaagaagagcgcacctgtcgcgaccaagctgctaacacctactgctcctgcggccccgccccggaccccgcccaccgccgcggggcgggcacgccagacagcctcccgtgcggcctcgggctgagcgtgcgcgccaccggctacgtgcccagcgctcgcgtctgctccagtcgctctggcggtcagttgtcatcttctacatttgactcggagaaaaatgagagtagacgaaatctggaacttccacgcctctcagaaacctctataaaggatcgaatggccaagtaccaggcagctgtgtccaaacaaagcagctcaaccaactataca

SEQ ID NO: 1081 - DNA, 7261 bp, Homo sapiens
  SIMILAR (36)..(218): 911254mologous to Homo sapiens Human protein comprising secretory signal amino acid sequence 1,accession number AAW37864,Smith-Waterman Score=307.
  misc_feature (1)...(7261): n = a,t,c or g
tggcaagtgctccaccccagcagtcgtctttgtcaccgaaaagacccgctaagtgtgtgcaacccagagaagaaatgggttcgggagtacatcaactctttggagatgagctaggatggagagtccttgaacctgaacttacacaaatttgcctgtttctgcttgctcttgtcctagcttgggaggcttcccctcactatcctaccccacccgctccttgaagggcccagattctaccacacagcagcagttacaaaaaccttccccaggctggacgtggtggctcacgcctgtaattcccagcactttgggaggccaaggtgggtggatcacctgaggtcaggagttcaagatcagcctggccaacatggtgaacatggtgaaaccctgtctcgggaaacccctgtctctactaaaaatacaaaaaattagccgggcgtggtagcgggcgcctgtagtcccagctactcgggaggctgaggcaggagaatggcgtgaacccgggaggcggagcttgcagtgagccgagatcgcgccactgcactccagcctgggtaacaagagcgaaactctgtcaaaaaaaaaggaaagacttcctcaaactaattacattgttgttcttatcaacattaaccagaattgagtacagactgcactatgtgctgttactgtgtcgggctccatgcaaagcacttaacaagatttgttactttatccttataacaactctgtgtggtgtaggtgtaataattatcccattgtccagatgaggaaactgaggtaccaagaggttaaataacttgccatagctcgcagaggtggtaagtggggaatctaggattcacttctaagcttgaacgtggtatggttgtggtatggaaccaaggcaagactccagtctgcttacatctgactcagagatcctacaagaacatgccgactgtccctgtttaaccaaatgtcagtccaggcagcattgtctgtgtccctgattgtgcctttctctagtctgggaacactgccaggcagtgtatgtcactagatgtaaataaggccattatttgattttatgaaactctttttggaggttgagacttgtatattctgtgtgacactcccatttggatatcccaaagacaccttaaattcaatatgtcaaaaaactgaagttatcatttctgcagtctctcctttttgccctgaaaaagaacatgcacttgtttttcatatttccttatctcttggaaagacatcttgaccactcaagaatgtaagctggaaacctcagggtcacctttcttctctgtcactacccctggcttaggtcacccttacagatgtgcctcttaaatatttttcaatcgtgtctctccctattccttcctaccagtgcagccccagactgttgtgtttcatagacagctgccgcagtgccctccagactgccaccatgcctttggctgtgccctcccaccatcctccacactgctgcctggctcatctgtataaggatgattctgtaggcattgtcctgcttaaaaccatgtggtgattccaggcttgagtctgaactcagagcaaggcacatggcattctgcctggcacctgaggccacagcagcatattataggtccgctgtgccttgtgccctgagtatgtcctgttgaggccacttctattcctgctcttccttctacctgggaagcactcccttcccattgcggctgaagcctgtctcttcaaacctcagcccaacttctgcttatcttccagagcctatttgagctttcatcccttctagaagctttccctgatgttggcagagtagttttctcttcttttgtgttaccattacactctagagagacctttgtttctgcatgcatcacagtgtatttgtctttttgaaggcagggactctgacactcatcttgacagcaaaggggtgaattactcaactgtcaattcttttgtaaaatggacaatgtcaaccctgttagaagtaaatgcaataatgggtgtcacgtccttagcaccgtgcctggcccatagtatatacccagtggacacctgtacctcctctccacatccctgttgcatggtgactgggcccagaaggcagctagaattggcaactcaagcccttttggtcaggatcctttgctgggtggaagctcctcgcctactaatgcgggtgccctgtggctgaatctggtgaatccatcaggtccaggttgaaaactactgagcagagccctgctgcctctgggtattctgttcaccacccagcccttttgcatttaatgaatgtaaaaaataatggggcagctgctgttccttactctctcttcctgctgcactaagtctctgtctccctggagaggcatttaaccgcacgaaggtttatggtggaaatgacaaattgcttcttcacaacgagctcaccctgctttctaaccagttggaatcacccttgttcatgtaatattagcaatttacctgtctccttaaccactaaccatcctgagaggatttggcattctttgcagctgttaatcctctcatcacctgagggcttattaaataggtggagtgtacatctagcctttctcctacagtgaacagtcattcatgatcttttcctttttactcagcctctctcctcagctgcctgagcccaggataaggcagggtcctcccctctagaggccacagcggagagagctgggctctggaccggggagtccccggtttgactccttgcttggtcaggacttcctcaacataatcgcctggccctggtgccagggtggttgtggggctgagggaggtgcctgtgcagcccatttccctgtggaggtcagttgcccctttcctttcccttcatcaggctcaggccatccttggggcagccctgctatctgagggggtctctcccgagccgctaagacatagtcctcattcatattgggtgttgttgacaatcatcccatcctctgctgcttcattttgtgacttgtggacccaagtggggtctttgtttatcctgatccaggagagctgggaagggagacagtttgaattgctccgggcatatgttacttgttaatattttaaaatttgacttgttgcagtttttcagaggtattaatctaaaagccatttcatggaaaaaagcaacaaggaactggttttatttcttttaggtgacactaataaccaaacatgagacacatcagaatttaagtggctagtcaaaaaaaaaaaaaaaaataccagtgaaaatagcaagtctacattgatgttagttgttatataacaggcgctgttctaagcgttttgcctgtagcaactcactgaatcctcataattactttatgaagaggagattcagtaacctggtcacataggcaatgaatggccaggattcgggctctaaaactgggtctcctgaccacgacgatccctctctagggctgatggagatcatcactaaatcacctcctttgggattctctgctcgttggaaatggagtgttacctgcagagtactgctgtgacctctcctttaggcctctctgtgcagagactgcagtagtctgtgttagtgctgtcctgttgaagctggtccacacttttctggacttctggttgagccagtctgctcagatacgaacttccaaacgaacctgtttctctttggtcctcagccaggctttgtgacatcagctgctacagctgtggaaacagttgataaacagggtcaggctgctcagagggagaatgtggcagtagggtccctggcaagggttgcctgctcacttggaagggcaaaggcctagaaatccacgcgcaattgatgcacaagctgtcattgtgctgaggcttgtgggcaggggggtgtgtttctctttccttctccccttttcttcctctctttcccttgctctctttctttcttcctccttcccttcctctttccttcctccctttctttctcctttgaaaaactaagatgaggtcctggtaaagatagtacatagaagagaggcttcaagcctcaaaaagttatttcgataatatagtaagtcactgctccttattaaataagaggcctaaggggctgaggtggtgagggattgaagtgaagtctggcttggttcaggcctgaatacccaaaccaggccagctttgggttgggttggctctgcctggcatgaggagacatccaaggattccgtctccctcagagagccatgctgggaaatcttctaagcattggactttgaggttaaaataaagagtcttgcacccttggcggggatttctgaaagattgatgggattctaactgcctaacagttccatttccagatgagcgccctccgtgcatgggctttgtagcagctctctgcctttccttgccaaatgaccctatttgatctggagccctggcttgacttttctcttcagcatctgctgttttctgaccaatcccacaccttcccctggttttctcttttacagaaatcctttcttccaacttgattagatttctttgttggcttgcacatctggtcttcatttagtagggatgacacttaattgaagtaagagtttggctgcctttaaatttaacaactgcaccctgctgggggtgctgatgaggagtcagtagctgaattgtttattgaaagagatcatattgatttgtgattttcacttaagaaatgcattcccacacacccctgcatttagttgcttagctgggcactcagacagctgctttaagaatccagtacccttgtctctggagaggcgtttctcctcagtgtgcatgcagtactactgtatgcacgtggcatgtgtccatctgtcctcacagaggagactgtgcattggtagagctggagggctcctgttgtccacccagcatgccactttgaaccagctcctaaagcatgaggtccatcatgtctctattcaaaaactttcagtggctcctcattgcctgtgaatgaaatatggaatctcagcgggcggtcaggggcctcccagtctggcttcactgtgcctgtccaactcatttcctatgattgccatgcagaaacccagttctctggccacaccgaatttcttacaatcttcccattcacttggccattctgcctttatgtttttcactttctctggaatttcctccctccctttcctgcctgtatggtctcagttcttcaaagcccatttcaaatgaaaacctttgctacgaaatcttccctgattcctctcacctatagtgcacccctttgaactcagacaccctctctgtatttctcttcaggtattttagctcactttatgttataattgtttttatgattgttgtttattcttattcaacagagtcactacctgagagcagtgaccttgtgttggtcacatgtgtcccctgaaggatacagctcagtgcttggggtagtaataattgatattcttgagtgctcactacatgccagttctattctaagcactatacatgtattcatcttggttgatcctcacaaaagcccttggagggaggtactgttattagccccattttacagataaggtaactgagatctaggctgagtaacttgcctaaggctacccaggtagcaagcagcagagctgggggtccacctgggccttctgaatccaggctctcaactagtaagccacatggcttctttcattagctacttgctcaatacatatctatcaagaaaagttgtactgaagttaagagatataggggagcaggaatgggttagtttaaaaacaaggagagggaagaagagaaggaaattagaatgggccagtaggaaaagaaaagaaaggagaagtgctaagaaaccaaggaacaggccaggcgcggtggctcacgcctgtaatcccagcaccttgggaggctgaggcatgtaaatcacttgaggtcagaagttcgagacagcctgaccaacatggagaaaccctgtctcgactaaaaatacaaaaactaaaaatacaaaaattagctggggcgtgggtgggtgcatggcctggtaatcccaggctactcgtgagggctgaggcagggagaagcctggcgaacagagagtctgccctcaaaaaaaaaaaaaaacaaaacaaataaataaaaataaaaacttccctcaaacatcagattttttcacctcagcaaatactttttcctttgataattcataatcctgctgttcatttgtcacatttatgaatatctggtaatttcataaacaactaccaatggtacacttcaaatgctgattctgttgaatcttcttattttttttcccccaatgaacttagggcctatgatagagaaaatactgaaacatgctaagataataattggtcttagaaagactttacagcaagtatttaatgaaagcccactacactttccaggntctaaaaagagccagacacaatccctgcttccagagttcaccattcagaatacaggaggtcaagcactgattctgaatccattaatgggctttgatttcggtctttcaagatttgcaatagatattgatttcttccgaaaggcaaaataaaattcttccttcacacacatcattctttggattctcataaggggtattttgaagtctgtatgttgacaaggccagtagatactttgttttctctaactgccttcttctacttaagactatgtcaaagtattttgttttcccctttcaagttctcccccaacatacaccttctgcaagttttgtctatcccagtccgcttttctgtaacactttgctacccccttctgttccccttcactgtttcctctgttgctttcctccttaatagaagcctggtgatctgggcttccccatctttcctttcctggcttcttattcacatgggtgactgatcgttagcacttccttaaaagttgggttttcaataaatataactcatcagcacttccgatctgtatttccttgagcttttttttgatcttcagatctgtgcaataatactctgttcctgaatgctatttagaaatcctatcctcacaacaccagtggtttcttgaagctacttgtttcaaatgttgtatcaaaacagattgataaaggaatgtatagctcagcaaaggacgcttctgctgtaaattccccccattaaaagtactggattctataggtccaccattaaaagctggtatgggacaccaattt

SEQ ID NO: 1082 - DNA, 714 bp, Homo sapiens
  SIMILAR (592)..(714): 701254mologous to Homo sapiens Human secreted protein, SEQ ID NO: 6613,accession number AAG02532,Smith-Waterman Score=161.
aatggtgtcaccctggagagaaggaagggaaactcacataaggattagcatgtcgcctctgaggtagttaccctggaggcaatgagtcccaaagctccagataatgaaacatgttagccaatgagtatatagtaaataccagttcttgatactaaagggatattatgagttactacctataatcttttctctggagaactgctgcagaagtgatcaaagatgcaatgaaacatgacaaggtgaaaacaaacatctgagttttaaaagcctgagagatcagaagatgaactgaggtgagaggacttgactgatgctccttaagtgctattgcagctttgaagctgtacttttctagactttttactaggataattaaaggaatcagttacaaaacaaacaaaaaaatataaacaaactcattatatggcctaaacatctatctggagatagatcaacatttcaggaacatgaaaatttatctggtcaaactcattgattctgattttgatactactccacctttactgtatatttgcactgtctgatttggcagccactagccacaagttgctatttaaaaggaaattaattggccaggcgcagtggctcacacatgtaatcccagcactttgggaaaccgaggcaggtggatcgtctgaggtcaggagttcgagactagcctggtcaacatggcgaaagcccgtctctactaag

SEQ ID NO: 1083 - DNA, 589 bp, Homo sapiens
  SIMILAR (183)..(548): 981254mologous to Mus musculus putative,accession number AK012284,Smith-Waterman Score=590.
atgagaaagcgtatgcccccaaaagttgctgctgacgcctttggtgaagaatggaagggtaagtgggtccgaatcaatggtggaacgcccaaccaaggtttccccataagcaaggtgtcctgaccccatggccgtgccgcctgctactaagtaaggggccatccctgtccagacccaaggagactgagcctcgccgcctgggccccaaaagagctagcagagtccgcaaacttttcaatctctctaaagaagatgatgtccgccagtatgttgtaagaaagcccttaaataaagaaggtaagaaacctaggaccaaagcacccaagattcagcgtcttgttactccacgtgtcctgcagcacaaacggcggcgtattgctctgaagaagcagcgtaccaagaaaaataaagaagaggctgcagaatatgctaaacttttggccaagagaatgaaggaggctaaggagaagcgccaggaacaaattgcgaagagacgcagactttcctctctgcgagcttctacttctaagtctgaatccagtcagaaataagattttttgagtaacaaataaataagatcagactctga

SEQ ID NO: 1084 - DNA, 450 bp, Homo sapiens
  SIMILAR (41)..(445): 991254mologous to Homo sapiens FLJ00061 protein,accession number AK024468,Smith-Waterman Score=712.
tatccgggtcgacccacgcgtccggtgggctccaggcgtcgcgatggaggagagcgggtacgagtcggtgctctgtgtcaagcctgacgtccacgtctaccgcatccctccgcgggctaccaaccgtggctacagggctgcggagtggcagctggaccagccatcatggagtggccggctgaggatcactgcaaagggacagatggcctacatcaagctggaggacaggacgtcaggggagctctttgctcaggccccggtggatcagtttcctggcacagctgtggagagtgtgacggattccagcaggtacttcgtgatccgcatcgaagatggaaatgggcgacgggcgtttattggaattggcttcggggaccgaggagatgcctttgacttcaatggtgcattgcaagaccatttcaagtgggtgaaacagcagtgtgaattgca

SEQ ID NO: 1085 - DNA, 871 bp, Homo sapiens
  SIMILAR (5)..(100): 1001254mologous to Homo sapiens FLJ00061 protein,accession number AK024468,Smith-Waterman Score=173.
cgtcgcgatggaggagagcgggtacgagtcggtgctctgtgtcaagcctgacgtccacgtctaccgcatccctccgcgggctaccaaccgtggctacaggtgactacccaccgccagaccaggctagctccaatttaaccctttctccgccacccggacacacccactgcgggaaccgaggacagccctggccagttttggggcgagggggagctaatgctgctgcttcttccagttccaggcccgagcagggaggcggatccagagtttcgcccgtctcagttcgacgcacgggactcctggcggcggggagggcgttaaagccgtatctagcgcttagggaccccggtgggctgccgggtaccctaaacttggtcgggggtggtgatgtcacagacgcttctctttcagcgctaaccggtggccttgaagggatcctcgaaaagccttaagcggggaggtgccctatcacagacggaaatccccgagaggaggggagggagcccagagccggctgaaaggaccggtcccggggagctttaaggtgacggtcgaagcccagggaccccttcctacccagatcccttcgcacgaatttcacccttgatcacagcctggagcagttgggaggaccccttctatatttctctggtctctacctgagacgaataaacacacacgcttgtaaacatactgagtatctctgcaaaggaacacaggaaactgccctaggggaggggaaccgcccttggaaggaaacttcctttcccttttgtgctgtttgcgttttactactctttgtatgcgttatctatcaaaacgacgaaaaatattaaaagaaaaaagatacccttcatccagccaaaaaaaa

SEQ ID NO: 1086 - DNA, 1879 bp, Homo sapiens
  SIMILAR (375)..(1136): 361254mologous to Homo sapiens adenovirus E3-14.7K interacting protein 1,accession number U41654,Smith-Waterman Score= 192.
  misc_feature (1)...(1879): n = a,t,c or g
gaaagcgagcgtatctcccgagccgttgccactgacagccgcgggcgctcccatctgagtaagagccagcccgtccgcggcctctccagccccgggttcgcgctctcgactctcctgcctgcccagctgcgcgacaggagcggagcgaggcgcggcctgcgagtccccggcagcccccgtacccctccctcggcgctgcgtgtaggccgcgccgtcaggcccagtccgcggtgccccggcgggtgaatgccaaatacagccatgaaagaaaaaaggtgcttgctgatgggggaaagaagcgggtcggggaagaaccaagcaatgaaggtcgataatcttcgccaaattaccatttgctcgcgacacccggcggcctgggggccaccattgacgtggaacactcccacgtccgattcctaaggaaacctggtgctgaacctgtgggactgtggcggtcaggacaccttcatggaaaattacttcaccagccagcggagacaatatcttcccgtaacgtgggaagttttgattttaaggtgtttgacgtggagagccgcgaacttggaaaaggacatgcattattaccagtcgtgtctggaaggccatcctccaagaactctccctgacgccaaaatccttctgcctgggtgcacaaaatggattcttggttcaggaggatcagcgtgaccctgatttttaaagagcgagaggaagacctgagggcgtctgtcttcgcccgctggagtgtgcttgtttttcgaacgtccatctggggatgaggacgcttttacaaagcctgggtccaggcattcgtcttaccagctggatttccccaacgtttcagcagctgggagattgaacctcagggatttttgcccaaatcatttgaggccgatgacagttctgctgttcgaaagaagttacattcattggtaatatcacactatccagtgcaaagagcagcgcgacgtccaccggtttgagaagatcagtaatattaataaactagttcaagctgagctgcagtaaattggcccgcttccttccagagcatggaagttaggtaattccaacttcgcttgctttcatgcgacatcttttcacctaaaatacgtacgtgatgggtggtcatgtcaagatccggtcgatccctttctggggccacttctgatcaaccattcgcaatgccccggaaaccactttgaggaaactgggagagagttgaatgggccccaagccacagtcttcccttatggcgttgaatattgccaaaatgctctttctgaaaaagcctgaaatgcccttttttgtttgccacccctttaatttttaaatattccataatggccgtgtgccttaaaaaagtggggctttgaaagtgtgtgcctgccttactccctttccatcctttcctcccccgccttcccccagtcttttaaaacattgggacggtaatttacttaagttaaccccggtaggaggtttgaaggctggaccctttctgagaagttgggtatggtgtaacactaaagtagggtggttccgtgtgtgttctcaattacctggttatgataagataatgcacatcaaaagcctttacccagtatcttcctgtatcccgtctcagattcgcaaagacggaatgttactattttatcagtcaaggtattaaaatgcatttataaattcttcttggcttcattcatgaataaacgtgttagcaatttataaaaaacgataaaaaaaatctcaatnnnnnnnnnnnnnccggcggccctttaaaataaaaggccctttttaaacccctttaacacccctaagggggccttttttttcccccccatttgggtttttccccctccccgctctttttttttcc

SEQ ID NO: 1087 - DNA, 458 bp, Homo sapiens
  SIMILAR (278)..(361): 321254mologous to Homo sapiens Human myelin oligodendrocyte glycoprotein gene,accession number AAZ29204,Smith-Waterman Score= 40.
tttgcagagacaagtgaacatttatttttatgcctttcttcctatgtgtatttcaagtctttttcaaaacaaggccccaggactctccagattcaattatgtccttgggcttggtcgactgctgcaggagtctcagggagccttctacaaatgctagagtgactcatttaccaacattaaaccctaggatacatgcaacaaagcaggactccttcctccatggaatgtgccgatttcagatgacacagcacccaatgcagaaaacgctggaatttttccttggaactcgactgtgatgagaggtgcttgacatgaacatatgctactgtcttttcttttttttttttttgtatttttagtagagatggcatttctccatgttggtcaggctggtctcgaactcccaacctcaggtgatctgcccacctcagcctccctaagtgttgggattacaggca

SEQ ID NO: 1088 - DNA, 2643 bp, Homo sapiens
  SIMILAR (1942)..(2640): 931254mologous to Homo sapiens dJ475N16.3 (novel protein similar to RPL7A (60S ribosomal protein L7A)),accession number AL035587,Smith-Waterman Score=1091.
atgtttggccgctcgcggagctgggtgggcgggggccatggcaagacttcccgcaacatccactccttggaccacctcaagtatctgtaccacgttttgaccaaaaacaccacagtcacagaacagaaccggaacctgctagtggagaccatccgttccatcactgagatcctgatctggggagatcaaaatgacagctctgtatttgacttcttcctggagaagaatatgtttgttttcttcttgaacatcttgcggcaaaagtcgggccgttacgtgtgcgttcagctgctgcagaccttgaacatcctctttgagaacatcagtcacgagacctcactttattatttgctctcaaataactacgtaaattctatcatcgttcataaatttgacttttctgatgaggagattatggcctattatatatcgttcctgaaaacactttcgttaaaactcaacaaccacactgtccatttcttttataatgagcacaccaatgactttgccctgtacacagaagccatcaagtttttcaaccaccctgaaagcatggttagaattgctgtaagaaccataactttgaatgtctataaagtggataaccaggccatgctgcactacatccgagataaaactgctgttccttacttctccaatttggtctggttcattgggagccatgtgatcgaactcgatgactgcgtgcagactgatgaggagcatcggaatcggggtaaactgagtgatctggtggcagagcacctagaccacctgcactatctcaatgacatcctgatcatcaactgtgagttcctcaacgatgtgctcactgaccacctgctcaacaggctcttcctgcccctctacgtgtactcactggagaaccaggacaaggtcttcttaattatacatcatgcaccgctggtgaactcgttagctgaagtcattctgaatggtgatctgtctgagatgtacgctaagactgaacaggatattcagagaagttctgtcttacccactctaagctccttatggcagggatctcacctgtcactgaatcagctgcagtctgggctgcacaaatgctcatctcacttatgcggagcccaggctgcagctgattcagtgacaggtgagatccctgccataaggagcttagagtggctaatcagtgctggttccaaggcgcgcacattcttcttcctgaaaatgctaataggcttctgggagaaggttgattgtgaatatcaaaggcgtcaagtgctgagcacgcggctgcaagaggccttgccgtcaaatcgcctcactgatgttgcagctgtgcattcttcatgcatgttgggctttggttccacagctccacgcggctcctggattggcgatccagcggctgtgcatctgcccctacctggggagctggccgagcaccttgggtccaagggtaccaccactgtcaccaagcaccagccccaggccaagcccagcattcggtgcttcattaaacccaccgagacactcgagcggtcccttgagatgaacaagcacaagggcaagaggcgggtgcaaaagagacccaactacaaaaacgttggggaagaagaagatgaggagaaagggcccaccgaggatgcccaagaagacgccgagaaggctaaaggtacagagggtggttcaaaaggcatcaagacgagtggggagagtgaagagatcgagatggtgatcatggagcgtagcaagctctcagagctggccgccagcacctccgtgcaggagcagaacaccacggacgaggagaaaagcgccgccgccacctgctctgagagcacgcaatggagcagacccttcctggatatggtgtaccacgcgctggacagcccggatgatgattaccatgccctgttcgtgctctgcctcctctatgccatgtctcataataaagaaaatctcctgaaaaagaggaaggcttatcaggcactcaaagccacccaggcaaagcaggaacttttggcaaagaaggagcagaagaaaggaaaagggctcaggtttaagctactggaatcattcctacatgattactggcagcagaaacctgacaaggtgcatctcagacgactagaagtgaaacctcatgccgtggaattgccagataaacattccttggcctttgttgtacgcatcgaaaggattgatggcgtgagtttactggtgcagagaaccattgcaagactttgcctaaagaaaatttttagtggtgtctttgtaaaagtcaccccccagaatctacaaatgctgcgtatagtggaaacttatgtgacctggggatttccaaatctgaagtctgtccgagaactcattttgaaacgtggacaagccaaggtcaagagtaagaccatccctctgacagacaacacagtgattgaggagcacctggggaagtttggcatcatttgcttggaagacctcattcatgaaattgcattcccagggaagcatttccaggagatctcatggttcttgcgccctttccacctctcagtggcccatcatgctaccaaaaatagagtgggcttcctcaaggagatgggcacacttggctatcggggtgaacgcatcaatcagctcatccgccagctgaactag

SEQ ID NO: 1089 - DNA, 492 bp, Homo sapiens
  SIMILAR (62)..(268): 721254mologous to Mus musculus putative,accession number AK012284,Smith-Waterman Score=235.
  misc_feature (1)...(492): n = a,t,c or g
tctggggtgaagaatggaaggggttatgtggtcggaatcagtggtggaacgacaaacaaggtttccccatgaagcagggtgtcttgacccatggccgtgtccgcgtgctactgagtaaggggcattctgttacagaccaaggagaactggagaaagaaagagaaaatcagttcgtggttgcattgtggatgcaaatctgagcgttctcggctgngttattgtaaaaaaaggagagaaggatattcctggactgactgatactacagtggcggcgtattgctctgaagaagcagcgtaccaagaaaaataaagaagaggctgcagaatatgctaaacttttggccaagagaatgaaggaggctaaggagaagcgccaggaacaaattgcgaagagacgcagactttcctctctgcgagcttctacttctaagtctgaatccagtcagaaataagattttttgagtaacaaataaataagatcagactctgaaa

SEQ ID NO: 1090 - DNA, 552 bp, Homo sapiens
  SIMILAR (540)..(4): 701254mologous to Homo sapiens dJ475N16.3 (novel protein similar to RPL7A (60S ribosomal protein L7A)),accession number AL035587,Smith-Waterman Score=612.
ctagttcagctgacggatgagctgattgatgcgttcaccccgatagccaggtgtgcccatctccttgaggaagcccactctatttttggtagcatgatgggccactgagaggtggaaagggcgcaagaaccatgagatctcctggaaatgcttccctgggaaggcaatttcatgaatgaggtcttccaagcaaatgaagccaaacttccccaggtgctcctcaatcactgtgttgtctgtcagagggatggtcttattcttgaccttggcttgtccacgtttcaaaatgagttctcggacagacttcagatttggaaatccccaggtcacataaggttccactatatgcagcatttttagattgccatcaatcctttcgatgcgtacaacaaaggccaaggaatgtttatctggcaattccaaggcatgaggtttcacttctagtcgtctgagacgcaccttgtcacgtttctgccgccaggaatcatgtaggaatgattccagtcgcttaaacctgagcccttttcctttcttctgtcttgctactgccat

SEQ ID NO: 1091 - DNA, 654 bp, Homo sapiens
  SIMILAR (190)..(651): 721254mologous to Mus musculus putative,accession number AK007884,Smith-Waterman Score=572.
atggcggagcaagagcaaagaaaaatccctttggttccagaaattctcctgaaaaagaggaaggcttatcaagccctcaaagccacccaggcaaagcaggcacttttggcaaagaaggagcagaggaaaggaaaagggccaggtttaagcaactgcaattattcctacatgattcctggcagcagaaatatggcaaggattgatggcatgagtttactggtgcagagaaccattgtaagactttgcctaaagaaaatttttagtggtgtctctgtaaaagtcacccctcagaacctaaaaatgctgcatataatagaaccttgtgtgacctggggatttccaaatctgaagtctctctgggaacttcttttgaaatgtggacaagccaaggtcaagaataagaccatccttctgacagacaacacagcgattgaggagcatctggggaagtttggtgtcatttgcttggaagacctcattcatgaaattgcgctcccagggaagcatttccaggagatttcatggttcttgcaccctttccacctctcggtggcctgccatgctaccaaaaatagagtgggcatcctcaaggagatgggcacatctggctattggggtgaacgcatcaatcagctcatccccctgctgaactag

SEQ ID NO: 1092 - DNA, 409 bp, Homo sapiens
  SIMILAR (408)..(1): 891254mologous to Homo sapiens KIAA0350 protein,accession number AB002348,Smith-Waterman Score=642.
ctcagagcaggtggcggcggcgcttttctcctcgtccgtggtgttctgctcctgcacggaggtgctggcggccagctctgagagcttgctacgctccatgatcaccatctcgatctctttagccttctcggcgtcttcttgggcatcctcggtgggccctttctcctcatcttcttcttccccaacgtttttgtagttgggtctcttttgcacccgcctcttgcccttgtgcttgttcatctcaagggaccgctcgagtgtctcggtgggtttaatgaagcaccgaatgctgggcttggcagaacttctctgaatatcctgttcagtcttagcgtacatctcagacagatcaccattcagaatgacttcagctaacgagttcaccagcggtgcatgatgtataattaag

SEQ ID NO: 1093 - DNA, 3030 bp, Homo sapiens
  SIMILAR (2444)..(2941): 281254mologous to Santalum album proline rich protein,accession number AF020261,Smith-Waterman Score=144.
tgtcgtggaaagcggctcgcggttcctccaccgcctccgccgccgcattctccgcttgtgctaccgccgcgggcgctgggccgctctgctggtccggcatgagaccgtgagacgagagacgggtcggggccgccgacatgtttggccgctcgcggagctgggtgggcgggggccatggcaagacttcccgcaacatccactccttggaccacctcaagtatctgtaccacgttttgaccaaaaacaccacagtcacagaacagaaccggaacctgctagtggagaccatccgttccatcactgagatcctgatctggggagatcaaaatgacagctctgtatttgacttcttcctggagaagaatatgtttgttttcttcttgaacatcttgcggcaaaagtcgggccgttacgtgtgcgttcagctgctgcagaccttgaacatcctctttgagaacatcagtcacgagacctcactttattatttgctctcaaataactacgtaaattctatcatcgttcataaatttgacttttctgatgaggagattatggcctattatatatcgttcctgaaaacactttcgttaaaactcaacaaccacactgtccatttcttttataatgagcacaccaatgactttgccctgtacacagaagccatcaagtttttcaaccaccctgaaagcatggttagaattgctgtaagaaccataactttgaatgtctataaagtgtcattggataaccaggccatgctgcactacatccgagataaaactgctgttccttacttctccaatttggtctggttcattgggagccatgtgatcgaactcgatgactgcgtgcagactgatgaggagcatcggaatcggggtaaactgagtgatctggtggcagagcacctagaccacctgcactatctcaatgacatcctgatcatcaactgtgagttcctcaacgatgtgctcactgaccacctgctcaacaggctcttcctgcccctctacgtgtactcactggagaaccaggacaagggaggagaacggccgaaaattagcctgccggtgtctctttatcttctgtcacaggtcttcttaattatacatcatgcaccgctggtgaactcgttagctgaagtcattctgaatggtgatctgtctgagatgtacgctaagactgaacaggatattcagagaagttctgccaagcccagcattcggtgcttcattaaacccaccgagacactcgagcggtcccttgagatgaacaagcacaagggcaagaggcgggtgcaaaagagacccaactacaaaaacgttggggaagaagaagatgaggagaaagggcccaccgaggatgcccaagaagacgccgagaaggctaaaggtacagagggtggttcaaaaggcatcaagacgagtggggagagtgaagagatcgagatggtgatcatggagcgtagcaagctctcagagctggccgccagcacctccgtgcaggagcagaacaccacggacgaggagaaaagcgccgccgccacctgctctgagagcacgcaatggagcagacccttcctggatatggtgtaccacgcgctggacagcccggatgatgattaccatgccctgttcgtgctctgcctcctctatgccatgtctcataataaaggcatgggatcctgaaaaattagagcgaatccagctccccgttgccaaattgcggccgagaaggaccaccttacaaccacccgttaggttgaaagattcattcagggttcatggaacaacgtttgcccagccagatgggaagatccggctggcgacgctggagctgagctgcctgcttctgaagcagcaagtcctgatgagtgctggctgcatcatgaaggacgtgcacctggcctgcctggagggtgcgagagaagaaagtgttcaccttgtacgacatttttataagggagaagacatttttttggacatgtttgaagatgagtataggagcatgacaatgaagcccatgaacgtggaatatctcatgatggacgcctccatcctgctgcccccaacaggcacgccactgacgggcattgacttcgtgaagcggctgccgtgtggcgatgtggagaagacccggcgggccatccgggtgttcttcatgctgcgttccctgtcactgcaattgcgaggggagcctgagacacagttgccgctgactcgggaggaggacctgatcaagactgatgatgtcctggatctgaataacagcgacttgattgcatgtacagtgatcaccaaggatggcggcatggtccagcgatccctggctgtggatatttaccagatgagtttggtggagcctgatgtgtccaggcttggctggggagtggtcaagtttgcaggcctattgcaggacatgcaggtgactggcgtggaggacgacagccgtgccctgaacatcaccatccacaagcctgcgtccagcccccattccaagcccttccccatcctccaggccaccttcatcttctcagaccacatccgctgcatcatcgccaagcagcgcctggccaaaggccgcatccaggcaaggcgcatgaagatgcagagaatagctgccctcctggacctcccaatccagcccaccactgaagtcctggggtttggactcggctcctccacctccactcagcacctgcctttccgcttctacgaccaggggcgccggggcagcagcgaccccacagtgcagcgctccgtgtttgcatcggtggacaaggtgccaggcttcgccgtggcccagtgcataaaccagcacagctccccgtccctgtcctcacagtcgccaccctccgccagcgggagccccagcggcagcgggagcaccagccactgcgactctggaggcaccagctcgtcctccaccccctccacagcccagagtccagcagtcaggagtggcaggaaaggacgccgacgagtgttcagcctgtcggaggccgacagtcatggcggccactgggtttag

SEQ ID NO: 1094 - DNA, 2630 bp, Homo sapiens
  SIMILAR (46)..(198): 801254mologous to Homo sapiens Human myelin oligodendrocyte glycoprotein gene,accession number AAZ29204,Smith-Waterman Score= 241.
ccgagatggagtctcgctctgtcgcccagctggagtgcactggtgaatcttggctcactgcaatctccgcctcctgggttcaagcgattttcctgccttagcctctcgagtagctgggactacaggcacgtgccaccacacccagctcatttttgtatttttagtagagacagggtttcaccatgttggtcaggctggtacatgcatgcaatcccagctgatcaaggggctgagggagaatcacttgaacccaggaggcggaggctgcaatgagccgagatcacggccactgcgctccagcctgggcaacagggtgagactgtctcaaagagaaaaacaaaacccataagatgcacaggtatctgagaagggtctaaacaccctagaactgcaagcaaaattttgaggggtatcccatgttttcccgggcgaaaggggtccctcatttctcaaaatccttaacctttttggaaaaaagttattaagcaagtttccaggttacgattcaaaaagccacaagatccatttagagccagtcaaagtttgagaatttttcaaagccatcactgaaaaagttggaacacatactcacagcagagacaagtgatcattttatttttatgcctttcttcctatgtgtatttcaagtctttttcaaaacaaggccccaggactctccagattcaattatgtccttgggcttggtcgacgtgctgcaggagtcttagggagccttgtacaaatgctagagttactcatttaccaacattaaacccgagaatagaagatgcaacaaagcaggactccttcctccatggaatggtgccgattgtcagacaagggcagcaccgaatgtaggaaaacgctggggaattttttccttgggaactgggactgtggatgagagggtgctttgcccatggaaccataaggctactgtcttttctttgacccttcctttccagtttttgaagataaagcaggaaataatcttctctgaagatgcttgataaaaattcccaaaacaacaaaacacatgcttccacttcattgataaaaaatttaccgcagtttggcacctaagagtatggcaacagcaacaaaaagtaatttcaaagagttaagatttcttcagcaaaatagatgattcacatcttcaagtcctttttgaaaatcagttattaatattattcttccctcatttccatctgaatgactgcagcaatagttttttgttttttttttccgagatggagtctcgctctgtcgcccagctggagtgcactggtgcaatcttggctcactgcaatctctgcctcctgggttcaagcgattttcctgccttagcctctcgagtagctgggactacaggcacgcgccaccacacccagctcatttttgtatttttagtagagacagggtttccccatgttggccaggatggtctcaatctcctggacctcatggtctgcccgcctgggcctccccaaagtgctgggattacagccgtgagccaccgcgccccggccagcaatacagtttttcagttactcgaacatctttaagccctataactcttaggctatgcatagccccatgtcctaatcaggcattcactgatcccagcagggttctccatctatttgtaccagcctcctctattcctcccaatctcaaggttactcttaaatactagtaaatgcaaaaagaacttgtaaagtggccaaggcatggcctatcaaaaagtccacccaaaggcaagttttcagccctgcctcacctgggtctagttcagctgacggatgagctgattgatgcgttcaccccgatagcccaggtgtgcccatctccttgaggaagcccactcttatttttggtagcatgacgggccactgagacggtggaaagggcacaagaaccatgagatctcctggaaatgcttccctgggaaggcaatttcatgaatgaggtcttccaagcaaatgacgccaaactttccccaggtgctcctccatcactgtaatgtcttgtcagagggatggtcttattcttgaccttggcttgtccacgtttcaaaatgagttctcggacagacttcagatttggaaatccccaggtcacataaggttccactatacgcagccatttttgaatcctggggggtgcctttacaaaagacaccactaaaaattttccttagggcgaagtcttgcaatggttctctgcaccaagtaaaactcacgccgtaaatcctttcgatgcgtacaaacaaaggccaaggaatgtttatctggcaattccaaggcatgaggtttcacttctagtcgtctgagacgcaccttgtcacgtttctgccgccaggaatcatgtaggaatgattccagtcgcttaaacctgagcccttttcctttcttctgctggtctgtcaaaccgttggggggagctcgtcaataccaaatgtagtccaacacatgcgggataaaactcaccaaataaaaattctaattactttctcttggttccccaccattacctccttctttgccaaaagtgcctgctttgcctgggtggctttgagggcttgataagccttcctctttttcaggagattttctggaaccaaagggatt

SEQ ID NO: 1095 - DNA, 776 bp, Homo sapiens
  SIMILAR (100)..(330): 771254mologous to Gorilla gorilla beta-globin,accession number X61109,Smith-Waterman Score=266.
ccactgaagcgctcagatggctgtaacgacggccgacccacgcgtccgcccacgcgtccggacacaactgtgttcactagcaacctcaaacagacacgcatggtgcatctgactcctgaggagaagtctgccgttactgccctgtggggcaaggtgaacgtggatgaaagttggtggtaaggccctgggcaggctgctggtggtctacccttgggacccagaggttcctttgagtcctttggggatctgtccactcctgatgctgttatgggcaaccctaaggtgaaggctcatggcaagaaagtgctccgcggtgcctttagtgatggccctggctcacctgggacaacctcaagggcacctttgctcacactgaagtgagcttgcactgttgacaagcttgcacgtgggatcctggagaacttcagggctcctggggcaacgtgctggtctgtgttgctgggcccatcacttttgggaaaagaatttcaaccccaccagttgcaggcttgcctaatcaagaaaattggttggcttggtgttggctaaatgcccttgggccacaagtaatcacttaagcctcgctttccttgctggtccaatttccaattaaaaggttcctttggttccctaagtccaaatacttaaactggggggatattattgaaagggccttgagcattttggattttgcctaataaaaaacatttattttcatcgcatacaagaataaaacaagcgcggccgattaagaggatacttcaggggcgcaagat

SEQ ID NO: 1096 - DNA, 496 bp, Homo sapiens
  SIMILAR (1)..(264): 861254mologous to Homo sapiens cathepsin C,accession number X87212,Smith-Waterman Score=397.
  misc_feature (1)...(496): n = a,t,c or g
gggggacattgcancgcctgcaggattgcggcacgagcctatcttgacctgctgcgcacctgggtcttccaggtgggctccagcggttcccagcgcgatgtcaactgctcggttatgggaccacaagaaaaaaaagtagtggtgtaccttcagaagctggatacagcatatgatgaccttggcaattctggccatttcaccatcatttacaaccaaggctttgagattgtgttgaatgactacaagtggtttgccttttttaaggatgtcactgattttatcagtcatttgttcatgcagctgggaactgtggggatatatgatttgccacatctgaggaacaaactggccatgaacagacgttggggctaagagacagagcagcctgcgacagtgtggacctacctgtagcagctagcaaaggcctctagcagctacagtcccttctggagtctttatttgcatgcaaaatgcacaggagtcctggtgacctacc

SEQ ID NO: 1097 - DNA, 1128 bp, Homo sapiens
  SIMILAR (232)..(726): 951254mologous to Homo sapiens cathepsin C,accession number X87212,Smith-Waterman Score=845.
atggcttccagaggtgttcatgcagaagactggatgcaggacccttggtggcaccagtgtgcagatgagcagatagtgactgattgccactgggtaattaaaggcacccacaggtctgagccctcatctatgaaggttaaacgtatcattcctatcagcactaattggttttataggatacagacctctagtttgctgaataaactttggaaggattcagattatgaggttctaaactgtagagcctttgaggagaaaggaccacaagaaaaaaaagtagtggtgtaccttcagaagctggatacagcatatgatgaccttggcaattctggccatttcaccatcatttacaaccaaggctttgagattgtgttgaatgactacaagtggtttgccttttttaagtataaagaagagggcagcaaggtgaccacttactgcaacgagacaatgactgggtgggtgcatgatgtgttgggccggaactgggcttgtttcaccggaaagaaggtgggaactgcctctgagaatgtgtatgtcaacatagcacaccttaagaattctcaggaaaagtattctaataggctctacaagtatgatcacaactttgtgaaagctatcaatgccattcagaagtcttggactgcaactacatacatggaatatgagactcttaccctgggagatatgattaggagaagtggtggccacagtcgaaaaatcccaagcaaatactacaaacacctctatgcaaagaaactagaaaatctagaagaaatggataaattcctggatgcatacacactcccaagactgaatcaggaagaagttggatccctgaatagatcaataacaagttatgaaagtgaggcagtaataaatagcctactaatgaaaaaaagtccaggaccagatggatttacagttgaattctaccagaggtacaaagaggagctgataccctttcttctgaaactattccaaacaattgaaaaggagggactcctccctaactcattttatgaggccagcatcatcctgataccaaaacctggcagagatacgacaacaaaaagaaaacttcagtccaatatccctgatgaacttcgacgcaaaaaatctcaatga

SEQ ID NO: 1098 - DNA, 1941 bp, Homo sapiens
  SIMILAR (1516)..(1905): 721254mologous to Homo sapiens cathepsin C,accession number X87212,Smith-Waterman Score=547.
atgtggaagcatctttggaactgggtaataggcagtggttggaagactttggacgtccttgaagaagataggaagacaaaggaaaatttggtacttcttagagacttctcaagtggttgtgaccaaagtattgatagaaatatggacagtgaagtccaggctgatgagttctcagatagaaatgaggaagttattgggaactggagtaaaggtcagccttgttacaccctagcaaaggacttgtctgcgttgtgtccataccctaaggctttgtggaaggttgaactaaagagtgatgatctaggagagattcccctggagcttcagcgccttgttcatggtggccaagtgaatttggatatggaggatcatcaggatcaagaatacataaaacctagattgaggttcaaggcttttagtggagaagggcaaaaacttggaagccttacacctgaaatagtcagtacaccttcctctccagaagaggaggataaatcaatacttaatgcagttgttcttattgatgattcagtgccaacaacaaaaattcaaatcaggttagcagatgggagtcgtttgatacaaagattcaatagtacacacaggcgcagggcagtcaacggcccttcaaaccagctacccgacaaaccagggtctccatctccattctgtctggcacctctaatcacagtttgccctgcagctgatgacccctcgcctgcgctgtggctccacctcgttgctgctaggagtacaagtcaaaggaacggacaggtgctgtgctatctacctcgcaaatggggagccgtggcagtttgcacttcagtggaagcatgctgttgggtcttttggctgctggaaaggcaaaatgactcaggaatgcaattaggagggcctccgccctccgccatcttccgctggctagcggcgcccgctgcggacgcacctgccgcaacttccggggccggttgcctggcaaccgcaggaggggcgaagacgcgcaagttggccttggcagaattgtatgaagatgaagtgaagtgcaaatcttccaagtctaatagacctaaagccacagtcttcaagagcccacggacaccacctcaacgcactgttaaaaactggttccagctaatagcaccaaatgctggtgaggatgcggaacaacaagaacttgcatttattgctggtgggactgcaaaatggtacagccactttggaagaccatttggcaatttattacagagagctacgtggaatgtcagcagaaaactgctcaggaccacacaaatatccgggagccttagatactggggctttccaggcttccaggcaaaagtagctgcaactctggcaaaacaggaggttatacccccttacctatcccttggaagaggcgctgaattcaaggggctgagccaaaatagtctgcaggctccactccatggcacctcacagggtaagaaaaatgactaccctgagactgccgtactgcccaagcttccacgtgaaaaggtttccaggagagagaaacgtctggccagctccagatgtctcagcttaggcactaaatgtatgagtgaagaagccttcttggtcattacaaactctagcagttgcagctgtgaaggcggcttcccataccttattgcaggaaagtacgcccaagattttgggctggtggaagaagcttgcttcccctacacaggcactgattctccatgcaaaatgaaggaagactgctttcgttattactcctctgagtaccactatgtaggaggtttctatggaggctgcaatgaagccctgatgaagcttgagttggtccatcatgggcccatggcagttgcttttgaagtatatgatgacttcctccactacaaaaaggggatctaccaccacacttggtctaagaagaccctttccacccctttgagctga

SEQ ID NO: 1099 - DNA, 2466 bp, Homo sapiens
  SIMILAR (616)..(1947): 521254mologous to Homo sapiens cathepsin C,accession number X87212,Smith-Waterman Score=911.
atgacataccccgaaaacattcaaatcaagaaaatcacaggggtacagtggatggtcccccttaagtataaagaagagggcagcaaggtgaccacttactgcaacgagacaatgactgggtgggtgcatgatgtgttgggccggaactgggcttgtttcaccggaaagaaggtgggaactgcctctgagaatgtgtatgtcaacatagcacaccttaagaattctcaggaaaagtattctaataggctctacaagtatgatcacaactttgtgaaagctatcaatgccattcagaagtcttggactgcaactacatacatggaatatgagactcttaccctgggagatatgattaggagaagtggtggccacagtcgaaaaatcccaagctctgtgccgctctgttcctctgctcctctggatgttcagctccttgtatctgtgcctgctaagattttgggtttatatgggggaaggatggggggcatggcgggccaaaaggcaccttttttgagagcacctgtcataggggtgtcctttgctgacagcttccagccatcacggcttcaggattcacctcagcttttcaatcaaggccaactgctaagtgcagcacaggtgggctccagcggttcccagcgcgatgtcaactgctcggttatgggaccacaagaaaaaaaagtagtggtgtaccttcagaagctggatacagcatatgatgaccttgggcaattctgggccatttcaccatcatttacaaccaaggctttgagattgtgttgaatgacttacaagtgggtttgcctttttttaagtataaagaaggaggggcagcaagggtgaccacttacttgcaacgagacaatgaccgggtggggggcatgatgtgtttggggccggaactgggctttgtttcaccggaaagaaggttggggactgcctctgaggaatgtgtatgtcaacacagcacaccttaaggaattctcaggaaaaagtattctaatagggctctacaagtatgatcacaactttgtgaaaggctatcaatgccattcagaagtctttgactgcaactacatacatgggaatatgagactcttacccctgggagatatgattaggagaaagtggtgggccaccagtcgaaaaatccccagggcccaaacctgcaccactgactgctgaatacagccaaaagattttttgcatttgccaacatcttgggactggaggaatgttcatgggatccaattttgtcagtcctgttcgaaaccaagcatcctgtggacagctgctacttcatttgacttctatgggtatgctagaaggcgaggaatccgtatactaaccaacaattctcagaccccaatcctaagccctcaggaggttgtgtcttgtaggccaggtatgctcaaggctgtgaaggcggacttcccataccttattgcaggaaagtacgcccaagattttgggctggtggaagaagcttgcttcccctacacaggcactgattctccatgcaaaatgaaggaagactgctttcgttattactccctctgagtaccactatgtagggaggtttctatgggaggctgcaatgaagccctgatggaagctttgagttggtccatccatggggcccatgggaggtttgctttttggaagtatatgatgacttcctccactacaaaaaaggggatcctaccccccacactggtcttaagagacccttttcaaccccttttgagcctgactaatcatgctgttcctgcttgtggggctatggcacctgactcaagcctctgggaatggaatactcggattgttaaaaacaagctgggggcaccggcttgggggttaagaaatggctacttcccggatccccagaggaactgatgagtgtgcaattgagagcatagcagtggcagccacaccccaattcctaaattttaggggaaggcttcccagtattttcataaatggatctgcatccagttgtaaagggggaattggtatattcacagactgtagactttcaacaagcatcttcagaagcttacaaatagattttccatgaagatatttggtcttcagaatttaaaactgcccttaaattttaatatacctttccaatcggccactggccattttttttctaagtattccaatttaagtggggaattttcctggaagatggtcagcctatgaagtaattaggagttttgcttaatcatttgtaattcaaacatgctatattttttaaaatcaatgtgaaaacatagacttatttttaaagttgtaccaatccacaagaaaataagtggcaagtaattatcacaaacttttaaaatagatgctcatatttttaaaataaagttttaaaaataactgcattatggagtttatgtttacttcagggaatttttatcactgactcagtaagattcacttatgttacctatgtaa

SEQ ID NO: 1100 - DNA, 687 bp, Homo sapiens
  SIMILAR (24)..(638): 931254mologous to Mus musculus putative,accession number AK012284,Smith-Waterman Score=926.
gaagggttatggggtcggatcaggggtgggacgacaaacaaggtttccccatgaagcagggtgtcttgacccatggccgtgtccagggtgtcttaccccatggccgtgtccgcctgctcttgagtaacgggcattcttgttccagaccaagcagaactggagaaagaaagagaaaatcagttcgtggttgcattgtggatgcaaatctgagcgttctcaacttggttattgtaaaaaaaggagagaaggatattcctggactgactgatactacagtgcctcgccgcctgggccccaaaagagctagcagaatccgcaaacttttcaatctctctaaagaagatgatgtccgccagtatgttgtaagaaagcccttaaataaagaaggtaagaaacctaggaccaaagcacccaagattcagcgtcttgttactccacgtgtcctgcagcacaaacggcggcgtattgctctgaagaagcagcgtaccaagaaaaataaagaagaggctgcagaatatgctaaacttttggccaagagaatgaaggaggctaaggagaagcgccaggaacaaattgcgaagagacgcagactttcctctctgcgagcttctacttctaagtctgaatccagtcagaaataagattttttgagtaacaaataaataagatcagactctgaaaaaaaaa

SEQ ID NO: 1101 - DNA, 489 bp, Homo sapiens
  SIMILAR (250)..(486): 901254mologous to Homo sapiens TB2,accession number M74090,Smith-Waterman Score=373.
  misc_feature (1)...(489): n = a,t,c or g
cggtcgacgatttcgtccggcactaggaacagccccgagcggcgagacggtccccgccatgtctgcggccatgagggagaggttcgaccggttcctgcacgagaagaactgcatgactgaccttctggccaagctcgaggccaaaaccggcgtgaacaggagcttcatcgctcttggtgtcatcggactggtggccttgtacctggtgttcggttatggagcctctctcctctgcaacctgataggatttggctacccagcctacatctctgtggcttcctgttgtggtgcatggccccgagcccttctaatggggctgaactgctctacaagcgcatcatccgtcctttcttcctgaagcacgagtcccagatggacagtgtggtcaaggaccttaaagacaaggccaaagagactgcagatgccatcactaaagaagcgaagaaagctaccgtgaatttactgggtgaagaanagaagagcacctan

SEQ ID NO: 1102 - DNA, 918 bp, Homo sapiens
  SIMILAR (379)..(909): 991254mologous to Escherichia coli K12 putative regulator,accession number AE000330,Smith-Waterman Score=881.
atggtagatcaggtaaaagtcgttgccgatgatcaggctccggctgaacagtcgctacggcgcaatctcacaaaccgacatattcagcttattgccattggcggtgccattggatatttcaccggctggacttactggttctgctgggttgtaaccggtatggcagacgtggtggcgatcacggcttatgctcagttctggttccccgatctctccgactgggtcgcctcgctggcggtgatagtgctgctgctgacgctcaatctcgccaccgtgaaaatgttcggtgtcatcggactggtggccttgtacctggtgttcggttatggagcctctctcctctgcaacctgataggatttggctacccagcctacatctccgaatgtccgcccacatacggcgtgaaaccgggtctggtggttggtttgattgctggcggagaatatgccattcagcacgcggtggaaggcgcggaagatagccgggaaggcggtgttaatgatctgaaaaatattaatttaacggcacaggatgtggtggttggcattgctgccagcggtcgcacgccgtatgtgattgccggactggaatacgcacgccagctcggctgccgcacagtgggaatttcctgtaatccggggagcgccgtttcaaccaccgctgagtttgccattacaccgattgtaggtgccgaagttgttaccggttcttcgcggatgaaagcaggtacagcgcagaaactggtgctcaatatgctttccaccgggctgatgattaaatccggcaaagtgttcggcaacctcatggtcgatgtggtcgccaccaacgaagaactgcatgtgcgacaggtcaatattgttaaaaacgccaccggatgtagcgcagagcaagcggaagcggcgttaattgaatggtag

SEQ ID NO: 1103 - DNA, 3189 bp, Homo sapiens
  SIMILAR (74)..(235): 901254mologous to Homo sapiens Human secreted protein, SEQ ID NO: 8007,accession number AAG03926,Smith-Waterman Score=250.
tttcgtgccgcagtcgccgctccagtctatccggcactaggaacagccccgggcggcgagacggtccccgaacatgactgcggccatgagggagaggttcgagcggatcctgcacgataagaactgcatgactgaccttctggccaagctcgaggccaaaaccggcgtgaacaggagcttcatcgctcttggtgtcatcggactggaggccttgtacctggtgttcggttatggagacatctctcctctgcaacctgataggatttggctacccagcctacatctcaattaaagctatagagagtcccaacaaagaagatgataccccagtggctgaacctactgggtagtgtaatggtgtgttcagtcattgctgaaattcgttctctgatattcttcctgtcatgggttccccttctaactacatggctgaaagtgtggcttcctggttggttggtgcaatggcccccgagccccttctaaatgggggctgaaactgctctaaaaggcgcatcatccggtccttttctttccctggaagcacgaagtcccagattggacaagtgttggtcaaggacccttaaagaccaaggccaaaagagactgcagatgccaatcactaaaagaagccgaagaaaagcctaccgtgaattttactggggtgaaagaaaaagaaagagcacctaaaccagactaaaccagactggatggaaactttcctgccctctctgtaccttcctacttggaagcttggatgttatattaggggactggtggtataattattttaataatgttgccttggaaacatttttgagatattaaagattggaatgtgttgtaagtttcttttgcttacttttactgtctatatatatagggagcactttaaacttaatgcagtgggcagtgtccacgtttttggagaatgtattttgcctctggggtaggaaaagatgtatgttgctatcctgcaggaaatataaacttaaaataaaattatataccccacaggctgtgtactttactgggctctccctgcacgcattttctctgtagttacatttaggataatctttatggttctacttcctataatgtacaattttatataattctgaaatgtttttaatgtatttgtgcacatgtacatatggaaatgttactgtctgactacaacatgcatcatgctcatggggagggagcaggggaaggttgtatgtgtcatttataacttctgtacagtaagaccacctgcaacaagctggaggaaccattgtgctggtgtggtctactaaataatactttaggaaatacgtgattaatatgcaagtgaacaaagtgagaaatgaaatcgaatggagattggcctggttgtttccgtagtatatggcatatgaataccaggatagctttataaagcagttagttagttagttactcactctagtgataaatcgggaaatttacacacacacacacacacacacacacacacacacacacacacacacacacacagagtaccctgtaactctcaattccctgaaaaactagtaatactgtcttatctgctataaactttacatatttgtctattgtcaagatgctacaatggaaaccatttctggttttatcttcaaagcggagaaacatgttgatttagtcttctttcccaatcttcttttttaaaccagtttaaggaacttctgaagatttgtccacctctgattacatgtatgttcttgtttgtatcattagcaaccaacatgctaaatggccggcacctagctctaagagcaattctgggagaatgaaaggaagtataaagtaacccataatctgcttggcaatagttaagtcaatctattcttcagtttttcttctggcctttaaggtcaaacacaagaggcttccctagtttacaagtcagagtcacttgtagtccatttaaatgccctcatccgtattctttgtgttgataagctgcacatgactacatagtaagtacaggaacagtaaagttaaaacgggatgtctccattgatctgccaaatcgttataggaggaggcatttgtctgggactaggaaaatctggagtttttacaccatactgtttaggagtccttttggatttaaactggactaaaacaagtgtataactaaactaacaagattaaatatccagccagtacaagtattttttaaggcaaataaggatgattagcttaccctgagataacacatcagtaagaacattaacaatgtctcatgatgtaaaaaatattaaagatatcaatactaagtgacagtatcactctaatataatatggatcagagcatttattttggggaggaaaacagtggtgattaccggcattttattaaacttaaaactttgtagaaagcaaacaaaattgttcttgggagaaaatcaacttttagattaaaaaaattttaagtatctaggagtatttaaatccttttcccataaataaaagtacagttttcttggtggcagaatgaaaatcagcaacttctagcatatagactatataatcagattgacagcatatagaatattattatcagacaagatggaggaggtacaaaagttactattgctcataatgacttacaggctaaaattagttttaaaatactatattaaattctgaatgcaattttttttttggttcccttggagaccaaaaatttaagttaaactgttgctggccagtcctaagtgtaaaatgttaaacagccaggagaaagttaagaaattgaagccagttcctgttgccatgatttccccaaatgaaatactgccttggcctagagtttgaaaaactaattgagcctgtgcccggcctagaaaacaagcgtttatttgaatgtgaatagtgtttcaaaggtatgtagttaccgaattccttaccaaacagcttaaattcttcaagaaagaattcctgcagcagttattcccttacctgaaggcttcaatcatttggatcaacaactgctactctcgggaagactcctctactcacagctgaagaaaatgagcacacccttcacactgttattacctatcctgaagatgtgatacactgaatggaaataaatagatgtaaataaaattgagttatcatttaaaaaaaaaaaaaaagggcggccgctaaagagta

SEQ ID NO: 1104 - DNA, 390 bp, Homo sapiens
  SIMILAR (169)..(390): 891254mologous to Mus musculus putative,accession number AK008158,Smith-Waterman Score=320.
gcagcccttttcccgacccctacggaaagacgagttcaggggccgtcctggcgaggtcaaaacatttagtctggtcttttcagggctgggtcagttagaacctaaacaaactagagacctggttgcaacccctcaggctctgctgatgctgtccccctttgttcctgcagcgtggaccctgccagcagccaggccatggagctctctgatgtcaccctcattgagggtgtgggtaatgaggtgatggtggtggcaggtgtggtggtgctgattctatccttggtcctagcttggctctctacctacgtagcagacagcggtagcaaccagctcctgggcgctattgtgtcagcaggcgacacatccgtcctccacctgtggcatgtggag

SEQ ID NO: 1105 - DNA, 491 bp, Homo sapiens
  SIMILAR (153)..(230): 1001254mologous to Homo sapiens Human secreted protein encoded by gene 18,accession number AAY76141,Smith-Waterman Score= 122.
  misc_feature (1)...(491): n = a,t,c or g
gcaatttgcagtgtgccaggcntgtgccaagtattttgcttcgatgatttcacgtcatcttcaaaacaacctcatgagcgtggaccctgccagcagccaggccatggagctctctgatgtcaccctcattgagggtgtgnggtaatgaggtgatggtggtggcaggtgtggtggtgctgattctagccttggtcctagcttggctctctacctacgtagcagacagcggtanaaccagctcctgggcgctattgtgtcagcaggcgacacatccgtcctccacctggggcatgtggaccacctggtggcanggccaatggcaaccccgagccaactgaactcccccatccatcagagggtaatgatgagaaggctgaagaggcgggtgaaggtcggggagactccacttggggaggctggagctgggggtggtgttgagcccagccttgagcatctccttgacatccaangcctgcccaaaagacaagcat

SEQ ID NO: 1106 - DNA, 410 bp, Homo sapiens
gaatcagcaccaccacaccttgccaccaccatcacctcattacccacaccctcaatgagggtgacatcagagagctccatggcctggctgctggcagggtccacgctgcaggaacaaagggggacagcatcaagcagagcctgaggggttgcaaccaggtctctagtttgtttaggttctaactgacccagccctgtccatctttctattagactcctggtagacaaggatcgtatgtatttctcttggtactgaagtgtccaatataatgccccagtagttgctcaaagaattatctcatgaggttgttttgaagatgacgtgaaatcatcgaagcaaaatacttggcacagtgcctggcacacgtgaccgcacggtgaggaggggtcccgcaccctttttcctcgtgc

SEQ ID NO: 1107 - DNA, 506 bp, Homo sapiens
  SIMILAR (304)..(11): 771254mologous to Mus musculus putative,accession number AK008158,Smith-Waterman Score=354.
tcgccagcctctcaacattgtcatcattaccctctgatgatgggtagttcagtggttcggggtgcctttggcttgccaccagttggtccacatgctccaggtgtaggccgaatgtgtcgcctgttaacacaatagcgcccaggagctggttgctaccgctgtctgctacgtaggtagagagccaagctaggaccaaggctagaatcagcaccaccacacctgccaccaccatcacctcattacccacaccctcaatgagggtgacatcagagagctccatggcctggctgctggcagggtccacgcgtgaccgcacggtgaggaggggtcccgcaccctttttctgaggcgaaggttccgcttttggatggtcctattccctcggcgttggactggggtccatgggcccacccgaaccgaagggctgcctggccccagcctccgtgataagaccagttgtcccggccagtgaggagtagggtcggctaagggggtcacaaaccgtc

SEQ ID NO: 1108 - DNA, 1274 bp, Homo sapiens
  SIMILAR (513)..(1271): 991254mologous to Homo sapiens Human transmembrane protein HTMPN-69,accession number AAY57945,Smith-Waterman Score=1304.
aaatgagaccctgaacgcgtcccgaccgcccggaatcccggtcgacccacgcgtccggagaccggaccctgaacagaatcgcatattgccagtttttttcccgacccctacggaaagacgagtccaggggccgtcctggcgaggtcaaaacatttagtctggtcttttcagtgtgccaggcactgtgccaagtattttgcttcgatgatttcacgtcatcttcaaaacaacctcatgagataattctttgagcaactactggggcattatattggacacttcagtaccaagagaaatacatacgatccttgtctaccaggagtctaatagaaagatggacagcgtggaccctgccagcagccaggccatggagctctctgatgtcaccctcattgagggtgtgggtaatgaggtgatggtggtggcaggtgtggtggtgctgattctagccttggtcctagcttggctctctacctacgtagcagacagcggtagcaaccagctcctgggcagctattgtgtcacctggcgacacatccgtcctccacctggggcatgtggaccacctggtggcaggccaaggcaaacccgagccaactgaactcccccatccatcagagggtaatgatgagaaggctgaagaggcgggtgaaggtcggggagactccactggggaggctggagctgggggtggtgttgagcccagccttgagcatctccttgacatccaaggcctgcccaaaagacaagcaggtgcaggcagcagcagtccagaggcccccctgagatctgaggatagcacctgcctccctcccagccctggcctcatcactgtgcggctcaaattcctcaatgataccgaggagctggctgtggctaggccagaggataccgtgggtgccctgaagagcaaatacttccctggacaagaaagccagatgaaactgatctaccagggccgcctgctacaagacccagcccgcacactgcgttctctgaacattaccgacaactgtgtgattcactgccaccgctcacccccagggtcagctgttccaggcccctcagcctccttggccccctcggccactgagccacccagccttggtgtcaatgtgggcagcctcatggtgcctgtctttgtggtgctgttgggtgtggtctggtacttccgaatcaattaccgccaattcttcacagcacctgccactgtctccctggtgggagtcaccgtcttcttcagcttcctagtatttgggatgtatggacgataa

SEQ ID NO: 1109 - DNA, 1026 bp, Homo sapiens
ttgataccactgcaggttcgggaacgtaattcccggtgcgacccacgcgttcgagagaccggaccctgaacagaatcgcagattgccctcccttttccctacccctacggagagactagtgcaggggccgacctggcgaggtcaaaacatttagcctggtcttttcaggcgaggacttccccatccaggcacagggccggtccaatccccctttaatttcccatgactcctcgcgtcctgaagccccgcccccagttccccagccccgccccgaagtttgaggggtgtggacggtttgtgacccccttagccgaccctactcctcactggccgggacaactggtcttatcacggaggctggggccaggcagcccttcggttcgggtgggcccatggaccccagtccagcgccgagggaataggaccatccaaaagcggaaccttcgcctcagaaaaagggtgcgggacccctcctcaccgtgcggtcacggtacggacagggtagatcacaggctgagggacagagcaaagacccctgaggccggacacctggggtcctgccgggcccctccccacgagagttccctgtgtctgtgccaatcgttttcgtctttctttgccgcagattcttttcctgtaaatcatggataatgacattaaccttcttaccatcaggggttagttgtgggtgtgataaataattactaccgttattaagcaattgcaatttgcagtgtgcccggcactgtgccaagtattttgcttcgatgatttcacgtcatcttcaaaacaacctcatgagggctgggtcagttagaacctaaacaaactagagacctggatgcaacccctcaggctctgctgatgctgaccccctttgttcctgcaacgaggaccctgccagcagccaggccatggagctctctgatgtcaccctcattgaaggagagggtaaatgaggtgatggtggtggcaggtgtggtggtgctgattctagccttggtcctagcttggctctctacctac

SEQ ID NO: 1110 - DNA, 506 bp, Homo sapiens
  SIMILAR (157)..(495): 851254mologous to Homo sapiens DKFZP564C186 protein,accession number BC003555,Smith-Waterman Score=471.
gacagagacgccgagttctacaagttcctgcaggagaatgaccagagccagctaaacttcagcgactcggacagctctgaggaggaagaggagtcgttccactccctgccatatgtgctggaggaagccagcgttccgagcagctgtggccaccaccaaggggaccaggaaagtgctgaggccaacaaattccaggtcacggacagtgctgtgttcaatgctctggtcgtgttcaatgctctggtcaccttctgcatcagagaccttactggctgtctccagaagctgctgattggaaaggtggcaaaggacagcagcaggatgctgcagccgtccagcagcctgctctgggggaagctccgtgtggacatcaaggcgtacctgggctcggtcatacagctggtgtcctgtgtggcagagacagtggtgttggcggccgtgctatggcacatcagcgtgctggtgccctgcttcctgaccttccccaagcagtgctcaagagaatg

SEQ ID NO: 1111 - DNA, 595 bp, Homo sapiens
  SIMILAR (24)..(59): 661254mologous to Mus musculus putative,accession number AK012284,Smith-Waterman Score=42.
  misc_feature (1)...(595): n = a,t,c or g
gaagggttagtgggtccgatcaggggtggaacgccaancaaggtttccccatgaagcgggagaactggagaaagaaagagaaaatcagttcgtggttgcattgtggatgcaaatctgagcgttctcaacttggttattgtaaaaaaaggagagaaggatattcctggactgactgatactacagtgcctcgccgcctgggccccaaaagagctagcagaatccgcaaacttttcaatctctctaaagaagatgatgtccgccagtatgttgtaagaaagcccttaaataaagaaggtaagaaacctaggaccaaagcacccaagattcagcgtcttgttactccacgtgtcctgcagcacaaacggcggcgtattgctctgaagaagcagcgtaccaagaaaaataaagaagaggctgcagaatatgctaaacttttggccaagagaatgaaggaggctaaggagaagcgccaggaacaaattgcgaagagacgcagactttcctctctgcgagcttctacttctaagtctgaatccagtcagaaataagattttttgagtaacaaataaataagatcagactctgaaaaaaaaa

SEQ ID NO: 1112 - DNA, 2931 bp, Homo sapiens
  SIMILAR (36)..(1055): 961254mologous to Homo sapiens DKFZP564C186 protein,accession number BC003555,Smith-Waterman Score=1650.
tttcgtaagtggggtgcacgcttcgggttggtgtcatggcagctgcggggagccgcaagaggcgcctggcggagctgacggtggacgagttcctagcttcgggctttgactccgagtccgaatccgagtccgaaaattctccacaagcggagacacgggaagcacgcgaggctgcccggagtccggataagccgggcgggagcccctcggccagccggcgtaaaggccgtgcctctgagcacaaagaccagctctctcggctgaaggacagagaccccgagttctacaagttcctgcaggagaatgaccagagcctgctaaacttcagcgactcggacagctctgaggaggaagaggggccgttccactccctgccagatgtgctggaggaagccagtgaggaggaggatggagcggaggaaggagaagatggggacagagtccccagagggctgaaggggaagaagaattctgttcctgtgaccgtcgccatggttgagagatggaagcaggcagcaaagcaacgcctcactccaaagctgttccatgaagtggtacaggcgttccaagcagctgtggccaccacccgaggggaccaggaaagtgctgaggccaacaaattccaggtcacggacagtgctgcattcaatgctctggttaccttctgcatcagagacctcattggctgtctccagaagctgctgtttggaaaggtggcaaaggatagcagcaggatgctgcagccgtccagcagcccgctctgggggaagcttcgtgtggacatcaaggcttacctgggctcggccatacagctgatgtcctgtctgtcggagacgacggtgttggcggccgtgctgcggcacatcagcgtgctggtgccctgattcctgaccttccccaagcagtgccacatgctgctcaagagaatggtggtcgtatggagcactggggaggagtctctgcgggtgctggctttcctggtcctcagcagagtctgccggcacaagaaggacactttcctcggccccggtcctcaagcaaatgtacattacgtatgtgaggaactgcaagttcacctcgcctggtgccctccccttcatcagtttcatgcagtggaccttgaccggagctgctggccctggagccgggtgtggcctaccagcacgccttcctctacatccgccagctcgccatacacctgcgcaacgccatgaccacccgcaagaaggaaacataccagtctgtgtacaactggcagtatgtgcactgcctcttcctgtggtgccgggtcctgagcactgcgggccccagcgaagccctccagcccttggtctacccccttgcccaagtcatcattggctgtatcaagctcatccccactgcccgcttctacccgctgcggaatgcactgcatccgtgccctgacgctgctctcggggagctcgggggccttcatcccggtgctgcctttcatcctgggagatgttccagcaggtcgacttcaacaggaagccagggcgcatgagctccaagcccatcaacttcttccgtgatcctgaagctgtccaatgtcaacctgcaggagaaggcgtaccggggaggcctgggttggagcagctgttacgacctgaaccctgggagttacctgcacagccaggcacactgcatcggcttcccggagctggtgctgcctgtggtcctgcagctgaagtcgttcctccgggagtgcaaggtggccaactactgccggcaggtgcagcagctgcttgggaaggttcaggagaactcggcatacatctgcagccgccgccagagggtttccttcggcgtctctgagcagcaggcagtggaagcctgggagaagctgacccgggaagaggggacacccttgaccttgtactacagccactggcgcaagctgcgtgaccgggagatccagctggagatcagtggcaaagagcggctggaagacctgaacttccctgagatcaaacgaaggaagatggctgacaggaaggatgaggacaggaagcaatttaaagacctcttttgacctgaacagctcatgaagaggacgacactgagggattctcggagagagggatactgaggcccctgagcactcggcatggggtggaagacgatgaagaggacgaggaggagggcgaggaggacagcagcaactcggaggatggagacccagacgcagaggcggggctggcccctggggagctgcagcagctggcccaggggccggaggacgagctggaggatctgcagctctcagaggacgactgaggcagcccatctggggggcctggtaggggctgccgggctggtggccagtgtttccacctccctggcagtcaggcctagaggctggcgtctgtgcaaattgggggaggcagtagacacgggacaggctttattatttatttttccagcatgaaagaccaaaacgtatcgaagaactgggctgggctgggctggtgtggcctgctgaaagccccacagctgtgggctgctgcaagtcagctccgcgggggagctgacccgtgacgtccagcagaccgagaccagtcccagttcccagggggaggcctgcaggcgcctgggcgccttccaccacctgctgccctccgttctgcagacgctcgtccatgctgcaccagagctgctgctgtcagctcccccaagttctcttggaaatatgtgttcgctttcgctttggaagtcacattttcttttaaaattttttgttttgcatccgaaaccgaaagaacataaagcggtgggaggcagggccattgtgttgagtggtggctcctggagatttgtgtggccccacccctacccccggcaacctcaacacagaggctgggaagggtcgggggcccctggaagtagagccaaggtccccggacgcgtggg

SEQ ID NO: 1113 - DNA, 1383 bp, Homo sapiens
  SIMILAR (256)..(1101): 371254mologous to Homo sapiens ICAM-2 preprotein (AA -21 to 254),accession number X15606,Smith-Waterman Score=216.
  misc_feature (1)...(1383): n = a,t,c or g
acacgcgcaccttgtcaccttgtcaccaatttcctgcccgggatcccagagctacccttcttggagcccacaggggaataaagtgaaacacctcaggctccaaccctcccaacccaaggctccctcctggagggagagaaaggatggaggacatcaggcagcccttggctggtccctgcgaacccgttgaagactgccatagatgtcctctttcggttacaggaccctgactgtgggccctcttcaccctgatcttgctgtccagggatcggatgagaaggtatttcgaggtacacggtgaggccaaaggaagctgggcggttgagcccaaagggttccctcgaggttcaactgcaggcaccacctgttaaccagccttgaagtggggtgggtttgggagacctctcttaggattaaggtttttgctgggacgaacaggttcagttgggaaacaattacttgggtctcaaacattttcccattgacacggtcctccaattgccacttcaccttggtccgggaagcaagaagtcaatgaattccaacgtcagcgtggtaccagcctccaaggcaggtcatcctgacactgcaacccactttggntggctgtggggcaagtccttcaccattgagtgcagggtgcccaccgtgggagcccctggacagccttcaccctctttcctgttccgtgggcaatgagattcttgcactatggaggacctttcggggaagggcagcccctgctccgcagggaggcccacagccacattcaaacagcacgggctgacagaagggggttggcccaccgcaaactttctccctccctggctgtgctgggacttgatgtcttcgcggtggcaaacatctttcacaaaacactcagcccccgaagatgttggaagatctatgaaacctgtgtccggaccagcccagattggtcatcattagtcaccggtggtgtcggtgttgcctgtcccctgttcgtgacatctgtccctgctctgccttcatcttcggcccagcacttgcgcccagcaagcgggatgggcacctacggggtgcgagcggcttggaggaggctgcctccaggccttccggccaatagcaacccatggagtggcatggccacacaccacggtggtcactggaactcagtgtgactcctcagggttgaggtaccagccctggctgaaggactgtgacaggcagcagagacttgggacattgccttttctagcccgaatacaaacacctggacttagccctgtgcccacagtgtctcctcctgggataacaatggccagggaggggagccaccatgggggacccctctccctagatgcctccctccccaccctctccttcacagggtggcacgaggcc

SEQ ID NO: 1114 - DNA, 1841 bp, Homo sapiens
  SIMILAR (1181)..(1246): 721254mologous to Mus musculus putative,accession number AK017433,Smith-Waterman Score=77.
  misc_feature (1)...(1841): n = a,t,c or g
attttcacgggcagccgctatttggtcacacagaggttggatggaggatttttccctactagaattaccctttttctatactatcctccaagatctcagtatatttaaaggcttgtttaatttctcttctcaccttttttaaattttagcatgactggtttttcacagaagaaggtgctgaagagcctcttgtaagtattgtctgtcagcatttgtactcagtagtttcatttgggacacaagatcctggcgcgccaacaatgtcaacttcctgctttgctattgtccgctttgcgccccggaagcaggtctctagctcagtttctgatctaatgaatatacaagtacggtgcttattttgcagttaattatgcgtaaacaatgtaaacacattaagcacaggtgctttacttagtaatgtgtcttttactaaatgttgtttaaattttaaagaaagtatctttgaagagatgatgaagagatctttgtttattaaccatagacaacagtgcaggaggaaagcacagtagactcccagccagtgccaaacatagatcatttactcaccaacattggaaggacaggagtctccccaggagatgtatcagattcagctactagtgactcaacaaaatctaagggttcttggggatctggaaaggatcagtatagcagggaactgcttgtgtcctccatctttgcagctgctagtcgcaagaggaagaagccgaaagaaaaagcacagcctagcagctcagaagatgaactggacaatgtattttttaagaaagaaaatgtggaacagtgtcacaatgatactaaagaggagtccaaaaaagaaagtgagacactgggcagaaaacagaagatcatcattgccaaagaaaacagcactaggaaagaccccagcacgacaaaagatgaaaagatatcactaggaaaagagagcacgccttctgaagaaccctcaccaccacacaactcaaaacacaacaagtcaccaactctcagctgtcgctttgccatcctgaaagagagccccaggtcacttctggcacagaagtcctcccaccttgaagagacaggctctgactctggcactttgctcagcacgtcttcccaggcctccctggcaaggttttccatgaagaaatcaaccagtccagaaacgaaacatagcgagtttttggccaacgtcagcaccatcacctcagattattccaccacatcgtctgctacatacctggcttagcctggactccagtcgactgagccctgaggtgcaatccgtggcagagagcaagggggacgaggcagatgacgagagaagcgaactcatcagtgaagggcggcctgtggaaaccgacagcgagagcgagtttcccgtgttccccacaagccttgacttcagagaggcttttccgaggaaaactgcaagaagtgactaagagcagccggagaaattctgaaggaagtgaattaagttgcaccgagggaagtttaacatcaagtttagatagccggagacagctcttcagttcccataaactcatcgaatgtgatactctttccaggaaaaaatcagctagattcaagtcagatagtggaagtttaggagatgccaagaatgagaaagaagcaccttcgttaactaaagtgtttgatgttatgaaaaaaggaaagtcaactgggagtttactgacacccaccagaggcgaatccgaaaaacaggaacccacatggaaaacgaaaatagcagatcggttaaaactgagacccagagcccctgcggatgacatgtatgagtanaagnggcaaagtgtanaattntnngggggggg

SEQ ID NO: 1115 - DNA, 1137 bp, Homo sapiens
  SIMILAR (32)..(382): 641254mologous to Homo sapiens beta 2-microglobulin,accession number AB021288,Smith-Waterman Score=320.
ggatcctgaagctgacagcattcgggccgagatgtctcgctccgtggccttagctgtgctcgcgctactctctctttctggcctggaggctatccagcgtactccaaagattcaggtttactcacgtcatccagcagagaatggaaagtcaaatttcctgaattgctatgtgtctgggtttcatccatccgacattgaagtttgcctactgaagaatggaaaggagaattgaaaaagtgggagcattcagacttgtctttcagcaaggactggtcttttctatctctctgccgtacactgaatttcacccccaactgaaaaaagatgagtatgccctgcccgtgtgaacccatgtgactttgtcaccagcccaaagatagtttaagtgggatcgaggacatgtaaagcagcatcatggaggtttgaagatgccgcatttgggatggaatgattccaaatttctgcttgcttgcttttttaatattgatatgcttataacacttacacttttatgcaccaaaatgtaggggttataataatgttaaccatgggccatgatcttcttaaataattctactttgagtgcctgtctccatgtttgatgtatcctgagcaggttgctcccacaggtagctcctaggagggcctggcgacttagaggtggggagcacgacgaattctcttatccaacatcaacatcttggtcagatttgaactcttcaatcttcttgcactcaaagcctgttaagatagtttaagcgtgcataagttaactttccaattttacatactctgcttagaaatttggggggaaaatttagaaaatataattgacaggaatatttggaaatttgttataatgaatgaaacattttgtcatataagagttcatatttactttcttatacatttgtataaagtaaggccatggtgtgtggtgtaatctggtgttattttttgttccacaagttaaataaatcataaaacttgaaggaaaaaaatggaaaataggtaatcacaaaagaaaaaaatggtcgcgtttccacaatccctatgtaactttccttaatacaattttgaacccccttaaagggcactgggttctccggggtagtccctcgccctaaaaaatcgcgc

SEQ ID NO: 1116 - DNA, 617 bp, Homo sapiens
  SIMILAR (503)..(550): 931254mologous to Homo sapiens MAD3,accession number M69043,Smith-Waterman Score=86.
cggcacgagagctcacctggggccgcccaagcacccggatacagcagcagctgggccagctgacactagaaaaccttcagatgctgccagagagtgaggatgaggagagctatgacacagagtcagagttcacggagttcacagaggacgaggtgagtctgtgaactccttcggcgctctaactaatgaggtgccattcccttcaccctcccaggcccctagagctgctccttatcagaggggtatctacataatgagtctctcaaatttctgtgcataaccagtatcccaagaatgtacctgccccccccctttttttaatagcttactctttttttaaagagaagaattaaaggcgaactccctcagcctgtaaagttcattatatttgggctatggagaatggagtccaagagttatttccagtagtggcctccccatcccggtagcttggcagagctccgctcccggaagcttaacgtgtcttttttccccttggtttcagctgccctatgatgactgtgtgtttggaggccagcgtctgacgttatgagcgcaaaggggctgaaagaacatggacttgtatatttgtacaaaaaaaaagttttatttttcta

SEQ ID NO: 1117 - DNA, 1432 bp, Homo sapiens
  SIMILAR (1305)..(1430): 951254mologous to Homo sapiens Human IkappaB polypeptide,accession number AAW79132,Smith-Waterman Score=212.
aaagtccctgggcgcctgccacgaacactcagctcataataacctcgcggaaaacaccgcgggctcggcctccagaaaccccagccttgcgcaatcccccgcagcccgcgcctccctgggccccacgcggtgcactcaccacccctggggtttttccctctcttccccacaggttcctgcacttggccatcatccatgaagaaaaggcactgaccatggaagcgatccgccaggtgaagggagacctggccttcctcaacttacagaacaacctgcagcaggtgcgccgcttgcctggcccgggttctctctgaccctgggacgtagctgatgtagcagagtcaccccacatcctttctgaattcatggccactgagcactatttacccttaccttttacttcacatcagcccacatcctagagagtgaatgaaattccactgatttggtgaggtctttatgacccacctggagcctctgctatttgccagccctccccacccccctgtctaggaggagcagcacccaaccaggagacacgggttgaggggaactcggggtgtgggtttggtccatggcttactttctctggtctctcttgcattcgtagactccactccacttggctgtgatcaccaaccagccagaaattgctgaggcacttctgggagctggctgtgatcctgagctccgagactttcgaggaaatacccccctacaccttgcctgtgagcagggctgcctggccagcgtgggagtcctgactcagtcctgcaccaccccgcacctccactccatcctgaaggctaccaactacaatggtatgtctgcctccctgccctgccccaccccctcggagggcaggtgacgtggagaaggggcaggtgggccaacttaaggagtccaggcaagagcttaaactcctaacatttggaaggttgagaaaatatgtgtgcaaagtgcctattggatgcctttataaagttctttcagaacccagactgtgggttcttaaaattcagaagataagactacttgttccataaaagaataggtgaaaggagtgagggttgaaacaggtgggtatacttttttccttttgttcttccaggccacacgtgtctacacttagcctctatccatggctacctgggcatcgtggagcttttggtgtccttgggtgctgatgtcaatgctcaggttggtgcttcctgcccccgacgcactgagtcaggctcctcgtgcttatgttgtgagcagaaattccaaatgcagccataagcatctcaaattccttttggtttcaagagccctgtaatggccggactgccctttacctcgcagtggacctgccaaatcctgacctggtgtcactcctgttgaagtgtggggctgatgtcaacagagttacctaccagggctattctcccta

SEQ ID NO: 1118 - DNA, 1868 bp, Homo sapiens
  SIMILAR (462)..(1181): 491254mologous to Homo sapiens MAD3,accession number M69043,Smith-Waterman Score=371.
atggtacaactcagcccgcactaccgtggggacagtgaagatggaaggaagaggatggtccggcagaggacgaagccagttctctttttctggtctgactggcttggaaattccccgagcctgaccccgccccagagaaatccccagccagcgtttatagggcgccgcggcggcgctgcagagcccacagcagtccgtgccgccgtcccgcccgccagcgccccagcgaggaagcagcgcgcagcccgcggcccagcgcacccgcagcagcgcccgcagctcgtccgcgccatgttccatggcggccgagcgcccccaggagtgggccatggagggcccccgcgacgggctgaagaaggagcggctactggacgaccgccacgacagcggcctggactccatgaaagacgaggagtacgagcagatggtcaaggagctgcaggagatccgcctcgagccgcaggagtgtgccgcgcgggtcggagccctggaagcagcagctcaccgaggacggggactcgttcctgcacttggccatcatccatgaagaaaaggcactgaccatggaagtgatccgccaggtgaaagggagacctggcttttcttcaacttcaagaccaacctgcagcagactccactccacttggctgtgatcacaaaccagccagaaaattgttgaggcacttctgggagctggctgttgatcttgagctccgagactttcgaggaaataccccccctagagccttgcctgtgagcagggctgcctggccagcgtgggagtccttgactcaagtcttgcaccacccccgcaacttcaactccatcctgaagggctacccaactacaatgggccacacgtgtctacacttagccttctatcccatgggctactgggggcatcgtgggagctttttggtgttccttggggtgcttgatgtcaaatgctccaggagcccctgtaaatggcccggattgcccattcacctcgcagtgggacctgcaaaatcctgaacctgggtgttcactcctgtttgaaagtgtgggggctgatgttcaacagagtttacctacccagggctattctccccctacccagcctcacccggggccgccccaagcaccccggatacagcagcagctgggcccagctgacactagaaaaccttcagatgctgcccagagagtgccggatgaggagagctatgacacgagagtccagagttccaccggagtttcaccagaggacgagcttgcccctatggatgactgtggtgtttttggaggcccgcgttctgacgttatgagcgcaaaggggctgaaagaaacatgaccttgtatatttgtacaaaaaaaaaagttttatttttctaaaaaaagaacaaagaaggaaaaaatttaaaggggtgtacttatatcccacactgcacactggcctggccccaaaacgtcttattttgtggtagtattcagcccttcattttgtttgcttttgtggaacttttttgttagggggacgagaaaagatcatttgaaattctgagaaaacttctttttaaacctcaccctttgtgggggttttttgggagaaggttatcaaaaatttcatgggaaggaccacattttataatttattgtggcttcgagtggactgacccccagtgggtatcctggtgacatggtaacagcccaggagtgtttaaggcgtttcagtggatgtgggggtggaaaagtttactacctgttcaaggttttgtgttaccctcctgtaaatgggtgtacataatgtattgttgggtaattattttgggtacctttatgatgtatatttaattaaaccagatttttacaaaaaaaaaaaaaaaaag

SEQ ID NO: 1119 - DNA, 2114 bp, Homo sapiens
ttttttttttttttttttaaaggatgtatatttaaatgagacagtgacagcagcattgttacaactgggcatccctcaagccaacctggtcccatggtgtgggaccaaccatggtggggctttcacaaaggggttgggggcacccggctttttcttgttgtgccacagacccacagaaagaaccatacgtgattccgtttaccggctgtgtcacccagaaggggcaggtggctggagatgctgggtggcaggtaaaaataaaaggggcccaaccctttgtccagcaaataccagcacagtttttctatggacacagtgatttgtaacttgaataatgtgaagttgattacacagatttcggaatggcttaatatccatatgacagaaatgtgatgcattcatgagacgtgtgcagactttggggtgttgggaaacagcatttggcctttaacctcctcctcagccccaaagaggaaggggaaacaggacaggaacccacactgttgatccaacctcacatcacattctctgcacgcactccgacatgttccctgctcaccgttccacctgaggtagggtcaggacccctgcccccattttccagatggggaaaccgaggcagagcagacaataagaaccttgcctaaagccaccacagtggggagtggacaccatccccttcctgatgccggaggacaaagaggagaccctgccgtctctcccactcctggaatgagcccacytgagccaggtggcctttctgctgactgaggtgtctcctcttgggtttcctggtcaaaggggaccaataaccaagcagtggcattctctgccctctgcccaccgtgtgccaaccatgtgcaccaacagccaagcacagtccagggtgtgggggaaaaggacagacaggagcacccccactgcccaaggcagaaggctgggaaaccacgtcctgacacgtcctctcctgaggcccctcgtggaccgcaggatctgtaaagtgcaaacaccaaagccaagtgtcccctcacccagagctgtaggtttcctctgctgtccaggggcctctgtcccgtggagtgagggacctcccacacgcctgccctgatcttcctgaatgtgctcagtcgagcgaatactctcagctctcttgacctcaggccctcccacaaaaggccattggctgggtcatttctgagctatctggagcacctccacagggagcaggacagagctcctcaggtaaatctggttccaagaaatgccaccagaccactgcaggatcccatcgcctaactggaacctcccccagcacacagcccctgctgcacacctggaggccaggacaccctcctcaggctggggcccacagcatcctagcttggagcaccaggaaaggtgggctgggccaaagcaggagcacccagcagggaaaagctcctatggccccttccctgctgttgtatagaatcagcaggtgaccccactgtactgaccatccgatgaggcctttgaacctcaggccagggagaggcaggtctgcaggtgacatctgtgaacagtcccagctggggacaaccagaaatccccaaggccacgagtggctgaaagggatggagcccccaggcagagccgaaaccccaccgcaggtgagactcggcccttggctgagtgtgtgcagccgcatcctcaggtgtcactcaacactcctctgaagctctgtccgggtcttggcctgatgagcttccagggtggttatgactggagctgaggaatttctagggcccggatgccctggtccaggggtgtggagggctctgtgccatgggggaggggagatgtccccccagctccctgcccatggagttctgcattgggggaaggatgggggccacgcaaggacccctcacagcagcacacccaggtgacagccaggtgcagccgccccgagtcccagcaagcacctgggagacagcgggccttgacactgcccacccgctctggcccagcaggggtggagggggccactgccgcaccccatgggtctccggagcagaaggaacaacttgatgttggcagggtgtggcctggcggtccaggcggggtgcccagcg

SEQ ID NO: 1120 - DNA, 446 bp, Homo sapiens
  SIMILAR (349)..(444): 871254mologous to Homo sapiens ATP-dependent RNA helicase,accession number AF214731,Smith-Waterman Score=141.
  misc_feature (1)...(446): n = a,t,c or g
atttgcccttgctacgccattcttnnnnnnnntctgtggccaggtttacaggaattaaaactgctattttggttggtggaatgtccacgcagaaacagcagaggatgctgaaccgtcgtcctgagattgtggttgctactccaggccggctgtgggaattaattaaagaaaagcattatcatttgaggaaccttcggcagctcaggtgcctggtagtggatgaggctgaccggatggttgagaaaggccattttgctgagctctcacagctgctagagatgctcaatgactcccaatacaacccaaagagacaaacgcttgttttttctgccacactcaccctggtgcatcaggctcctgctgtcccagccactgtttacggagagccagaaaaccaagtatcccactcagtctggcaagccgcccctgcttgtactacttcctgn

SEQ ID NO: 1121 - DNA, 1647 bp, Homo sapiens
  SIMILAR (895)..(1398): 1001254mologous to Plasmid F Protein A,accession number M12987,Smith-Waterman Score=880.
  misc_feature (1)...(1647): n = a,t,c or g
atgggaatgccgggatgtgtgacacggcatggacggatcaagacggttttgacaaacatgaatgggcctggcagttttactcgggcctgtaaagacctgcacggcgttgagtcgtggaacggaaagatggcgagaggacttgatgtcatggccttccaagagcaaggcggttttaggccctgtgcggaactgaaatttagtggcgctcgagtcgcgtaccctatgctgccaatgccgtggaatcgacttcgttttgaaccaatttcatcggggggggctaactctatcaccgtgccattacggcgggcggtagtgttgccgcgatgtagcggcggcaggtgtaaggattccgctcgtgtaaggcacaataccggactgcattttgcgagttccgggagtggcctgccgtcctggatcccgaaagagcgggcgggttgccctactgttgccgaggtgtcacggcgtcgtgtccgtaccgtaaggttgctggtggcccacagggacccgtacgatctacgggtttctgggaaggtcccacgtacctcggagatttatgtccaccgaagtggtcgaactgctcgagctaccaatgaaggcctcagtctgatgctcattgggcctgaggatgtgatcaactttaagaagatttacaaaacgctcaagaaagatgaggatatcccactgttccccgtgcagacaaaatacatggatgtggtcaagggaaggaaagttttcccaaaacccttggggcctggagtcaaagcccaagccctcgactctgagaggatcccgctctttcccatgtacgttctccaacatgggcggttggggcttggccctttaaggcgagtttccttggccttggttcgcccacccgggatggtgggatctatccttggggaaaaggacgatgtcacttatgcaataaagcccacttgctggccggggcttgacattattccttcctgtctggctctgcaccgtattgaaactgagttaatgggcaaatttgatgaaggtaaactgcccaccgatccacacctgatgctccgactggccattgaaactgttgctcatgactatgatgtcatagttattgacagcgcgcctaacctgggtatcggcacgattaatgtcgtatgtgctgctgatgtgctgattgttcccacgcctgctgagttgtttgactacacctccgcactgcagtttttcgatatgcttcgtgatctgctcaagaacgttgatcttaaagggttcgagcctgatgtacgtattttgcttaccaaatacagcaatagtaatggctctcagtccccgtggatggaggagcaaattcgggatgcctggggaagcatggttctaaaaaatgttgtacgtgaaacggatgaagttggtaaagcagcctgtgctgaagtttccaagaggggangtccggcctccaactcgctgcgggtccccgccgtctccgcgcaacccccactggtggcgcccgaaaccgctacacggcctcccgacctccccgcatgtgtggcccacaaggcggcggcgttcaccctcgaaccccccgtgccgtccatctccgtcgcgtcttcggcccgccggctgcgtaaaactcacacgctccagcggggccctcggcctccataa

SEQ ID NO: 1122 - DNA, 575 bp, Homo sapiens
  SIMILAR (106)..(378): 971254mologous to Mus musculus putative,accession number AK012284,Smith-Waterman Score=452.
cgaatcagtggtggacgccaacaaagtttccccatgaagcagggtgtcttgacccatgcccggtgtccgcctgctactgagtaaggggcattcctgttacagaccatggttattgtaaaaaaaggagagaaggatattcctggactgactgatactacagtgcctcgccgcctgggccccaaaagagctagcagaatccgcaaacttttcaatctctctaaagaagatgatgtccgccagtatgttgtaagaaagcccttaaataaagaaggtaagaaacctaggaccaaagcacccaagattcagcgtcttgttactccacgtgtcctgcagcacaaacggcggcgtattgctctgaagaagcagcgtaccaaagaaaaataaagaagaggctgcagaatatgctaaacttttggccaagagaatgaaggaggctaaggagaagcgccaggaacaaattgcgaagagacgcagactttcctctctgcgagcttctacttttaagtctgaatccagtcagaaataagattttttgagtaacaaataaataagatcagactctgaaaaaaaaaaaa

SEQ ID NO: 1123 - DNA, 3077 bp, Homo sapiens
  SIMILAR (540)..(1094): 661254mologous to Homo sapiens ATP-dependent RNA helicase,accession number AF214731,Smith-Waterman Score=565.
  misc_feature (1)...(3077): n = a,t,c or g
ctgcagctgaggtacagcggcggtttctgaggttcttcactcgcgactgacggagctgcggtggcgtctccacacgcaaccatgaagttgaaggacacaaaatcaaggccaaagcagtcaagctgtggcaaatttcagacaaagggaatcaaagttgtgggaaaatggaaggaagtgaagattgacccaaatatgtttgcagatggacagatggatgacttggtgtgctttgaggaattgacagattaccagttggtctcccctgccaagaatccctccagttttcttcccaaaggaggcacccaagagaaaggcacaagctgtttcagaagaagaggaggaggaggagggaaagtctagctcaccaaagaaaaagatcaagttgaagaaaagtaaaaatgtagcaactgaaggaaccagtacccagaaagaatttgaagtgaaagatcctgagctggaggcccagggagatgacatggtttgtgatgatccggaggctggggagatgacatcagaaaacctggtccaaactgctccaaaaaagaagaaaaataaagggaaaaaagggttggagccttctcagagcactgctgccaaggtgcccaaaaaagcgaagacatggattcctgaagttcatgatcagaaagcagatgtgtcagcttggaaggacctgtttgttcccaggccggttctccgagcactcagctttctaggcttctctgcacccacaccaatccaagccctgaccttggcacctgccatcccgtgacaaactggacatccttggggctgctgagacaggaagtgggaaaactcttgcctttgccatcccaatgattcatgcggtgttgcagtggcagaagaggaatgctgcccctcctccaagtaacaccgaagcaccacctggagagaccagaactgaggccggagctgagactagatcaccaggcaaggctgaagctgagtttgatgcattgcctgacgatactgtaattgagagtgaagcactgcccagtgatattgcagccgaggccagagccaagactggaggcactgtctcagaccaggcgttgctctttggtgacgatgatgcttggtgaagggccttcttccctgatcagggagaaacctgttcccaaacagaatgagaatgaggaggaaaatcttgtataaagagcagactggaaatctaaaacaggagttggatgacaaaagccgccaccgtgtaaggcatatccaaagcgtcctctgcttggactggttctgactcccactcgagagcttggccgtccaggtcaaacagcacattgatgctgtggccaggtttacaggaattaaaaactgctattttgggtttggtggaatgtccacgcagaaaccagcaagaggatgctgaacccgtcgtccctgagattgtggttgctactccaggccggctgtgggaattaattaaagaaaagcattatcatttgaggaaaccttcggcaagctcaggtgcctgggtagtggatgaggctgaaccggatggtttgagaaaggcccattttggctggagcttctccacagctgcctnagagatgcctccaatgactccccaatacaacccaaagagaacaaaacgcttgttttttcttgccacactcaccctgggtgcatcaggctcctgctcgaaatcccttccataaagaagcacaccaagaaaatggattatacagcccaactttgacctccttatgcagaaaattgggcatgagggggcaagccccaaggtcattgacctcacaagggaatgagggccacggtgggagacggttaacagagaccaagattcccttgtgagacttgattgagaaagactttctacttgttactactttcctgatgcagtattccagggccgcagcttagtgttttgccaacagtatctcctggcatcaaacgcctcttctgggctcctcaaagttccttggatatcatggcccttggaccctggcatggcctggtatggcaccaggaaggcagagggctcagaaacctggggagcattttgccccgtctgggaagactgtgttctcttgggcaacagatgtgggcagctcgggggtctgggatattcctaaagtcccagcatgttcatccctttaccagggtcccacgtaccttcggagatttatgtccaccgaagttggtcgaacttgctccgaagctaccaattgangggcctcaagtcttgattgctcatttggggcctgaaggatgtgatcaactttaagaagatttacaaaacgctcaagaaagatgaggatatcccactgttcccccgtgcagacataaatacatgggatgtggttcaaggagcgaatccgttttagctcgacagatttgaggaatctgagtattcggaacttccagggcttgcctgcacaactcttgggattgagcaggcagcagctgccctgggagattgagctgggaggaagacatgtattaaggggagggaaaagcttgaccagcaagaagaacgtcggagacaaaagcagatgaaggttctgaagaaggagctgcgccacctgctgtcccagccactgtttacggagagccagaaaaccaagtatcccactcagtctggcaagccgcccctgcttgtgtcttgccccaagtaaggagcgagtctgctttttgagctgtctctcccaaggcaggaaggaagaaggaaggacaaaggaagcccgaggaggcccacagccgggaacagccacagccaagttacaagtgcaatttaactgccctggtcaagtgtgtcagtgactgcacattggtttctgttctctggctaatttgcaaaacctttccccacccttgtgtttcactccaccaccaaccccaggtaaaaaagtctccctctcttccactcacacccatagcgggagagacctcatgcagatatgcattgttttggagtaagaaataaaagcagcagattaattaaacagtaattgcagtgtttataggcttcatatgtgtgttaaacttaatatatcataaattaaaaccaatggtcagagccaaaaaaaaaa

SEQ ID NO: 1124 - DNA, 614 bp, Homo sapiens; identical to SEQ ID NO: 1070
  SIMILAR (93)..(362): 981254mologous to Homo sapiens ribosomal protein,accession number D23660,Smith-Waterman Score=460.
  misc_feature (1)...(614): n = a,t,c or g

SEQ ID NO: 1125 - DNA, 1543 bp, Homo sapiens
  SIMILAR (628)..(1419): 371254mologous to Homo sapiens ribosomal protein L4,accession number X73974,Smith-Waterman Score=302.
cttttcctgtggcagcagccgggctgagaggagcgtggctgtctcctctctccgccatggcgtgtgctcgcccactgactatcggtgtactccgaaaagggggagtcatctggcaaaaatgtcactttgcctgctgtattcaaggctcctattccgaccagatattgtgaactttgttcacaccaacttgcgcaaaaacaacagacagccctatgctgtcagtgaattaagcaggtcatcagactaagtgctgaagtcttggggtactggcagagctggtggctcgaaattcccagaagttcgaggtggtgggactcaccgctcttggccagggtgcttttgggaaacatgtgtccgtggaggccgaatgttttgcaccaacccaaaacctgggccgccgttggaatccgtagagtggacacaaactcaaaatcgatacgccaatctgttctggccctggctggcctcagccctaaccagcaactgggtcatgtctaaaaggtcatcgtattgaggaagttcctgaaacttcctttggtaagttgaagataaagttgaagggttacaagaagaaccaaggaagctgtttttgctccttaagaaactttaaagcctggaatgatatcaaaaaggttctatgcctctcggcgaatgagaggtgggcaaaggcaaaatggagaaaccgttcgccgtattccaggggcagggggcccgtgcatcatctataatgaggataatggtattcatcaagcccttcagaaacattcctgggaattactctgcttaaatgtaagcaaagctgaacattttggaagccttgctccctgggtgggcatggtggaacgtttcttgcatttgggacttgaaagttgcctttccgaaagtttagatgaattgtacggcacctggcggtaaagcccgcttcccctcaaagaagtaactaccattctttcccattgcacaagattgattaatacagattcttagcaggaatcttgaaaagccccagagatcccaaagagcccctccgggccaccgcggtaaacgagaagatcccattcgcagagttcctaaagaagaaccccactgaaaaacttgagaatcatgttgaagctaaaccccatatgcaaaggaccatgctgccggaacacccattcttcgcccaggcccaggaatcacaaagctccggggtggataagggcaagttgttgcaccagcggcacttacaagccaaatcagatgagaaggcggcggttgcaggcaagcagcctgtggtaggctaagacaggaaagaaaggctgcctgttggtttttaaaaaccagaagaagcctctggtggggaaaaaaggcagcagctaccaagaagccagcccctgaaaagaagcctgcagagaagaaacgctactacagaggagaagaagcctgctgcataaactcttaaatttgattattccataaaggtcaaatcgattttggacagcttcttttgaataaagaacctgattatacaggcagtgagaaacatgaaaaaaaaaaaaaaaaa

SEQ ID NO: 1126 - DNA, 2932 bp, Homo sapiens
cccccctcgagttttttttttttttttttactgagtgaagaaacacacaaattttatttagaaaatgaatgaccatgtttgcaataaactcccaaaatatccgccataagatggccataatattctgatgatcaaggagcacacatatacaaaagttattggattactgcaattctcagaggcacaaaacctgacatggtgtgatatagtatataatcagtcacgggggggggaaaagaacattaagtctttaaaaaggcttaggaagacataaacagtaaatctttgtttttctaccttcctttggacagtgttatatttcactttcttctttgcaaaatgtttccaaattcatttgctcaggatttatttaagataataacttaaaaccactaacagttggtttatgctatatgcatatcatgcatgttctactggttcaaggacaaaattaaaacaagatcttctctgtaaagcaaatatatttattatgcactttcatatacacagggattttttgagtaatatcataccaagggataaaataaaacttttacaatgtgaaattcaatgtacatttttggctatttacataccctcaaacccaagggaaaaataaaaagaaagcatttgtttgcaactaccatttgctgagaaagtgtaaatggaggacattaagcaaaacaaatatttgcatagcccaaaacaatattgaggaaaagtatttacttctgttttttaaggtatcaaactatttttggtgagaattccagtgagggtggggggtgaaaaacaaagaacaaaaattattcggctgtactttggcagtacgcactgatttcaggtcatttttccttcccaaaacctttccttagaaacattccagatttttatttcattactggatttttatcactttccttattataaactcatgatatttagggaatagacacagacggaatgttataaaaatgttataagcacatgcccatccatagttgtgtagtggcaacagctgatttataaaatttaaagattttaatttcaaaaatatctattaaggagttttatatttggaggacaatttttacttttttaatggagcagaaycccattttcatttatagtattaaatccccsacagahacaaataagcaaggcagggcatctccagcacccatcctatcatccttatcataactcaaagtcattaatgttctattccaaaacatactttatataaatacatcccgaggaatacttacttttgaaaatcgtatttttccaataggttctcttcgtaccaattgcttcaagtgtatatagtatggatatgaacacagttagctctttgaaaaacataagtcccttatgcaatgtcatatcttcgccctttggacacaaggtgcaattttgtaaaaacaataaaattaaataaatacaatttcaataattcaaagttacataaaaaccctggcagctttcagggttctctttctaaagaaaattacatgtaatagaaattagagcttcatcctctacagtaatgtaaatgtactgtatttgagatatgagtaaagttggttctaataatagtatgtgttcatatttattaatagactcattaacacttttaaggctactttgcaagagtcccattaattttatttactaaatgtcccatagggacaagaattcaatacttgaaacattcacatttgagttattaatattgccatgtcaccttaatatcaattgaacttatcaacttatctcgtagtcctcactatgacttatagatgacagacaaaatgagttttgctgactttaaaaaataaaagcaagaaaagccttacaataagattcaagtgaaacatttatcataattatacatttctatttccacgaacaatgtatcacatgtgtccttcatatatgaagatgacattactgacctttgttattaggacatattctaaagattttgttctagaagtagcaatggttttgtgctgaatctccaaattctctttcctcattcctcatcaacagtacatgaaaagaacagaatttctgggttctataagattaacaggcccattctaagatcaaatccacaaccttggcttctaaactgttatgacaacttttccagacatataaacgacccatctaagctacagctccactggatttaagagtaaggagactaaggctgtgggacacatgctcatttgaaccaattttaccttccttgtcatgaatttctctcttaaccctggcatccagccctcctgcatgcaattgtacaaagaagaaaacaggaaagagtatgaggatagaaaagtgcaaatccatcactattaagtaacaataaaaagtacacatgtgctatgattgacaggtgagtggtgtcatctgtgaagggcagcacattttatattcatccagaatattcatccaaccaaaccattaaaattaatccaattgattttgagtggggctattttggtcatgcagcaatttacaaaatagaaaccgctgagagagaagccagcaaaattaatttatttagccaggaggaagaggtcagtttagtcaatgaattattcagggatcaaaaatctacccttagatagacaggtgcatttctctctgcacacacatgtgactgaggcatggctttgtccctgagaattttcatgcctcaggaatgatagtctgtcttcttagaggtggaatgacaaagtgaatggaagatgaaattgtatcccagcggatgaaataggactttgttctgcctacagactggttggttgtttgttctgacatgtttagccagagatgagaagaattctactgggaaaatccagatttaaactacttaaagcagctccctaaactactataaaatattttttttaaactg

SEQ ID NO: 1127 - DNA, 290 bp, Homo sapiens
  SIMILAR (63)..(290): 671254mologous to Homo sapiens HSPC290,accession number AF161408,Smith-Waterman Score=240.
  misc_feature (1)...(290): n = a,t,c or g
ggtcttcggtttgcacagctagaggccgcgcanagcaaaaggatgagcggaaccttgganaaggtggaattctactaagtatcagtcggccctacaagacaaagcccacccacggcattggaaagtacaagcacttaattaaagcagaagagccccaagaagaagaagggaaaagtggnagtgagagccattaatttggggacagattatgantatggggttttaaatattcatcctgacctgcatatgatatgaccctggcagagagttatgcccagtatgttcacaac

SEQ ID NO: 1128 - DNA, 1283 bp, Homo sapiens
  SIMILAR (524)..(988): 401254mologous to Homo sapiens HSPC290,accession number AF161408,Smith-Waterman Score=178.
tttggtaacaaatcattagtgtataatattgcaagcgaaaaaccagaattgtgtgctaagtactggggtaacacagagatggtaattaattctttctggagaaacagcagtgaatgtgacaacctgagtgagggtggaaagcaggagaatttctagactctgaatttcagaagcttccggaactaaaatgatgtggaagttgagtgagtctcggtgggatattgctgctgcacctggtcaaggccgttccgtcagtgttttcagacgccctgggaacgcggctgcagggtccggtcttcggtttgcacagctagaggccgcgcagcagcaaaaggatgagcggaacctctgaaaaggtgctgtgcctgaggaacaataccatttttaagcaagccttttctctcttaaggtttagaacttcaggagagaagcccatctattctgtaggtggaattctactaagtatcagtcggccctacaagtcaaaagcccacccacggcattggaaagtacaagcacttaattaaagcagaagagcccaagaagaagaagggaaaagtggaatgtgagagccattaatttggggacagattatgaatatggggttttaaatattccatctgactgcatatgatatgaccctggcagagagttatgccccgttattttccacaaccttctgcaactctctctcccattaaaagtccgaggaaagttatgcaatgcccacccaaaaccataagaagtggttgccagtttgcagggaccaagggcagccaaaatgcctcctgggactcaagtgcttacccacccatgaggcgagtggcttcagatcagcggtttgagtgctacgtttgccagaaaattttcttggaaaataatcccaaagccagtccttccctgaagggagtcaggactgttcagttgaagggagcacactgaaagaaagacttcaaggggacggtttcaaaggttcgacccagaacttgggaggactttttgggccaagtttgaagtagctactgtagacccctttcattgccagcagtggtcatatttgagtgccaaagagaagagcttactgggtagttagagttcatcaggagacccaacccctaagatttcataaagtaccccatttcccattagccagtaatgtcctcaactcctctgtggcttggctgtacttgccatttcttaccacttacctatgaggtaatgcttgttatcttccattcttattaaaaatctgctgtaaaaaaaaaaaaaaaaagtcgtatcga

SEQ ID NO: 1129 - DNA, 798 bp, Homo sapiens
  SIMILAR (468)..(61): 1001254mologous to Mus musculus putative,accession number AK012284,Smith-Waterman Score=670.
gcccttttttttttttttttcagagtctgatcttatttatttgttactcaaaaaatcttatttctgactggattcagacttagaagtagaagctcgcagagaggaaagtctgcgtctcttcgcaatttgttcctggcgcttctccttagcctccttcattctcttggccaaaagtttagcatattctgcagcctcttctttatttttcttggtacgctgcttcttcagagcaatacgccgccgtttgtgctgcaggacacgtggagtaacaagacgctgaatcttgggtgctttggtcctaggtttcttaccttctttatttaagggctttcttacaacatactggcggacatcatcttctttagagagattgaaaagtttgcggattctgctagctcttttggggcccaggcggcgaggcactgtagtatcagtcagtccaggaatatccttctctcctttttttacgctttggtcctaggtttcttaccttctttatttaagggctttcttacaacatactggcggacatcatcttctttagagagattgaaaagtttgcggattctgctagctcttttggggcccaggcggcgaggcactgtagtatcagtcagtccaggaatatccttctctcctttttttacaatagccaagttgagaacgctcagatttgcatccacatgccaccacgaactgattttctctttcattctcagttctcttggtctgtaacaggatgcgcttactcagtagcaggcgaaacggcatgggtcaaacaccctgcttcatgtggaa

SEQ ID NO: 1130 - DNA, 2352 bp, Homo sapiens
  SIMILAR (102)..(146): 801254mologous to Homo sapiens Secreted protein encoded by gene 94 clone HPMBQ32,accession number AAW88627,Smith-Waterman Score=63.
agaaggggaacaaaaaaaaaaatatctgaattttgaaaaaccacaaagctacaactctgactctctcttttttttgagacggagttttgctcttgttacccagggctggagtgcagtggcgtgatcttggctcactgcaacttccggtctcccggggttcaagtgattctcctgcctcagcctcccaagtagctgggtttataggtacccgccaccagacccggctaattttttagttttagtagagacggggtttcaccacgttgggccagggctggtcttaaatgaccctcttatttttaacttggatacctgctattctgccaaaagacaatttctagagtagttttgaatgggttgatttcccccactcccccaaactttgaagccagtgtctagcttactaaaaaaagagttgtatataatatttaagatgctgagtatttcataggaaagctgaatgctgctgtaaagggctctttaagtctttttttttttttaatccccttctaatgaatgaaactaggggaatttcaggggacagagatggggatttgttgtatgataaaactgtatgtagtttttagtcctttctgtttttgagaagccagtggttgggggcatttttaagatggctggctactcttgttttccctcatgataataaatttgtcataactcagtaacatgaacttgcccctagaggtagttgttaataattttgaaatattaaggtcttgccaagcttctgatgattcacaccgtgtactactgattattaagcaggacagacgtgagctttctgttgcaaataccgttggaggagaaagtaatttctaaatatacagagaggtaactagactatatatgtagcatcctgtgcctcaccttcatattaatatttgataaagattttaatttatgtaaaacttctaaagcagaatcaaagctcctcttggggaaatggcaagtctttaggataggcaagaccctgtatgaatagtagcaaagcattaccgcatggtaggagaacacactcgattaaaaatgttaagctatctgaagagataaaatgtgcaagtcttcaggatggcaccaaaccaaagggttaatgcctcctgggggcacatttcttagaggggcttgctgagtgtgtaaatataatccgacttttgtttgtgttacatgacttctgtgacttcattgaaaatcctgcacaattcagtttcagctctgggattactttcagttgacctttggtgaaggtttttaacctgtgtagaatgggtgtttgacttgttttagccctattaaatttttattttctttcactcctgtattaaaagtaaaacttacctaaaagaaaagaggtttgtgttcacattaaatggttttggtttggcttcttttaagtcaggctttctgaacattgagatatcctgaacttagagctcttcaatcctaagattttcatgaaaagcctctcacttgaacccaaaccagagtactcttacctgcctcttttctaaatgttcaggaaaagcattgccagttcagtcttttccaaaatgagggagaaacatttgcctgccctggtaataacaagactcagtgcttattttttaaactgcattttaaaaattggatagtataataaccaattagggagtaagccacccttttatagggcaccctgtagtttttatagttcttaatcctaaaccattttatatttccttccttttggaaaaaaccctaccatgctaccaagcccacccatatgccacagactaataccagtggagttggagttgggctctccccaccagtctttgagggtgaattacaaaaaagtccagcccattatcatcctccctgagttatttgaaatgatttttttggtaccatttttggctgcagtattggtggtagaatatacctataatatgggatcattctctacttcctgatttatttatttattactagacctccaaccccagtcttctttttccccttccacctctctttgcctgtaggatgtactgtatgtagtcatgcactttgtattaatatattagaaatctacagatctgttttgtactttttatactgttggatacttaataatcaaaacttttactagggtattgaataaatctagtcttactagaaaataaaaggagctgttttgtggctttgtttgacaggtcttcagtaagaataatgtttttggctttcacatatactcagtttaagtgcttagtattaataacaagccatgaagggaataaattcctcttccctgagacatagactttggaataaaagacattttaactgaaaaaaaaa

SEQ ID NO: 1131 - DNA, 537 bp, Homo sapiens
  SIMILAR (97)..(372): 431254mologous to Mus musculus putative,accession number AK002592,Smith-Waterman Score=142.
  misc_feature (1)...(537): n = a,t,c or g
ttgaaatagaaagcctgatggtccttcgcacggaaccccgggncgacccacgcgtccgggccgcagaagcgagatgacgagatgtaacctcatcgtttcggaaagcgtcgcaataagaccgcacacgttgtgccgccgctgtggctcctaaggcctaccaccttcagaagtcgacctgtggcaaatgtggctacccgtgccaagcgcaagagaaagtataactggagtgccaaggctaaaagaccgaaataccacccggaacctggtcgaatgaggcacctaaaaattgtatacccgcagaattcagggcatgggattcccgtgaaggaacaacaccttaaacccaagaagggcaagctgttgcaagcatccaagttcatctttaaggaatgttcaacggatttagttcatggcaattaaatgttctgggtgtaaagaatacatatctggttgtggagtttggatcataatacaagagaagcacagggcaaagacactgcataacctcaagaactaagaatggaaggactggccagg

SEQ ID NO: 1132 - DNA, 1035 bp, Homo sapiens
  SIMILAR (627)..(743): 761254mologous to Homo sapiens Extended human secreted protein sequence, SEQ ID NO. 178,accession number AAY35929,Smith- Waterman Score=137.
ccaaagtggctttaaagcaccaatgagtccatggcttgtgtaagaaatgattaggccttccatctagagaaatagctcctttttaaacagttgtctcttttaaacagggtttagtatttaagtgaggttgcaacagtgtcaaatggaaagcgaaagtgaaattctctccttcagcataaaagctgatccacaaacaagaggagcaccagacctcctcttggcttcgagatggcttcgccacaccaagagcccaaacctggagacctgattgagattttccgccttggctattgagcactgggccctgtatataggagatggctacgtgatccatctgggctcctccaaagtgagtaccccggggctggctcctccggtgtcttctcagtctctgagcaacagtgcagaggtgaaacggggagcgcctgggaagatgtggtgggaggctgttgctatcggggtcaacaaacagcttgggaccatggagtaccaagcccacgggccctggaagggtgatcattcagttctgcgaaggagatggtttggttcagaagattgaagttacagtattgtgaagcaggaactgtgaagcactttgttcacccagcttgaggtatgggcaagttcccgctgttaaacaggttggaaaagggccaaggtttgaagtcggtgtttggccacggcgcttggaatcctggttgttgctggatgctcttttgcgattaggagataccaaaaaaaaagcgacagcctgaagcagccacaaaatcctgtgttagaagcagctgtgggggtcccagtggagatgagcctcccccgatgcctccagcagcctgaccctcgtgccctgtctcaggcgttctctagatcctttcctctgtttccctctctcgctggcaaaagtatgatctaattgaaacaagactgaaggatcaataaacagccatctgccccttcagaaaggacttctaccatgtttttatagacttctgaatcacaaaggaggaaggtaacattgagtgaacactcactggg

SEQ ID NO: 1133 - DNA, 423 bp, Homo sapiens
  SIMILAR (1)..(423): 1001254mologous to Homo sapiens T-cell antigen receptor beta chain,accession number Z22967,Smith-Waterman Score=736.
atgggaatcaggctcctctgtcgtgtggccttttgtttcctggctgtaggcctcgtagatgtgaaagtaacccagagctcgagatatctagtcaaaaggacgggagagaaagtttttctggaatgtgtccaggatatggaccatgaaaatatgttctggtatcgacaagacccaggtctggggctacggctgatctatttctcatatgatgttaaaatgaaagaaaaaggagatattcctgaggggtacagtgtctctagagagaagaaggagcgcttctccctgattctggagtccgccagcaccaaccagacatctatgtacctctgtgccagcagtttatatggcgcgacctatggctacaccttcggttcggggaccaggttaaccgttgtagaggacctgaacaaggtgttcccaccc

SEQ ID NO: 1134 - DNA, 584 bp, Homo sapiens
  SIMILAR (14)..(388): 881254mologous to synthetic construct human T-cell receptor protein,accession number A16547,Smith-Waterman Score=569.
cccacgcgtgcggtacagaggggtcattacggacccgcagcccctcatggagcaacccggcctcggtgactccagatactggctgagcagccgcctgagggtctcggccaccttctggcagaacccccgcaaccacttccgctgtcaagtccagttctacgggctctcggagaatgacgagtggacccacgatagggccaaacccgtcacccagatcgtcagcgccgaggcctggagtaaagcagactgtggctttacctcggggaactaacagcaaggggtcctgtctgccaccatcctctatgagatcctgctagggaaggccaccctgtatgctgtgctggtcagcgcccttgtgttgatgggcatggtcaagagaaaggatttctgaaggcagccctggaagtggagttaggagcttctaacccgtcatggtttcaatacacattcttcttttgccagcgcttctgaagagctgctctcacctctctgcatcccaatagatatccccctatgtgcatgcacacctgcacactcacggctgaaatctccctaacccagggggaccttagcatgcctaagtg

SEQ ID NO: 1135 - DNA, 1230 bp, Homo sapiens
  SIMILAR (546)..(989): 521254mologous to Homo sapiens T cell receptor beta chain,accession number AF043181,Smith-Waterman Score=304.
acacctgcctgatgctgccatgggcccccagctccttggctatgtggtcctttgccttctaggagcaggccccctggaagcccaagtgacccagaacccaagatacctcatcacagtgactgataagggagatgttcctgaagggtacaaagtctctcgaaaagagaagaggaatttccccctgatcctggagtcgcccagccccaaccagacctctctgtacttctgtgccagaagttttgagcagggctacgagcagtacttcgggccgggcaccaggctcacggtcacagagaagaggaatttccccctgatcctggagtcgcccagccccaaccagacctctctgtacttctgtgccagcagttcttcccaggggcgactctccccggggtttaactatggctacaccttcggttcggggaccaggttaaccgttgtagaggacctgaacaagctgttcccacccgaggtcgctgtgtttgagccatcagaagcagagatctcccacacccaaaaggccacactggtgtgcctggccacagggtatcttccctgaccacgtggagctgagctggtgggtgaatgggaaggaggcgcacagtggggtcagcacagacccgcagcccctcaaggagcagcccgccctcaatgactccagatactgcctgagcagccgcctgagggtctcggccaccttctgggcagaacccccgcaaccaatttccgttgccaagtccagttctacgggctctcggagaatgacgagtggacccaggatagggccaaacccgtcacccagatcgtcagcgccgaggcctggggtagagcagactgtggcttcacctccggtaaagtcttaccagcaaggggtcctgtcttgccaccatcctctatgagatccttgctaggggaaggcccaccctgtattgcttgtgctggtaagcgccccttgtgttgatggccaatggtcaaagagaaaggatttctgaaggcagccctggaagtggagttaggagcttactaacccgtcatgggtttcaatacacattcttcttttgccagcgcttctgaagagctgctctcacctctctgcatcccaaatagatatccccctaatgtgcatgcacacctgcacactcacggctgaaatctccctaacccagggggaccttagcatgcctacgctgactaaaccgaataaaaatgttctggtctggcctgactctg

SEQ ID NO: 1136 - DNA, 2108 bp, Homo sapiens
atggccaacttgctcacagagggcactcagtcagaccaagaactccttgtttctcatcctgttttttatgattacaaaactcttgcttccaccctggaagataactgctatagatgcctgtatgtaaatggtgctgtctccagcaactggcatgctgaagaagaattgattcacggggtataaatgttggggattggaagtggggatgaaatggcacttgttgatacaggagcagagaggtgaggccgactgctgaagacagctcgccaccctccttgcctccactccaatccaggggctggggccacattctttgccttcatttatcctcagatcaggtgagatcgacaggaggtgttgatggcagtgccagcaattattgctaatccgtttgcatccttatgcatagatctgaattcagactttgtgaatttccagaggtgtgggtaatataatagaattcagtgagtgggcatggctgatcttgtgcaaattaaaagttatggggcataagaatagcaaaagttgaacttcttttaaaaagggaaagtaccctgaggagccagtattgggttgagggctctttcagtatgcccaggttgggcagcacttgaggaacccgcaggaacgggcctgtttgtttaccaaaaagggagatttgacttcagctgccccttgggtgcatctgactgactatgacttgctgaggagattcccaaggaccctttaatggccaggggcttaacctcttccatgtggcagttgaggacctctgggagggaagtgttcatccctctgggctttgtgtggtactcaattatggtgcagtgcgggcatgaaatgaagacaccccaaatagggcttacagatacgatatgttttaaaatgttcgtattttaacaaaaacatactgacactgtttggaaatggcaacagggaagatagcgaaaatgaataacttaacattacgaaaagatggaacaaggtacatgttcccaaggcaggtggcctgtgaacttccttcgaagtgaaggcatccccctccagccacctttcagcctgctaggttaggacgacccgccgcccaccctcccaggacctccagccctgcaactgcctttcctctcttttaaataattcttcattgagttctaatatgtaaaaaaaaaaagtttactgtaaagtttgcaaataaggaaattttttttaaaagtcctcagtaatcttaccagtaacaattgttatgggcacatttgcttttggaagatttcttttgtatgcatgggataagtacatttttaaacaaaaatgggattatgccataaattctattttgggactttaatatatagggaacaccttttttaatgatgacaggatgttcccttgcatggctgtatcaatttaaacaatcttgtttcaatgggcatacagggaattttctagtttttttttcctcttaaaaaaaaatacttgcgatgactttccttgtaactcaaactttttcacggctgttgttatctctttgggaatgctgaaaacatacatttcgagaaggaaatgactgttaaactcttaagacttcaggttcatattgctaaactgcccagcagggagggattttttcaattagggttctcactggtgaggcaaacctgatgccttcccctcttcctcagaaccggctttatcacattgaaaacctttgctcctccgacggatagagtctgctttccctgtggatgtgagcattgctttgtctgctggtgactgaacatctctaccttgtgtcaattggccatttgtggtgtgtgtgtgtgtgcgtgtgtgtgtgtgtgtgtgtgtatgattttctaattcctagtcatttttctattgattgttttgcaaaagccatttacatcttaaggatattgataatcttttgttatatttgatgcaaatatttttttccagtttataggttgccttttaattttgtgtttcaggtagataaaagttaaacgattttcttaggttagtttatcactgtggtttctgaacttgttatgtgtagatcttttccaccccaagagtacataaatattaatccatactttcttaaaaaa

SEQ ID NO: 1137 - DNA, 393 bp, Homo sapiens
  SIMILAR (392)..(186): 971254mologous to Homo sapiens HSPC303,accession number AF161421,Smith-Waterman Score=358.
  misc_feature (1)...(393): n = a,t,c or g
cttaacttgccagcccgggtgataaagcttgttccctttaaacggcccccccnnnnnnnnnnnnnnnnnncaacacaaatccaggaggaagtgcatgccgatacatgcaaatatccccccctccagggcatacccaaaaccagccatacttgttgttttcaatagcttccaggaaatgcttgcaccccgtgcttcttgttcactacttcttccagctttttctcatcccaattatccatagtatctttttcaagttcttcatctcttgcatcaatgtaaacacttcgcttttcacattttctctccagagtcaagtcatgggagaacttccacttatctcctttagtacactgtccttgctagaagaaagcacatactacagacttgggatct

SEQ ID NO: 1138 - DNA, 376 bp, Homo sapiens
ttttggattttaatgtatgatggtctttattttctaactttattggcaaaaaagaaaagggaaacttttaaacaatttaacacagggcattgtagctgatcctgtcagataaaagaagttccattttaaatgtccatctaattgtccaaagatacacaatactgaatctgcatacgcagtttcctttatgaagtacagtgctcatgttttaggcagtctttatgagatgtagccaaagtcagaagagaagatgtagggacaagatgccttttttgcaggaggttaactcctccagaatcagcataggaaataaacatcctgttgattcatctttatctgaagtatatgtgctgaatctttcaagaacttggcttta

SEQ ID NO: 1139 - DNA, 1425 bp, Homo sapiens
  SIMILAR (617)..(471): 741254mologous to Mus musculus integrin alpha v subunit,accession number U14135,Smith-Waterman Score=176.
tcatagctgcagcataataggtgtatcataaaacaaaggtggtgtgaagtgttgaaagctgtagttttcagttgtacttgacggtggtcctctggcagcatctgggttctgctttttcttagtcttatatatgtgaattctgctagtgtgccatttgaagggttccactgctctttcctcttctgtacctgttctgctgccacctctatggaccttcactgtggaaaaatcaacatgcaggttttgggaactagcagtggtccccaacctttccttccctggacatagagggggatgctttcgggatgaaactgtccaactcggatcaccaggtattaggttctcataagaagcatgtaacctagatcccttgcatgcacacttcacagcagggttcacacaatagggtttgctcctatgagaatctaatgccaccactgatgaagacgcgctgggcacgaagaaatccacgcgaagccgaagtaacttccctcggggccagagtactcggcaggactgtccacgtctaggttgaaggcgcggcacagaggtagcaggagtcccgagagaagaagcgggaggccgcggggaccgaggcgcagccgtgccgcggcggaaaagccatcgccgaagtgcgcgcgggacgccaagccgggagcggtagccacctcccccgccccagcgaggcgcccagtgcccggcccgcgcctgcgcgcgcccaaacttgccggccgctctcttctcggctagcccgggacagctccggggcaggcaagagggctgagcttcggagcgaccgccagggacgacggcggagagcgcgcggggcggggacagcagcgcagacggtcctttgcttaccactgctcccgtccacgcagcgtcattgaaaccatcctggtccagatctcccaaaggagctatggcactgccaaaccgtgcaaagacctcaaatccattcagctttgtcgtctggaagtctcctgaagctctctgtagagacactgagacctgccccacctcttggagtttgccatcagagccacgatccatgaagagaggtgctccaataaacacatctgcataatcatctccattaatgtcagtggcagctacagaaaaatccgaaatatgcagccatctacccaaatagctgtcatcaaaaatagcttgtgcagtccgagttgctaattggttattatacttgatgctgtaaacattggggtcgtatttagatacgatttctgccacttgatccgaaataagctgaccttgccaataaaagctaccaggaccaccaagaagtactctgtcagcctttgcatttgattgttcttcccacaagataatctgcccaaatatctgctcatcctctcttgctttctccagtgtctctctcgaagaattttcctctctctcctgcat

SEQ ID NO: 1140 - DNA, 2031 bp, Homo sapiens
  SIMILAR (46)..(405): 931254mologous to Mus musculus putative,accession number AK012284,Smith-Waterman Score=567.
agtgcttacctctgtgagaatgatggtacgggtccgatcagtgtggacgacaacatggttcctcatgagcaggtgctgacccatggccgtgtccgcctgctactgagtaaggggcattcctgttacagaccaaggagaactggagaaagaaagagaaaatcagttcgtggttgcattgtggatgcaaatctgagcgttctcaacttggttatcgtaaaaaaaggagagaaggatattcctggactgactgatactacagtgcctcgccgcctgggccccaaaagagctagcagaatccgcaaacttttcaatctctctaaagaagatgatgtccgccagtatgttgtaagaaagcccttaaataaagaaggtaagaaacctaggaccaaagcacccaagattaaatcagttcgtggttgcattgtggatgcaaatctgagcgttctccaacttggttattgtaaaaaaagggagagaaggattattcctggactgacttgatactaacagtgccttcgccgcctgggccccaaaaggagctagccagaatccggccaaacttttccaatctctctaaagaagatgatgtccgccagtatgttgtaagaaagccccttaaataaaggaggttaagaaacctagggaccaaaagcacccaagattcagcgtcttgttactcccacgtgttcctcaagcccaaacggcgggcgtattgctctgaagaagcagcgtaccaaagaaaaataaagaagaggctgcagaatatgctaaacttttggccaagagaatgaaggaggctaaggagaagcgccaggaacaaattgcgaagagacgcagactttcctctctgcgagcttctacttttaagtttgaatccagtcagaaataagattttttgagtaacagtccgcctgctactgagaaaggggcatccctgttacagaccaaggagacctggagaaagaaagagaaaatcagttcgtggttgcattgtggatgcaaatctgagcgttctcaacttggttattgtaaaaaaaggagagaaggatattcctggactgactgatactacagtgcctcgccgcctgggccccaaaagagctagcagaatccgcaaacttttcaatctctctaaagaagatgatgtccgccagtatgttgtaagaaagcccttaaataaagaaggtaagaaacctagggcccaaggacccaagattcaagcgtcttgttactccacgtgtcctgcagcacaaacggcggcgtattgctctgaagaagcagcgtaccaagaaaaataaagaagaggctgcagaatatgctaaacttttggccaagagaatgaaggaggctaaggagaagcgccaggaacaaattgcgaagagacgcagactttcctctctgcgagcttctacttctatggccgtgtccgcctgctactgagtaaggggcattcctgttacagaccaaggagaactggagaaagaaagagaaaatcagtccgtggttgcattgtgaatgcaaatctgagcgttctcaacttggttattgtaaaaaaaggagagaaggatattcctggactgactgatactacagtgcctcgccgcctgggccccaaaagagctagcagaatccgcaaacttttcaatctctctaaagactctaaagaagatgatgtccgccagtatgttgtaagaaagcccttaaataaagaaggtaagaaacctaggaccaaagcacccaagattcaaggtctgggttactccacgtgtcctgcagcacaaacggcggcgtattgctctgaagaagcagcgtaccaagaaaaataaagaagaggctgcagaatatgctaaacttttggccaagagaatgaaggaggctaaggagaagcgccaggaacaaattgcgaagagacgcagactttcctctctgcgagcttctacttctaagtctgaatccagtcagaaataagattttttgagtaacaaataaataagatcagactctgaaaaaaaaaaaaaaagggcggccgct

SEQ ID NO: 1141 - DNA, 1353 bp, Homo sapiens
  SIMILAR (58)..(564): 881254mologous to Homo sapiens vitronectin alpha subunit precursor,accession number M14648,Smith-Waterman Score=785.
atggtaggagctgctgacacagctgtgagcataatggtcctggctcttgtggggctagatgaatctgaatttagagacaaactcactccaattactatttttatggaatatcggttggattatagaacagctgctgatacaacaggcttgcaacccattcttaaccagttcacgcctgctaacattagtcgacagtctggatttgtattgttaacttgtagtgatcaaaagaagatctatattggggatgacaaccctctgacattgattgttaaggctcagaatcaaggagaaggtgcctacgaagctgagctcatcgtttccattccactgcaggctgatttcatcggggttgtccgaaacaatgaagccttagcaagactttcctgtgcatttaagacagaaaaccaaactcgccaggtggtatgtgaccttggaaacccaatgaaggctggaactcaactcttagctggtcttcgtttcagtgtgcaccagcagtcagagatggatacttctgtgaaatttgacttacaaatccaaagctcaaatctatttgacaaactgagaaacaatggtccaagttcattcagcaaggcaatgctccatcttcagtggccttacaaatataataataacactctgttgtatatccttcattatgatattgatggaccaatgaactgcacttcagatatggagatcaaccctttgagaattaagatctcatctttgcaaacaactgaaaagaatgacacggttgccgggcaaggtgagcgggaccatctcatcactaagcgggatcttgccctcagtgaaggagatattcacactttggaaattgaggcaatttgttatgactggtacgtagggtctgtgataggcaagatacgacatgtccttggtctcatgaagcttatgttctatagcttacttactttgtgtagtcatagaataagtaaacaatggggaaatccagatagtgataaagatgatggattttttagaaggcaagatattgcaattgctgctccatatgggggtgaagataaaaaaggaattgtttatatcttcaatggaagatcaacaggcttgaacgcagtcccatctcaaatccttgaagggcagtgggctgctcgaagcatgccaccaagctttggctattcaatgaaaggagccacagatatagacaaaaatggatatccagaggaactggcagtttcagcaggcctgaagcggaaaatgtgctcagtggttgagaaacggcatggaggtcaatatggcctagtagaacagaacatgaagcaaaataaccccgggtattcacccaaatttgaaataaaggtcaccttttag

SEQ ID NO: 1142 - DNA, 649 bp, Homo sapiens
  SIMILAR (323)..(646): 1001254mologous to Homo sapiens vitronectin alpha subunit precursor,accession number M14648,Smith-Waterman Score=561.
atcagtggtggcattagattctcataggagcaaaccctattgtgtgaaccctgctgtgaagtgtgcatgcaagggatctaggttacatgcttcttatgagaacctaatacctggtgatccgagttggacagtttcatcccgaaagcatccccctctatgtccagggaaggaaagccggatgtttcttctcgtgggagctcccaaagcaaacaccacccagcctgggattgtggaaggagggcaggtcctcaaatgtgactggtcttctacccgccggtgccagccaattgaatttgatgcaacagaattacacagagagctgaaagaaaatcagaatcattcctattctctgaagtcgtctgcttcatttaatgtcatagagtttccttataagaatcttccaattgaggatatcaccaactccacattggttaccactaatgtcacctggggcattcagccagcgcccatgcctgtgcctgtgtgggtgatcattttagcagttctagcaggattgttgctactggctgttttggtatttgtaatgtacaggatgggcttttttaaacgggtccggccacctcaagaagaacaagaaagggagcagcttcaacctcatgaaaatggtgaaggaaactcagaaacttaa

SEQ ID NO: 1143 - DNA, 423 bp, Homo sapiens
  SIMILAR (274)..(423): 941254mologous to Homo sapiens uncharacterized hypothalamus protein HT010,accession number AF220184,Smith-Waterman Score=280.
cgtatgatttagaatttagaacaaatgaaaactgtatagattcccctttaagggaatttgccccattgttctacatattttaagataaacttcctgttgcaattcctgccacagaatagaggcctagacagagcacccttatgtgcagaaatgaatagaatgtacttgtgtaatataacgtacttgtgtgtatacttgttccatatactcaggcatttaccttggaaatggcctacactgagccaccgcttgtgaataatattgtctctataggtgtgcaagcatttcctggaagctattgaaaacaacaagtatggctggttttgggtatgccctggagggggtgatatttgcatgtatcgtcatgcacttcctcctggatttgtgttcaacaaagataaaaagaaagaagagaaaaaagat

SEQ ID NO: 1144 - DNA, 3852 bp, Homo sapiens
  SIMILAR (877)..(3849): 991254mologous to Homo sapiens vitronectin alpha subunit precursor,accession number M14648,Smith-Waterman Score=5170.
atgtgtggaggagtgtttgccacagaggaactggcagtttcagcaggcctgaagcggaaaatgtgctcagtggttgagaaacggcatggagatttccaggtggaacttcttttggataaactcaagcaaaagggagcaattcgacgagcactgtttctctacagcaggtccccaagtcactccaagaacatgactatttcaagggggggactgatgcagtgtgaggaattgatagcgtatctgcgggatgaatctgaatttagagacaaactcactccaattactatttttatggaatatcggttggattatagaacagctgctgatacaacaggcttgcaacccattcttaaccagttcacgcctgctaacattagtcgacagtctggatttgtattgttaacttgtagtgatcaaaagaagatctatattggggatgacaaccctctgacattgattgttaaggctcagaatcaaggagaaggtgcctacgaagctgagctcatcgtttccattccactgcaggctgatttcatcggggttgtccgaaacaatgaagccttagcaagactttcctgtgcatttaagacagaaaaccaaactcgccaggtggtatgtgaccttggaaacccaatgaaggctggaactcaacatcttttatcaccttgtacccagttttctatgcaagtatttctttttcactacacagcttcctcatcagtggtggcattagattctcataggagcaaaccctattgtgtgaaccctgctgtgaagtgtgcatgcaagggatctaggttacatgcttcttatgagaacctaatacctggtgatccgagttggacagtttcatcccgaaagcatccccctctatgtccagggaaggaaagccggatgtttcttctcgtgggagctcccaaagcaaacaccacccagcctgggattgtggaaggagggcaggtcctcaaatgtgactggtcttctacccgccggtgccagccaattgaatttgatgcaacaggcaatagagattatgccaaggatgatccattggaatttaagtcccatcagtggtttggagcatctgtgaggtcgaaacaggataaaattttggcctgtgccccattgtaccattggagaactgagatgaaacaggagcgagagcctgttggaacatgctttcttcaagatggaacaaagactgttgagtatgctccatgtagatcacaagatattgatgctgatggacagggattttgtcaaggaggattcagcattgattttactaaagctgacagagtacttcttggtggtcctggtagcttttattggcaaggtcagcttatttcggatcaagtggcagaaatcgtatctaaatacgaccccaatgtttacagcatcaagtataataaccaattagcaactcggactgcacaagctatttttgatgacagctatttgggttattctgtggctgtcggagatttcaatggtgatggcatagatgactttgtttcaggagttccaagagcagcaaggactttgggaatggtttatatttatgatgggaagaacatgtcctccttatacaattttactggcgagcagatggctgcatatttcggattttctgtagctgccactgacattaatggagatgattatgcagatgtgtttattggagcacctctcttcatggatcgtggctctgatggcaaactccaagaggtggggcaggtctcagtgtctctacagagagcttcaggagacttccagacgacaaagctgaatggatttgaggtctttgcacggtttggcagtgccatagctcctttgggagatctggaccaggatggtttcaatgatattgcaattgctgctccatatgggggtgaagataaaaaaggaattgtttatatcttcaatggaagatcaacaggcttgaacgcagtcccatctcaaatccttgaagggcagtgggctgctcgaagcatgccaccaagctttggctattcaatgaaaggagccacagatatagacaaaaatggatatccagacttaattgtaggagcttttggtgtagatcgagctatcttatacagggccagaccagttatcactgtaaatgctggtcttgaagtgtaccctagcattttaaatcaagacaataaaacctgctcactgcctggaacagctctcaaagtttcctgttttaatgttaggttctgcttaaaggcagatggcaaaggagtacttcccaggaaacttaatttccaggtggaacttcttttggataaactcaagcaaaagggagcaattcgacgagcactgtttctctacagcaggtccccaagtcactccaagaacatgactatttcaagggggggactgatgcagtgtgaggaattgatagcgtatctgcgggatgaatctgaatttagagacaaactcactccaattactatttttatggaatatcggttggattatagaacagctgctgatacaacaggcttgcaacccattcttaaccagttcacgcctgctaacattagtcgacaggctcacattctacttgactgtggtgaagacaatgtctgtaaacccaagctggaagtttctgtagatagtgatcaaaagaagatctatattggggatgacaaccctctgacattgattgttaaggctcagaatcaaggagaaggtgcctacgaagctgagctcatcgtttccattccactgcaggctgatttcatcggggttgtccgaaacaatgaagccttagcaagactttcctgtgcatttaagacagaaaaccaaactcgccaggtggtatgtgaccttggaaacccaatgaaggctggaactcaactcttagctggtcttcgtttcagtgtgcaccagcagtcagagatggatacttctgtgaaatttgacttacaaatccaaagctcaaatctatttgacaaagtaagcccagttgtatctcacaaagttgatcttgctgttttagctgcagttgagataagaggagtctcgagtcctgatcatatctttcttccgattccaaactgggagcacaaggagaaccctgagactgaagaagatgttgggccagttgttcagcacatctatgagctgagaaacaatggtccaagttcattcagcaaggcaatgctccatcttcagtggccttacaaatataataataacactctgttgtatatccttcattatgatattgatggaccaatgaactgcacttcagatatggagatcaaccctttgagaattaagatctcatctttgcaaacaactgaaaagaatgacacggttgccgggcaaggtgagcgggaccatctcatcactaagcgggatcttgccctcagtgaaggagatattcacactttgggttgtggagttgctcagtgcttgaagattgtctgccaagttgggagattagacagaggaaagagtgcaatcttgtacgtaaagtcattactgtggactgagacttttatgaataaagaaaatcagaatcattcctattctctgaagtcgtctgcttcatttaatgtcatagagtttccttataagaatcttccaattgaggatatcaccaactccacattggttaccactaatgtcacctggggcattcagccagcgcccatgcctgtgcctgtgtgggtgatcattttagcagttctagcaggattgttgctactggctgttttggtatttgtaatgtacaggatgggcttttttaaacgggtccggccacctcaagaagaacaagaaagggagcagcttcaacctcatgaaaatggtgaaggaaactcagaaacttaa

SEQ ID NO: 1145 - DNA, 3210 bp, Homo sapiens
  SIMILAR (2016)..(2537): 411254mologous to Homo sapiens HSPC303,accession number AF161421,Smith-Waterman Score=208.
acgctgcgtggacgggagcagtggtaagcaaaggaccgtctgcgctgctgtccccgccccgcgcgctctccgccgtcgtccctggcggtcgctccgaagctcagccctcttgcctgccccggagctgtcccgggctagccgagaagagagcggccggcaagtttgggcgcgcgcaggcgcgggccgggcactgggcgcctcgctggggcgggggaggtggctaccgctcccggcttggcgtcccgcgcgcacttcggcgatggcttttccgccgcggcgacggctgcgcctcggtccccgcggcctcccgcttcttctctcgggactcctgctacctctgtgccgcgccttcaacctagacgtggacagtcctgccgagtactctggccccgagggaagttacttcggcttcgccgtggatttcttcgtgcccagcgcgtcttcatcagtggtggcattagattctcataggagcaaaccctattgtgtgaaccctgctgtgaagtgtgcatgcaagggatctaggttacatgcttcttatgagaacctaatacctggtgatccgagttggacagtttcatcccgaaagcatccccctctatgtccagggaaggaaagccggatgtttcttctcgtgggagctcccaaagcaaacaccacccagcctgggattgtggaaggagggcaggtcctcaaatgtgactggtcttctacccgccggtgccagccaattgaatttgatgcaacagggcctatcggatgcgcgacatcacgagtgacgcgtagtcattttcccacgtcccgtccctgccccctcctagtgggacgcagtgggcgcgcacgcgcagctccgcttccgggagccgctcctcgctacccactatgctctgcgacatcgacctgtcgcaaaggccgcgtttgcggggccaatgagcgactcgctttccgtgcgggccagaacccctgacggtattcagctgcgcgtaagtctggccggtgccatctgtctccgcaatgccccccaagaaacaggctcaggccgggggcagcaaaaaggcggagcaaaaaaagaaggagaagattatcgaacccctgatgacgctagctctctcattactatagtgacgctgctggcgcccccgcacgctgggctttgcctctccgcccacacgcccgtgttcacccacccatgcacccgggtgcgaaatgacccctcgggactggcacagggttttatccttcgctagtcctctcagaattgaggagattttccaaggttatgacaaaactttcggtttgaagaataagaaaggagcaaagcaacagaagtttatcaaggctgtcacacatcaagttaaatttggtcaacaaaatccacgtcaggtagcacagagtgaagctggaaaaggaaattgaagaaggatgacaagaagaaagaattgcaggagctaaatgagctgttcaaacctgtagttgctgctcaaaaaattaagttaaaggtgcagatcccaagtctgtagtattgtgcattcttcaagcaagggcagtgtactaaaggagataagtgtaagttctcccatgacttgactctgggagagaaaatgtgaaaagcgaagtgtttacattgatgcaagagatgaagaacttgaaaaagagacaaagtcttcccttatccaggctgatactatggataattgggatgagaaaaagctggaagaagtagtgaacaagaagcacggtgaggcggaaaagaaaaaaccaaaaactcaaatagtgtgcaagcatttcctggaagctattgaaaacaacaagtatggctggttttgggtatgccctggagggggtgatatttgcatgtatcgtcatgcacttcctcctggatttgtgttgaaaaaagataaaaagaaagaagagaaagaagatgaaatttcattagaagatctaattgagagagagcgttctgccctaggtccaaatgttaccaaaatcactctagaatcttttcttgcctggaagaaaaggaaaagacaagtataagattgttaaacttgaacaagatatggaaagagaggaaagctgacttcaaagcagggaaagcacttagtgatccagtgggcgtgaagtgtttgaatttcgtcctgaactggtcaatggatgatgatgaggaagcagatgataccccgctacaccccagggaacaggtggtgattgaggttgatgattcagtgagtgtaaattgacatagattttaagcctggtacatccccaagagatgtagatggaaacaggtattactgtagccagtcttggaaagattcagcacatatacttcagattaaagatgaaaacaaattaagtgaagcttctgggaggtagggctgaaaatggtgaaagaagtgacttggaagaggacaacgagagggagggaacggaaaatgggagccattgatgctgttcctgttgatgaaaatcttttccctgggagaggatttgggatgaactagaagaagaatataaatgcacttgatttagaagaatgacaccaaacacatcgctgaaaaaattaagtcagctcagcacgagttgaaattgactacattaatttctttccacctagaatcaacaggatgtttatttcctatgctgattctggaggagttaacctcctgcaaaaaaggcatcttgtccctacatcttctcttctgactttggctacatctcatagtaagttcagagtagttcatgataaattgaaaatataatggtccattgccagaaaatggattggatgttgtaactgtccacccaagtaagaaggtgtatctgcctttccatcttttggttttcatttgggccatgtgcttattacccagaaaccaacaaaccttatatttaaaaataccccttcatttggacacagtttttaaatgagtgatttaatttccctctgtatttgtatgtttagaagactgccctaaaacatgagcactgtactttataaaaggaaactgcgtatgcagattccagtattgtgtatctttgggacaattagatgggcatttaaaatggaacttcttttatctgacaggatcagctacaatgcccggtgttaaattgtttaaaagtttcccttttcttttttgccaataaagttgtaaataaagaccatcatacattaaaatccaaaaaaaaaaacaaagggcggccgct

SEQ ID NO: 1146 - DNA, 489 bp, Homo sapiens
  SIMILAR (4)..(150): 1001254mologous to Homo sapiens homologue of yeast IPP isomerase,accession number X17025,Smith-Waterman Score=257.
gagcgagcagcacagagacggctgaaagctgagctaggaattcccttggaagaggttcctccagaagaaattaattatttaacacgaattcactacaaagctcagtctgatggtatctggggtgaacatgaaattgattacattttgttggatggtgagcagcgtccctctcatgtgacacccacagttatgccggatgttgccagatgcccctaggggacagagtcaacccccaactgaggaccactgtcctacagagtcaggaaatattgtagggagaaaaaaataacaacaacaaaggcctgtgttaatgttaaatagatgagattatggaatgtgtatattaatgttaaaaattgtaccttgatcaatgtactttttataaacttgccatagatatctcagatttgaaacctcaagacagatttattattcttaaatgctgtatgataatgaagaaaaataaaaatttatttcttgcaaaaaaaa

SEQ ID NO: 1147 - DNA, 409 bp, Homo sapiens
  SIMILAR (384)..(121): 1001254mologous to Homo sapiens uncharacterized hypothalamus protein HT009,accession number AF220183,Smith-Waterman Score=466.
gatgcctgaaataaacactaaccacctcgacaagcaacaggttcaactcctggcagagatgtgtatccttattgatgaaaatgacaataaaattggagctgagaccaagaagaattgtcacctgaacgagaacattgagaaaggtgctgctttgaaacagtctttcttgtaaagcgatttgtgtaggcatttccgatttgctgagaagagcactctgttcaaggaagtgcagtcttcagtaataccgtattttctcgttggttccagttcgttaaatagtgtggtcattagcatctgctttgctgtcttcctgttacagcgatttctcttcacttcatgcctgttactcggcttcttcagagttattctggattcatagaagagggactaggcctgacatacagcagcg

SEQ ID NO: 1148 - DNA, 2140 bp, Homo sapiens
  SIMILAR (220)..(558): 421254mologous to Camptotheca acuminata isopentenyl diphosphate isomerase I,accession number AF031079,Smith-Waterman Score=180.
gaccggcggttgtctgtggccggaggctgatcagtgttctagaacagatcagacattttgtaatgatgcctgaaataaacactaaccacctcgacaagcaacaggttcaactcctggcagagatgtgtatccttattgatgaaaatgacaataaaattggagctgagaccaagaagaattgtcacctgaacgagaacattgagaaaggattattgcatccgagcttttagtgtcttcttattcaacaccgaaaataagcttctgctacagcaaaagatcagatgctaaggttacctttccagggttgttttacggaatacgtgttgtagtcatccattaaggcaatccagccgagctttgagggaaagtgacgcccttgggagttgagggcgaggcagcacaggggacggcttgaaagcttgagcttgggaattcccttggaagaggttcctccagaagaaattaattatttaacaccgaattcactacaaagctcaatctgatggtatctggggtggacatgaaattgattacattttgtggtggagaaaaaatgtaacttttgaatccagatcccaatgagattaaaagctattgttatgtgtcaaaggaagaactaaaagaacttctgaaaaaagcagccagtggtgaaattaagataacgccatggtttaaaattattgcagcgacttttctctttaaatggtgggataacttaaatcatttgaatcagtttgttgaccatgagaaaatatacagaatgtgaatatgtaggtaaatgattacagaaaaatttatctgcttaacaaacttaggaatgactttttccttttaaatttagttctattcattaatttatccattaaatttagttctatcatttgggtactatcattaatgtattatatacactggatacttttaaaacttgtgtgggggaaaaaactaacttataattttgtatcacacaccctggatatgtgttctgtttctaagcgacatttgtgagagattattgtaaaatgagagcgagcaaataaaacttaatttaatctttgcagatacatacttatgggaaatttgaacaaatgagtgaaactctgtgtttttagtaggctgtgataaacatttccggagcacttgcagaggacttgctatttgccaggtgctttatgtatcattaaatttttctcatagttcagaaaaatgtgcaaaggaaactattgtctcgctccttcaaaacagtcttaattaactttcatattaggcaggattaaactaggcagagcagggttcaaggggaaatttaaatggatatgggaccctaatttgtatcatcctgagttgattgtggtgggttaatccatcctggaaacatgttgatacttacaagtcagcccactgcttttggaataagggatattggattaggttgaatcttcttgtaaatacgtatttaccacgttagcaaagtctgtgttttccagaattacagtgaagccacagaggtgttccataaaatggggaattgagtccccactcgggtaaagagttgccctaaaacttgaacacctgttggaccatttggggcctggaataaaaacccccctgtggtgggggtcctgtgcctgtgccattggccaggatgggtgaagccagccgtccccctccccatgtgaacaccccccacagttaatgcccggatgttggcccagatggccccctaggggaccagagtccaacccccccaacctgaggacccactgtccctacagagtcaggaaaatattgtagggagaaaaaaataacaacaacaaaggccctgtgttaatgttaaatagatgagattatggaatgtgtatattaatgttaaaaattgtaccttgatcaatgtactttttataaacttgccataggatatctcagatttggaaacctcaagacagatttattattattaacaccctgtatgataatgaagaaaaataaaaatttatttcttggcaaagttaaatgtttgttaaaattcaataggaatgactcattttatgggttaactttggggcaatttataatttcagacaagactgtttagcaagtattttattgaaaagtaaaaaaaattgcaatttaaaaaaaa

SEQ ID NO: 1149 - DNA, 449 bp, Homo sapiens
  SIMILAR (144)..(449): 1001254mologous to Homo sapiens dJ475N16.1 (CTG4A),accession number AL035587,Smith-Waterman Score=540.
ggcattccagaccaggaggtgattggcacgggctatggcatcctggaccagaaggcctctggagtcaaatacaccaagtccatttcagatcccccagaccagatgacctatcttccttccagctctgagtcacttcccattgggacttgcggttaatcgaagtcactgagaccatttgcaagaggctcctggattatagcctgcacaaggagaggaccggcagcaatcgatttgccaagggcatgtcagagacctttgagacattacacaacctggtacacaaaggggtcaaggtggtgatggacatcccctatgagctgtggaacgagacttctgcagaggtggctgacctcaagaagcagtgtgatgtgctggtggaagagtttgaggaggtgatcgaggactggtacaggaaccaccaggaggaagacctgactgaattcctctgc

SEQ ID NO: 1150 - DNA, 1035 bp, Homo sapiens
  SIMILAR (571)..(1032): 1001254mologous to Homo sapiens dJ475N16.1 (CTG4A),accession number AL035587,Smith-Waterman Score=811.
atggattcaatgcctgagcccgcgtcccgctgtcttctgcttcttcccttgctgctgctgctgctgctgctgctgccggccccggagctgggcccgagccaggccggagctgaggagaacgactgggttcgcctgcccagcaaatgcgaagtgtgtaaatatgttgctgtggagctgaagtcagcctttgaggaaaccggcaagaccaaggaggtgattggcacgggctatggcatcctggaccagaaggcctctggagtcaaatacaccaagtcggacttgcggttaatcgaagtcactgagaccatttgcaagaggctcctggattatagcctgcacaaggagaggaccggcagcaatcgatttgccaaggttggattcgggattgtccttcatccgctctggggtcaggcctgcatgtatcttagtgtgtctgctggtacacaggcagaaatgctccacagttgctgcccccgtgggaacctaaagacactagaacggggagaactcagcaagatccacgatgtgcagaaaggtgggggtttaggcgaggtgtcagaggacacctcgggcatgtcagagacctttgagacattacacaacctggtacacaaaggggtcaaggtggtgatggacatcccctatgagctgtggaacgagacttctgcagaggtggctgacctcaagaagcagtgtgatgtgctggtggaagagtttgaggaggtgatcgaggactggtacaggaaccaccaggaggaagacctgactgaattcctctgcgccaaccacgtgctgaagggaaaagacaccagttgcctggcagagcagtggtccggcaagaagggagacacagctgccctgggagggaagaagtccaagaagaagagcagcagggccaaggcagcaggcggcaggagtagcagcagcaaacaaaggaaggagctgggtggccttgagggagaccccagccccgaggaggatgagggcatccagaaggcatcccctctcacacacagcccccctgatgagctctga

SEQ ID NO: 1151 - DNA, 1916 bp, Homo sapiens
  SIMILAR (983)..(933): 411254mologous to Homo sapiens dJ402G11.6 (novel protein similar to Xenopus gamma-tubulin interacting protein (yeast SPC98 homolog) (isoform 1)),accession number AL022328,Smith-Waterman Score=44.
  misc_feature (1)...(1916): n = a,t,c or g
tttttttttttttttttccgagaacaccttatattgtgtcacgtcccccgcagagcagcgtcagacgtcctggtagtagttgttgaagttgatgcgcagcagaaagtcctccaggtggggctggtagccgcggttcaccagcttggtcaccactttgaagagaaagtgggagtagtacttgaaggtgttgtaggactgctgcatgagtgcaaagttgggggtgctctgcccccccccgggcccccaggggggcccccagggcctgggcagatgagctggctgcggaacttgagcacgaggctgaagatgctgtggatgacgttcaatgaacggcgccgccttctccgtgagcaggcccctgggggggaaaggcagtgctgcttggggtggggcttagccttgaccacagggacccaggtcgcccacggtggccaacctggccctgaactcgcaccaggtgacgtgcaggatctggttggcgatgtagccctggatgaccttcacgaaatgctgcatctcgtgcttgaacagctgcagctgacggaactgcacagagccggccatgtggctcagcagggctgtgcgcttgaggtggaagcagacgtccttgagcgcccacatcatgagcttcagctgcagcaggaaggagaagacgccgctgtaacttgcttcaggcagccctcggtgatgacaatgttgaagaggccagtcccaccttgtacctgaagctcccaggccagctcagcacatccggggcgttgggggcaaacacctcgggcaggtacttgagagcgagggagaggttggaggcgtgcggggtgtccccatgcaggctgcactgcagggccttgctcagcacagagttcagcaccagcgggttgagcagctctccgggcgtttgcccagctccaagctaggcagaaaagggaccaccgtccccaggagtcccaagcacatgcctggcgaactcgccgtcctccatcagcaggaagtgccgcagtgcctcatagtgcgcctccaggtgcagctccacgaagaagtagtcgacagcggccttgttcaccaaggagatgctggcaggagggagctggagtcagggcgggccaggacgggctgggtgggtcagcaactcgctcagctgcacagcagtctcatcagcggcagactggacctgggggtccacggggaaggcgaaggcccggggaagcacggggcgcaaaagatgagcaatgggcggctcggctgcgggagatggagcacgcacgtgctgggaaccggccagcccagggctccgcccccatccacaggagatggagcacgtgctgggaactggctagcccagggctccgccccaacccacaggaggtggagcacgtgctgggaaccagccagcccagggctccctgccagcagcaactgctgcactcacacatggactcgtaactgtccgggtaccgctccaagtggtactgccctgccaggcctgccaggtaggcctgctccccaccctgagcctccgccgccgatgcctccgcctcctcaccacggcctgggctgctctgggcagctgtgtcttcctgtgagttgagaggccaatttggagagaggtcctcagcgtccccgctcctcccagggcctgtgtggacacaagtggacacgagggcatcagggccgagtgcctgtggcgggtacggagccgagccggccctggctcaagcagcccctcccatgtcccccacagcagcccaggtcctggctgacgaggaggcctgaggggaacttcacatgccacccaccccactgcccgcctacctcccaggctctgagcgtcccacagtcccactcctgaccaccagccaccctactccgacntagttcttcagaggaattgctccacaatggctantggtctcaat

SEQ ID NO: 1152 - DNA, 904 bp, Homo sapiens
  SIMILAR (129)..(431): 811254mologous to Mus musculus putative,accession number AK017684,Smith-Waterman Score=413.
gaacgatgcttataaaccaggcggcgcgttcccggtggcggcgccctggactcccgggcccgcgcatccccgccagccttccttaaggcggatgggtggcccccgagaccccgtcggacccatggtttccagtgcagcgcggagtgggcgatgccagcgtgccaggtattgggaagaatgtggtttgcgagaaggcagcaacatcggtggatgccttccggatggtgacagcctcgcgctactacccgcagctcatgagcctggtagggaacgtgctgcgcttcctgcctgccttcgtgcgcatgaaacagctgatttcggaacactatgtgggagcggtgatgatctgtgatgcccgcatctactcaggcagcctgctgagccccagctatggctggttctgtgaatgagctcatgggcggcgggggcttgcacaccatggggacctacattttggacctgctgacccacctgaccggccgtagagccgagaaggtgcacgggctgctcaagacattcgtgaggcagaacgctgccatccgtggcatccggcacgtcactagcgatgacttctgtttcttccagatgctcatgggtgggggtgtgtgtagcacagtgacactcaacttcaacatgccaggcgcctttgtgcatgaagtcatggtggatgtcccgctgctgtacctgaagggcatggtctacatggtgcaggccttgcgccagtccttccaggggcagggcgaccgccgcacctgggaccgcacccctgtctccatggccgcctccttcgaggatgggctgtacatgcagagcgtggtggatgccatcaagaggtcgagccgatccggggagtgggaggctgtggaggtgctgacggaggagcccgacaccaaccagaacctgt

SEQ ID NO: 1153 - DNA, 1169 bp, Homo sapiens
  SIMILAR (592)..(927): 1001254mologous to Homo sapiens dJ475N16.1 (CTG4A),accession number AL035587,Smith-Waterman Score=575.
tttcgtcaggcccagacgcaggcttcttctcctcgggtcttgggcctgcatcctctctctcccagagcctacgttagggggtgggaaaggactttgccataggtcgctgaggccaccatctgctctcttactggccaagggcgtaaaaagatagtcctcccattagctagagagcaaaccccacaaagcctattggctgcgccgtccgcgggccttggtccgctttgaaggcgggctgcggctgccagaggagggcgggcgggaggctagctgttgtcgtggttgctcggaggcacgtgtgcagtcccggaagcggcgaggggaaactgctccgcgcgcgcccgcgggaggaggaaccgcccggtcctttagggtccgggcccggccgggccatggattcaatgcctgagcccgcgtcccgctgtcttctgcttcttcccttgctgctgctgctgctgctgctgctgccggccccggagctgggcccgagccaggccggagctgaggagaacgactgggttcgcctgcccagcaaatgcgaagtgtgtaaatatgttgctgtggagctgaagtcagcctttgaggaaacccggcaagaccaaggaggtgattggcacgggctatggcatcctggaccagaaggcctctggagtcaaatacaccaagtcggacttgcggttaatcgaagtcactgagaccatttgcaagaggctcctggattatagcctgcacaaggagaggaccggcagcaatcgatttgccaagggcatgtcagagacctttgagacattacacaacctggtacacaaaggggtcaaggtggtgatggacatcccctatgagctgtggaacgagacttctgcagaggtggctgacctcaagaagcagtgtgatgtgctggtggaagagtttgaggaggtgatcgaaggactggtacaggaaccaccaggaggaagacctgactgaattcctctgcgccaaccacgtgctgaagggaaaagacaccagttgcctggcagagcagtggtccggcaagaagggagacacagctgccctgggagggaagaagtccaagaagaagagcagcagggccaaggcagcaggcggcaggagtagcagcagcaaacaaaggaaggagctgggtggccttgagggagaccccagccccg

SEQ ID NO: 1154 - DNA, 1233 bp, Homo sapiens
  SIMILAR (14)..(289): 941254mologous to Homo sapiens dJ475N16.1 (CTG4A),accession number AL035587,Smith-Waterman Score=456.
gcccggccgggccatggattcaatgcctgagcccgcgtcccgctgtcttctgcttcttcccttgctgctggtgatgctggtgctgctgccggccccggagctgggcccgagccaggccggaactgatgagaacgactgggttcgcctgcccagcaaatgcgaagtgtgtaaatatgttgctgtggagctgaagtcagcctttgaggaaaccggcaagaccaaggaggtgattggcacgggctatggcatcctggaccagaaggcctctggagtcaaatacaccaagtccatttcagatcccccagaccaagatgacctatcttccttccagctctgagtcacttcccattgggacttgcggttaatcgaagtcactgagaccatttgcaagaggctcctggattatagcctgcacaaggagaggaccggcagcaatcgatttggccaaggttggattcgggattgtccttcatccgctctggggtccaggcctgcaatgtaatcttagtgtgtctgctgggttgtgaagtgtgattttgaagatgaccacctggggatcttccttcattggcctcttcccattctttgattgccgtttgtgctcctcccctcttgagtgggcctcatttttcagggcacatgcatggaggggtctggggcctgtttcatgagggtcctgcttcaatctcagacacaggcagaaatgctccacagttgctgcccccgtgggaaccctaaagacactagaacggggagaactcagcaagatccacgatgtgcagaaaggtgggggtttaggcgaggtgtcagaggacacctgggggggagtgactgcccagtcccatctctgggtccacacagcacctcccacaacccccgctgggatgcccttgtgatgggcccatgtactcagtatgtgtacgagtgcttttctctctggagaatgagctgcttacaacaaggcccatagttcttactctctacatcttcaggtgcctggcacagtggtaagataggttgccacccacatttttctacctaaggtttccttgctagcaaagagataccattcataaactcctgggatacctaagggaatagtctcaagcagcagaaatttgtatgaattttgcactcagtaataaatctgtgtttgctttaataaaaagtgtttaagaattatttttcatagcagcagcaaacaaaggaaggagctgggtggccttgagggag

SEQ ID NO: 1155 - DNA, 1275 bp, Homo sapiens
  SIMILAR (81)..(680): 751254mologous to Bos taurus mitochondrial methionyl-tRNA transformylase,accession number AB004316,Smith-Waterman Score=758.
tttcgtcggcggccgaggcgatgagggtgttggtgcggcgctgttggggtcctccgctggctcatggcgccaggcgtgggaggccgagtccccagtggcgagcactggcccgactcggctgggaggactgccgggactccagagtccgcgagaagcctccctggcgggtgctcttcttcggcacggaccagttcgcccgcgaggcgctgcgggcgctgcacgccgccagggaaaacaaagaagaagagttaatcgacaaactggaggtggtcacaatgccttccccatcaccaaaaggactgccagtgaagcaatatgctgtgcagtctcagcttcccgtatatgagtggccggatgtgggatctggagaatatgatgttggagtagtggcttcgtttggccgacttttgaatgaggctcttattcttaaatttccctatggcatattgaatgttcatcccagttgcctcccgagatgagcgtggcccagcccctgtaatccatacagtgcttcacggagacacagttactgggagtaacaattatgcaaattaggacctaaaaggtttgatgtaggcccaattctcaaacaagaaactgttcctgtgccacccaagagcactgcaaagggaattgggaaggcagtgttgttcaaggactggggtgccaacatgctcattttcagttttggaaaaatttggcctggaaagtctgagcaatggaaggcagcagccaatggagggggcgacttacgcccctaagatttctgctggtaccagttgtataaaatgggaggaacaaacttttagaacaaaaattcagactttaccgtgccattggaaatataattccgttgcagacgctctggatggcgaataccattaaacttctggatttggtagaagttaacagttcagtccttgctgatcccaaaaattaacgggaacaggctcttattccaggatcaggtaatataccacaaacagtcacaaatactattggtttattgcaaggatggttggattggtgttcgatcagtgaatgctcaagaaatcactaacagctactgacttctacaatggatatttgcacccctggtaccagaaaaattcccaagctcaaccaagccaatgcagatttcagactctcagacttccaacaaagaagaagcagaaaaaaaactgttgctatgcaacaatgcattgagtagttaggaagaagatggataaaaacctattacatatttgtaatttattaaaaaccttatttacaagg

SEQ ID NO: 1156 - DNA, 387 bp, Homo sapiens
  SIMILAR (3)..(200): 891254mologous to Mus musculus putative,accession number AK012858,Smith-Waterman Score=302.
tcgaagagctgcacgagaagtttgaccgtctgaagaaactgcaccaggacgagaagaataaactggaggataagaagaaatccctggatgatgaagtgaatgctttcaagcaaagaaagacggcggctgagctgctccagtcccagggctcccaggctggaggctcacagactctgaagagagacaaagagaagaaaaatttgggcttcctgtagacacccttttcctgcgcaacagagctgggcctccctttctctaatttcccccttaacatgcctggggggcatacaatccaacccgcgccctctcctctcttcctgccaaggtttatagaaacctgagaatctgagggtgatgtctggccgctggtcaagaagccaacagtca

SEQ ID NO: 1157 - DNA, 494 bp, Homo sapiens
  SIMILAR (2)..(145): 871254mologous to Homo sapiens Human cell division regulator (HCDR) 2,accession number AAY23783,Smith-Waterman Score=206.
  misc_feature (1)...(494): n = a,t,c or g
cagcaaacccttcagtttacaggagacatatgaggccaaaaggaacgagttcctaggggaactccagaaaaaagaagaggagatgagacagatgttcgtccagcgagtcaaagagaaagaagcggantcaaagaggcagagaaagagctgcacgagaagtttgaccgtctnaagaaactgcaccaggacgagaagaagaaactggaggataagaagaaatccctggatgatgaagtgaatnctttcaagcaaagaaagacggcggctgagctgctccagtcccagggctcccaggctggaggctcacagactctgaagagagacaaagagaagaaaaattaactctgctgtttgctgcatgctgcatgngacccagggtcctgtaatccatggctgtgtactgaatagtattccccgctacagctggactggactccatttagccttttaagccgaggttcctattttaactgacagctttcctttggggtgcc

SEQ ID NO: 1158 - DNA, 460 bp, Homo sapiens
  SIMILAR (1)..(129): 931254mologous to Mus musculus putative,accession number AK012858,Smith-Waterman Score=209.
gaagtgaatgctttcaagcaaagaaagacggcggctgagctgctccagtcccagggctcccaggctggaggctcacagactctgaagagagacaaagagaagaaaaataatccatggctgtgtactgaatagtattccccgctacagctggactggactccatttagccttttaagccgaggttcctattttaactgacagctttcctttggggtgccaggcagcgaggccccccacccctatcctgccatgtacttcaagctcacttcttctttttgagttccgcaacttgctcctgcctcccagccccactggcactgaccatgaccacctacttctattttttttttagagtttctttttttgatcacttactttcaaagcacacagtcaaacaaggttatgccaaatttccaggcctttttgaagtattgagaaggggaaggggatttctcacttc

SEQ ID NO: 1159 - DNA, 3451 bp, Homo sapiens
  SIMILAR (2506)..(2535): 1001254mologous to Homo sapiens transcription factor NRF,accession number AJ011812,Smith-Waterman Score=44.
ctacaagcctatcgtggaattcatcgatgcacaattcgaggcctacctgcaggaagagctaaagatccgaagagtgctacacacctaccatgactcccgaatccatgtctgcttgtatttcattgcccccacgggtcattccctgaagtctctggacctagtgactatgaagaagctggacagtaaggtgaacatcatccccatcattgccaaagcagatgccatttcgaagagtgagctaacaaagttcaaaatcaaaatcaccagcgagcttgtcagcaacggagtccagatctatcagtttcctacagatgatgagtcggtggcagagatcaatggaaccatgaactacacccgagatgtgtttgttatcaccatcaccatcttagacaaatctggctcaagggcccacctgccgtttgctgtcattggcagcacagaagaactgaagataggcaacaagatgatgagggcgcggcagtatccttggggcactgtgcaggttgaaaacgaggcccactgcgactttgtgaagctgcgggagatgctgattcgggtcaacatggaggatctgcgggagcagacccacacccggcactatgagctgtatcgccgctgtaagctggaggagatgggcttcaaggacaccgaccctgacagcaaacccttcagtttacaggagacatatgaggccaaaaggaacgagttcctaggggaactccagaaaaaagaagaggagatgagacagatgttcgtccagcgagtcaaagagaaagaagcggagctcaaagaggcagagaaagagctgcacgagaagtttgaccgtctgaagaaactgcaccaggacgagaagaagaaactggaggataagaagaaatccctggatgatgaagtgaatgctttcaagcaaagaaagacggcggctgagctgctccagtcccagggctcccaggctggaggctcacagactctgaagagagacaaagagaagaaaaatgcgtcaaaggcccgtagtcgtcactggagggaaaaaagtacgtcgcgcgagattctgcgacgggatttggaagttagggaacagccgcggcgcaagcgcactggcctcacaaccccggacggcacgcggtcggcttcgtccctggggtccctgcttgggggcggagaagatggctggaggacgtctgctgttggggggcgacttcctgtcgcgccgccgctgccccccctcccgccgccgccgctgccgcccctcccgccgcccccgcccgagccagtgctggagcagtggcgctatagccacgaaagtgactggcagtgggctctgcggcgcagcttcatctgtcggcacctgcacagctatcccggggctgccctcgaccagctcctcgcgctctccgccgcctggaccaaccacgtcttcctgggctgcaggtacagcccacgcttgatggaaaaaattctccaaatggctgaaggtattgatattggggagatgccttcatatgatctggtgctgtccaaaccttccaaaggtcaaaaacgccacctctcaacatgtgatgctagtagttcaaaagatgaaagacaggaagatccttatggccctcaaacaaaagaggtaaatgaacaaacacattttgccagcatgccaagagacatctaccaagattatactcaagactctttcagtatacaagatgggaattctcagtattgtgattcatcaggattcattctcacaaaagaccagcctgtaacagccaacatgtattttgacagtgggaaccctgccccaagcaccacatcacagcaggcaaactctcagtcaactcctgagccttcaccatcacagacatttcccgagtctgtggtagccgagaagcagtattttattgaaaaattaacggcgacaatctggaagaacctttctaatccagaaatgacttctggatctgataaaattaattatacatatatgttaactcgttgtattcaggcgtgtaagacaaatcctgagtatatatatgctcctttaaaggaaattcctcctgccgacatccccaaaaataaaaaacttctaactgatggctatgcttgtgaagttagatgccaaaatatctacttaactacaggttatgctggcagcaagaatgggtccagggatcgagctacagagctagctgtaaaactcttgcagaaacgtattgaagttagagttgtccggcggaaattcaagcatacatttggagaggacctcgtggtgtgtcagattggcatgtcctcctatgaatttcctccagctctgaagccaccagaagacctggtggtgctgggtaaagatgcttccgggcagccaatttttaatgcttctgccaaacactggaccaattttgtcattacagaaaatgcaaatgatgcaattggtatccttaacaattctgcctcattcaacaagatgtcaattgaatacaaatatgagatgatgccaaatcgcacatggcgttgtcgagtgtttttacaagatcactgcttagctgaaggttatggaaccaagaaaacaagtaaacatgcagctgccgacgaggctttgaaaattcttcaaaaaacacagcccacttatccatctgtcaaaagttcacaatgccatacaggctcttcacccagaggatctggaaagaagaaagatataaaggatcttgtagtttatgagaattcttcaaatcccgtgtgcacgctgaacgacacagctcagtttaaccgaatgacagttgagtatgtctatgaaaggatgacaggcctccgctggaaatgcaaagtgattctagagagtgaagtaattgcagaagcagttggggtgaagaaaactgtcaaatatgaagctgctggggaagctgtgaaaaccctcaaaaagacccagccaactgtcattaacaacttgaagaaaggagctgttgaagatgtgatttcaagaaatgaaattcagggccgctcagcagaggaggcttacaaacagcaaatcaaagaagataatattggaaatcagctgctgagaaagatgggttggactggtggtggtttaggtaaatctggtgagggcatacgggagcctatctcagtgaaagagcagcataagcgggaagggcttggtctggatgtagagagggtgaataaaattgccaagagagatattgaacagatcatcagaaactacgcccgctccgagagccacacagatttgactttctctagagagctgactaatgatgaacggaagcaaatacatcagattgcccagaagtatggtcttaagaagagactcacagcaactctccattatagctttcacacggtttggatgtgcagcacatccaaggcaaccacagctgtggtagagcttggtaaaagactgaagatacattggtgctttgatgaaaagataaatcaagtataa

SEQ ID NO: 1160 - DNA, 4700 bp, Homo sapiens
  SIMILAR (438)..(1607): 721254mologous to Mus musculus putative,accession number AK012858,Smith-Waterman Score=1329.
tttcgtcccgccccccttcgtagaagcctatggctggggttgcaggaagaactggaactgggctggccatagggggaagcggcgcgttaaatccgccccctctccataccctactttcaaggggtgggcggtagaggggaggttggggttggagcagcggcgagggggcccctcccttgcacctccccccaccggacttggtcgcgcccgaagtgtaacactttctctttgtcggaggagctcctctgtttcctgtgcagtagctcccgttgcggcggcacccgtggcagccctggcggacgcaggagcgatggcagcgaccgatatatctcgccaggtgggtgaaggttgccgaactgtccccctggctggacatgtggggtttgacagcttgcctgaccagctggtgaataagtccgtcagccagggcttctgcgttcaacatcctgtgcgtgggagagacaggtttgggcaagtcccaccctcatgggacaccctgtttcaacaccaaatttcgaagggggagccagccacccacacacagccgggtgtccagctccagtctaatacctatgacctccaagagagcaacgtgaggctaaagctcacgatcgttagcacagttggctttggggaccagatcaacaaagaggacagctacaagccatatcgtggaattcatcgatgcacaatctcgaggccttacttcaaggaggacccaaaagttcggaagagtgctacagacctaccatgactcccgaatccatgtctgcttgtatttcattgcccccacgggtcattgcctgaagtctctggacctagtgactatgaagaagctggacagtaaggtgaacatcatccccatcattgccaaagcagatgccatttcgaagagtgagctaacaaagttcaaaatcaaaatcacccagcgagcttgtcagcaacggagtccagatctatcagtttccttacagatgatgagtcggtggcagagattcaattgaacccatgaacgccccaccttcccgtttgctgtcattggcagcacagaagaactgaagataggcaacaagatgatgagggcgcggcagtatccttggggcactgtgcaggttgaaaacgaggcccactgcgactttgtgaagctgcgggagatgctgattcgggtcaacatggaggatctgcgggagcagacccacacccggcactatgagctgtatcgccgctgtaagctggaggagatgggctttaaggacaccgaccctgacagcaaacccttcagtttacaggagacatatgaggccaaaaggaacgagttcctaggggaactccagaaaaaagaagaggagatgagacagatgttcgtccagcgagtcaaagagaaagaagcggagctcaaagaggcagagaaagagctgcacgagaagtttgaccgtctgaagaaactgcaccaggacgagaagaagaaactggaggataagaagaaatccctggatgatgaagtgaatgctttcaagcaaagaaagacggcggctgagctgctccagtcccagggctcccaggctggaggctcacagactctgaagagagacaaagagaagaaaaattaaactctgctgtttgctgcatgctgcatgagacccagggtcctgtttgggcttcctgtagacacccttttcctgcggcaacagagctgggcctccctttctctaatttcccccttaacatgcctggggggcatacaatccaacccgcgccctctcctctcttcctgccaaggtttatagaaacctgagaatctgagggtgatgtctggccgctggtcaagaagccaacagtcatgtggctcgcagatgcatcctgcatcccagtccccctcccagcacccccagccatcccccctgtcttcccccacatctttgccagaggtgtgacatggtcagggggcccatctgctactctttcccaccagctcccctgttccagttctggttgctgtttagtttcccctggaggtatttgcaacccacccatggctggggtaacccaccgaatcagcacagctggtccccttgggtctcctgttattcccagttcattagttcctcctgggggtccaccccaccctcatcctcaggagccacagccatttcttagagggtttcaaaaggacagcctttggcgccttttccttctaacctttgagtccagccctttccagttttcattcactcgaagtaactgcacttcaagctgcgctcaaaatcggcaacgcatttatttacaccaagcccttcccataaaacacaactgctgaagaaaatagcagacgtatcccctctctctaactctgggtatcccacagatgcaaaagggagaataaacctgaatattattaccagcctagagtcttgaatgatagccttaccgaattcttcttgcgaggtatttcagcatctcggcgggtaatttccggaagggctccatactgtcccaataaggtgaggccagtagcaggaataataaatcccactttgtaggctggaaaactgagctgtcaaaagaatcaagtgtttgggggtttgctctgatgagtcttctagttcatttggtgaatgtcatgatgatttttaacatgcattttgcatgcatcccccaataagaagagatgagactcggccggagagaagaaaaggcccttaactttctttccaatttaaggagttgagagtttaaaaatattccagccctaacgtttttatcatgggtcccatctgatagtggctttgggaacctctgtgaagtagagagccctcccttgtcagggttatgaggcacagtggcctttggtgtttggccagtgacagtgtgagagatggagttgacctggcaatgatctgtggctaaacatgccgttctctctgccctatcctttgcagtaatccatggctgtgtactgaatagtattccccgctacagctggtactggactccatttagccttataagccgaggttcctattttaactgacagctttcctttggggtgccaggcagcgaggccccccacccctatcctgccatgtacttcaagctcacttcttctttttgagttccgcaacttgctcctgcctcccagccccactggcactgaccatgaccacctacttctattttttttttagagtttctttttttgatcacttactttcaaaagcacacagtcaaacaaggttatgccaaatttccaggcctttttgaagtattgagaaggggaaggggatttctcacttccaattatagatcataataggaagcaaaaagaaaaaaatgaaaagcaaacatatgcacgcacttttcttgttgacaaagcaagaatgtaggtttgctgtgtaggtttggtgctctattgattgggtgagtgaccagagcaagtatgaaggttgatgctgccaaagcacaagcctttttgaagtattgagaaggggaaggggatttctcacttcaattatagatcataataggaagcaaaaagaaaaaaatgaaaagcaaacatatgcacgcacttttcttgttgacaaagcaagaatataggtttgctgtgtaggtttggtgctctattgattggtgagtgaccagagcaagtatgaaggtgatgctgccaaagcacaagccagtttcttgggaaaattcaagttacagtggagtatttttttgaagaccatatgcttggaggtagaaacaaaccaacgaccaaaaaaaaaaaaaaaaaaaaaatctgctcagatactcagccagtagctcagagagatgctgagttaggcctgtcaggtctccttgggaaaggcttcatatttgcaactttgatgattctatgtccagcttcagagctgctttcccagaaattcacgcttaaacaaccaaccggtaaccaccacttccccacaccgccgcctggtaattatttgcattacaaaccggagacgccctcatttgcatttgtgtacagattaactagttaaggcttgagaagctctgaataattcaaaagtattagacccacacagccttggagagaccttcagaaactaaggaggagttttatattaagggagacattttagtcagtaagacgatataacctacttactccgtaaggggaaatgaaggcccggagaagggaagggacttgaccgaggtcccacttctgtttcgaggcagaagccagactaattttcatgcctcctgactcccaatcagtttcacaaagggattcaatctgtttatatacgttacattcctggatacgaggtcttttgatgttcagagtaactgactagttagtattagaagaccctcgaggtttttttccacagaaaaacatctgaagatggattgggtgagggctggcaaaaccgaaggcatgcccgggccagctccttaacccaatgacccagtgatgctgcaaggctggaacggggtccaggagactgtgtgtaacaggtgccctaggtgacccttataatcagggaagtttggtgaacaaaaatccgaacccatgagtgaacataaattaaaaagttgatcaacctattaaaatgtgtatttcattgggtagcttttctcactgtagacagattttttccttcttcaatgaaaaggcttttaaattagtacaactgttactatttaaaaaaaaa

SEQ ID NO: 1161 - DNA, 621 bp, Homo sapiens
  SIMILAR (263)..(379): 741254mologous to Mus musculus putative,accession number AK012063,Smith-Waterman Score=159.
atggtgcggacgcagtgtctgctgggactgcgcacgttcgtggccttcgctgccaagctctggagcttcttcatttaccttttgcgggggcagatccgcacggtaattcagtaccaaactgttcgatatgatatcctccccttatctcctgtgtcccggaattggctagcccaggtggtaatagacaaacattctgtccggttttttgtacgtaagaggccccatgtggatttcttcctggaagtggtgagccagtggtacgagctggtggtgtttacagaaagcatggagatctatggctttgctgtggcaggtaaactggacaatagcagaagcatccttaagaggagatattacagacagcactgcactttgcagttgagcagctacatcaaggacctctctgtggtccacagtgacctctccagcattgtgatcctggataactccctaggggcttacaggagccatccagacaatgccatccccatcaaatcctggttcagtgaccccagcgacacagcccttctcaacctgctcccgatgctggatgccctcaggttcaccgctgacgttcattctgtgctgagccgaaaccttcaccaacatcggctctggtga

SEQ ID NO: 1162 - DNA, 587 bp, Homo sapiens
  SIMILAR (191)..(250): 751254mologous to Mus musculus putative,accession number AK012063,Smith-Waterman Score=79.
catcctgtccggttttttgtacatagagggccccatgtgatttctccttggaagtggtgagccagtggtacgagctggtggtgtttacagcaagcatggagatctatggctctgctgtggcagataaactggacaatagcagaagcattcttaagaggagatattacagacagcactgcactttggagttgggcagctacatcaaggacctctctgtggtccacagtgacctctccagcattgtgatcctggataactccccaggggcttacaggagccatccagacaatgccatccccatcaaatcctggttcagtgaccccagcgacacagcccttctcaacctgctcccaatgctggatgccctcaggttcaccgctgatgttcgttccgtgctgagccgaaaccttcaccaacatcggctctgactgggacacaggcggaagcctaggagagccgaatcagtgtttgtgaagaggcaggactggccagagtgacagacatacggtgatccaggaggctcaaagagaagccaagtcagctttgttgtgatttgattttttttaaaaaactcttgtacaaaactg

SEQ ID NO: 1163 - DNA, 624 bp, Homo sapiens
  SIMILAR (278)..(622): 701254mologous to Mus musculus putative,accession number AK017684,Smith-Waterman Score=366.
  misc_feature (1)...(624): n = a,t,c or g
ccttagaaaccaggcggcgcgttcccggtggcggcgccatggactcccgggcccgcgcatccccgccagccttccttaaggcggatgggtggcccccgagaccccgtcggacccatggtttccagtgcagcgcggaggtgggcgatgccagcgtgccaggagccatgtctgaccaggacgtttggaagatcatatccatgccagaggctcttgtgaggagatgagttggtaaagagagaggctgggatgaagatgctgccaggagtgggcgtgtttgggactggcagctccngcccgaagttctggtcccactgctgagggcagaagggttcacttgttgaggccctgtgggggaagacttgaggaggaaggcgaaaagctttgctgaaggagatgaacatcgcctttctacaccagccggacttatgacatcttgctgcatcaagatgtggatctggtgtgcatcagcatcccccctccactcacccggcagatatccgtgaaagctctaggtattgggaagaatgtggtttgcgagaaggcagcaacatcggtggatgccttccggatggtgacagcctcgcgctactacccgcagctcatgagcctggtagggaacgtgct

SEQ ID NO: 1164 - DNA, 1478 bp, Homo sapiens
  SIMILAR (74)..(154): 961254mologous to Mus musculus putative,accession number AK012063,Smith-Waterman Score=136.
gtggaattcggcggagctgggccgcgggggccccggggccggcggtgccggggtcatcgggatgatgcggacgcagtgtctgctggggctgcgcacgttcgtggccttcgccgccaagctctggagcttcttcatttaccttctgcggaggcaggatccgcacggtaattcagtaccaaactgttcgatatgatatcctccccttatctcctgtgtcccggaatcggctagcccaggtgaagaggaagatcctggtgctggatctggatgagacacttattcactcccaccatgatggggtcctgaggcccacagtccggcctggtacgcctcctgacttcatcctcaaggtggtaatagacaaacatcctgtccggttttttgtacataagaggccccatgtggatttcttcctgggaagtgggtgagccagtggtacgagctggtggtgttttacagcaagcatgggagatctatggtctctgctgtgggcagattaaactgggacaatagcagaagcattctttaaggagggagatatttacagacagcactgcactttggagttggggcagctacatcaaggaccctctcttgtggttccacagggacctctccaggaattgtgatcctgggataactccccaggggcttacaggagccatccagggtacgggggaaggtgacaatgccatccccatcaaatcctgggtttcagtgaccccaagccgacacagcccttctcaacctgctcccaatgctggatgccctcaggttcaccgctgatgttcgttcccgtgctgagccgaaaccttcaccaacatcggctctggtgacaagctgctccccctccacctgagttggggtggggggggaaaagggagggcgagcccttgggaatgccgtctgatgccctgtccaatgttaaggactgcctgggcaagggtctgcccttcccaaccctctctggccttggggagcccctaaactcctcttagtactactggatggacacatgggcccaggggctctgaaagcagcctcactcctttaacttcgtgttcacactcccatggaaacccccagactgggaacacaggcgggaagccctaggagagcccgaatcaggggttggtgaagaggcaggactggccaggagtgacagacatacgggtgatcccaggaggctcaaagagaagccaagtcagctttgttgtgatttgattttttttaaaaaaactcttgtaccaaacttgatctaaattcttcactcctgctccaaagggctgggctgtgggtgggatactggggatttttgggccactgggattttccctaaatttgtccccccctttactctccctctatttttctcgtccttagacgtccctcagacgctgtaaccaggctttgtgtcttttttcccttttctctcttttaccccatgcattacaactttgaaaccaaaaaaaaaaaaa

SEQ ID NO: 1165 - DNA, 1163 bp, Homo sapiens
  SIMILAR (67)..(717): 431254mologous to Homo sapiens BBC1,accession number X64707,Smith-Waterman Score=264.
ccgctttccgctcggctgttttcctgcgcaggagccgcaggggccggtaggccagcccatgggcgccccagccgggaatgggcatgggtcttgaagcccccacttccaccaagggactggcaagcgggcggcgttggccacgtggtttcaaccagccggccccggaaagatccccagacgtaaaggccccggcaaagccaagggcgcgccgcatcgctccggcgcccccgcgtcggggtcccaatccggcccatcgtgcgctgccccacggtttcggtaccacacgaaggttgcgccccggccgcggcttcagcctggaggagctcagggtggccggcattcacaagaaaggtggcccggaccatcggcatttctgtggatccgaggaggcggaacaagtcccacggagtccctgcaggccaaacgtgcagcgggctgaagggagtaccgctccaaactcatcctctttccccagagaagccctcgggcccccaagaagggagacagttctggctgaagaactgaaactggcccacccaggctgacccggaccgggtcatgccccgtccggaaccgtctataatgaaggagaaagctcgagtcatcactgaggaagagaagaatttcaaagccttcgctagtctcccgtatggcccgtgccaacgcccccgctctttcggcataccgggcaaaaaagagcccaaggaagccgcagaaaacagatgttgaaaagcccacaataaagccctgcctggggacttggaatcagtcgggcagtcatgctgggtctccacgtggtgtgtttcgtgggaacaactgggcctgggatggggcttcactgctgtgacttcctcctgcccaggggatttggggctttcttgaaagacagtccaagcccctggataatgctttactttcttgtgttgaagccctgttggttgtttggttagtgactgatgtaaaacggttttcttgtggggggggtaccaaaggctgacttcagagtggacttgtgttttttctttttaaagaggcaaggttgggctggtgctcacagctgtaatcccagcactttgaggttggctgggagttcaagaccagcctggccaacatgtcagaactactaaaaataaagaaatcagccatgaaaaaaaaaaaaaaaa

SEQ ID NO: 1166 - DNA, 1292 bp, Homo sapiens
  SIMILAR (130)..(405): 391254mologous to Homo sapiens reverse transcriptase,accession number L27428,Smith-Waterman Score=165.
actatagtcactatgctgtgcaatagatctcaaaagcttattcctcttaactgaaacctactaccctgtgacatgtggggaacatctctctattccccagccccagtccctaaatgttgaatacacaatggggaaaaaatagtcttcaatgaatggtggtgggaaaattgtatatccacatgcagaagaataaaattggacccttacctcctaccatatataaaaaccaactgaaaatcgattaaagacttaaactgtaaaactactaaaagaaaatatagggagaaagcttcacaacgttggtctgggcaataatttttggatttgacctcaaaagtagatgcaaccacagtgaaaataaacaaatgaaattgcataaaataaaaaatgtttctgcacagcaaaggaaataattaatggagtaaagagacattttacagattgggagaatatatttccaaactattggtggggctcataaacggataccctaacatataatgatttgacaggtggtactaaaaaagactcgaggtctctctgacctcctcctcaacctgtgtttcttagtcctctgttttcccacagcacaggaggaaggtctctgaagttcctttatctgctttaagttcagactcaccaaataagaaaacagataattctggtgccttccatgggttctcattaactgaagccatatatgaggagaaagaatgaagtctcttaacccccacctggataagatttttcctcacaaaccattgtcttctctggcaagccccagtaagactttggtcccaggccatttatgtgattctttcaccccatttaagttctccccaaattatttactcttcccccaaaatcacccccacacttccccccatctcccctctccccctaaggacaagggtatatcacccatctataccccccattgccttggtggggtgatcactctgattctctgcatgcatttttatagatttgtttgccatttatcctattaatctgcattctgtcaattgtggcaagttatcagcatatttttttaacttttaattattcttaatggaaagacacttctgtatacactggaaatctcaggaaatttcttttttccttaagcttaattgaaatgtttacttttcagtaaaatttcaagcttgagtaatgttcatgcctgcttttcattgaaatagaatgaaaaggttgcacaatattattttcatgaaattacttctagtataattctgaataaacactttgaaaggcagtgaactgtaaataaa

SEQ ID NO: 1167 - DNA, 505 bp, Homo sapiens
  SIMILAR (67)..(123): 941254mologous to Homo sapiens Human oxidoreductase protein (HORP)-3 (clone 1942326),accession number AAY59180,Smith-Waterman Score=93.
tgaaagattcagacctcccatagcccgagtgattgatgtatctaatgggaaagttcatgttgctgaaactgtttggaagaaacaggtggcctgggagtagatattgtcctagatgctggagttggatcctccagatagccactgccttttcctcaagggagcaacgttagctttcctgaatgatgaagtttggaatttgtcaaatgtacaacagggaagatatctttagtattccaagtgccttgcaagtattcatttaaacattaaaacagccttttgagatgtaagtactgttatcatacccatttcacaggtgaagaaacagaagcacagagatgttgatacagactcaaggacgcagcaagtggcggacgaagaatcacactcaggcagtctctctcctttctgaacagagatgagccctaagatacctggaagattttgtttttaacctcacattaaggaaagcacacatcaccttgaaaggttgcacacttactcctat

SEQ ID NO: 1168 - DNA, 487 bp, Homo sapiens
  SIMILAR (30)..(485): 991254mologous to Homo sapiens quinone oxidoreductase homolog -1,accession number AF029689,Smith-Waterman Score=775.
tgaaggtgcaggccgttggggcggctcagaggcagagttccacagatgaagaaataacatttgtatttcaagaaaaggaagatcttcctgttacagaggataactttgtgaaacttcaagttaaagcttgtgctctgagccagataaatacaaagcttctggcagaaatgaagatgaaaaaggatttatttcctgttgggagagaaattgctggaattgtattagatgttggaagcaaggtatcattctttcaaccagatgatgaagtagttggaattttgcccctggactctgaagaccctggactttgtgaagttgttagagtacatgagcattacttggttcataaaccagaaaaggtcacatggacggaagcagcaggaagcattcgggatggagtgcgtgcctatacagctctgcattatctttctcatctctctcctggaaaatcagtgctgataatggatggagcaagtgcatttggtac

SEQ ID NO: 1169 - DNA, 492 bp, Homo sapiens
  SIMILAR (172)..(399): 971254mologous to Homo sapiens quinone oxidoreductase homolog -1,accession number AF029689,Smith-Waterman Score=386.
atgaagatgaaaaaggatttatttcctgttgggagagaaattgctggaattgtattagatgttggaagcaaggtatcattctttcaaccagatgatgaagtagttggaattttgcccctggactctgaagaccctggactttgtgaagttgttagagtacatgagcattacttggcccgagtgattgatgtatctaatgggaaagttcatgttgctgaaagctgtttggaagaaacaggtggcctgggagtagatattgtcctagatgctggagtgagattatatagtaaagatgatgaaccagctgtaaaactacaactactaccacataaacatgatatcatcacacttcttggtgttggaggccactgggtaacaacagaagaaaaccttcaggtgaagaaacagaagcacagagatgttgatacagactcaaggacgcagcaagtggcggagcaagaatcacactcaggcagtctctctcctttctga

SEQ ID NO: 1170 - DNA, 526 bp, Homo sapiens
  SIMILAR (14)..(220): 1001254mologous to Homo sapiens Human oxidoreductase protein (HORP)-3 (clone 1942326),accession number AAY59180,Smith-Waterman Score=374.
  misc_feature (1)...(526): n = a,t,c or g
cggacgcgtgggtgatgaaccagctgtaaaactacaactactaccacataaacatgatatcatcacacttcttggtgttggaggccactgggtaacaacagaagaaaaccttcagttggatcctccagatagccactgccttttcctcaagggagcaacgttagctttcctgaatgatgaagtttggaatttgtcaaatgtacaacagggaaaatatctttagtattccaagtgccttgcaagtattcatttaaacattaaaacagccttttgagatgtaagtactgttatcatccccatttcacaggtgaagaaacagaagcacagagatgttgatacagactcaaggacgcagcaagtggcggagcaagaatcacactcaggcagtctctctcctttctgaacagagatgagccctaagatacctggaagattttgtttttaacctcacattaaggaaagcacacatcaccttgaaaggttgcacacttactcctactgatggtgccatntgcacacgaaaaca

SEQ ID NO: 1171 - DNA, 712 bp, Homo sapiens
  SIMILAR (353)..(511): 921254mologous to Homo sapiens quinone oxidoreductase homolog -1,accession number AF029689,Smith-Waterman Score=236.
tatacgtgctaaaattgtttttaactaaaaatgccatatgtagtgttgaaatgaaaactagacactatttcattcgcatccattgagataataggggtgagcacttatgataagcaccaggcttgacttgctgctcttgtcacttgtccttggaaatttaggctctattacaccaccaactctcaaatcatttccctgttgtagagctaaacttgacgtcctacagaatttctctaacttaacatgttgagtctctgagagtgcaaaacttgaaacaagagaaagtggcctgcctggcatcctctgcttattgaatggttttatttaattctcctttacattgccaccttaacaatcctttcagctacgtatcttaaaggatgtgatggagaagttatcaactggtgttttcagacctcagttggatgaacccattccactgtatgaggcaaaagtttccatggaagctgttcagaaaaatcaaggaagaaaaaagcaagttgttcaattttaattttcttctttctcagacctcagtcggatgaacatattccagtatttgaagccagaattttctttggaaattgttgagaaaaaccaaggaagataaaacaagttgcatttttaagcacgtttctctgctaagacaagatgctcagttgacacatttgaaaagtggtttgaaaaattcttgtgcaaatgatcaagataa

SEQ ID NO: 1172 - DNA, 2211 bp, Homo sapiens
  SIMILAR (601)..(960): 661254mologous to Homo sapiens Human oxidoreductase protein (HORP)-3 (clone 1942326),accession number AAY59180,Smith-Waterman Score=338.
  misc_feature (1)...(2211): n = a,t,c or g
atgccccgggcagccatcgcgcagacccccgcgccgacccccgcccccgctgcagccgcccgtggtccaggccgccgccttgcagccctctcctcacctcatctccgggcggcggaacatgacgggagatgtagttccgagaccggttgccatggcgttctggacagcctcgcgagtccgaccccgcccttcaggagtgacgagcggcctgaccaatgggagcagggggcgggctctctgacgaaggactggaaggtggcggtggtgaaggtgcaggccgttggggcggctcagaggcaggtgagccccgggaaacgcgtcctgtgtcttgggaaacgggcctttaagcgaaaggtggagagatgccccacagaaccgtgcagccctggggaggatggtggttcgcgtcgaaccctaacctgggacttgttcgggcccaggcctagcttagctgaggccgctgagggccacttctttcttcctcatcactttgctgttttcggaaagcagttagtagttattcgctgtatgtggcttttgagccagatcggccctcttcattatgctaaacggcggaatcatctggagcgagatgtgactatgaaaggcttatatttccaacagagttccacagatgaagaaataacatttgtatttcaagaaaaggaagatcttcctgttacagaggataactttgtgaaacttcaagttaaagcttgtgctctgagccagataaatacaaagcttctggcagaaatgaagatgaaaaaggatttatttcctgttgggagagaaattgcctggaattgtattagatgttggaagcaaggtatcattctttcaacccagatgatgaagtagttggaattttgccccctggactcctgaaagacccctggacttttgtgaaagtttgttaagagtacatgagccgttacttgggttcataaacccagaaaaggtcacatgggacggaagcagcaggaagcatttcggggatgggagtgcgtgcctattacagcttcttgcatttatctttcttcatcttctctcctgggggaaatcagtgcctgataatggatggagccaagtgccatttgsgtacaatagctattcagttagcacatcatagaggagccaaagtgatttcaacagcatgcagccttgaagataagcagtgccttgaaagattcagacctcccatagcccgagtgattgatgtatctaatgggaaagttcatgttgctgaaagctgtttggaagaaacaggtggcctgggagtagatattgtcctagatgctggagtgagattatatagtaaagatgatgaaccagctgtaaaactacaactactaccacataaacatgatatcatcacacttcttgggtgttggaggccactgggtaacaacagaagaaaaccttcagttggatcctccagatagccactgccttttccctcaagggagcaacgttagctttcctgaatgatgaagtttggaatttgtcaaatgtacaacagggaaaatatctttnttaacaatccttccagctacgtatcttaaaggatgtgatggagaagttatcaactggtgttttcagacctcagttggatgaacccattccactgtatgaggcaaaagtttccatggaagctgttccagaaaaatcaaggaagaaaaaaaccaagttggttccaattttaattttccttcctttcctcagacctcagtcggatgaacatattcccagtatttgaagcccagaattttctttggaaattgttgagaaaaaccaaggaagataaaacaagttgcatttttaagcacgtttcccctgctaagacaagatgcctcagttgacacatttgaaaagtgtttgaaaaattccttgtgcaaatgatcaagataattctataattaacatcttaagggaatttttctaaaaaccttttcattgtttctatatattttgcccctgctataaaattccttccatgaagaaaactgcctctttcagcaaaagtcacactactcttgataaaagctgttgcaggcctttgctaagctatcaaagtaacgtattaattttgtattcaactcccgttctcaacaccttcattaagtctttgctgtcataatttaagcatttgagtatattttgaagtcttaaaagacttagcccataggcccttaaaaaaaaaaaaaaaaa

SEQ ID NO: 1173 - DNA, 992 bp, Homo sapiens
  SIMILAR (935)..(876): 851254mologous to Homo sapiens Human secreted protein encoded by gene 22 clone HMSJW18,accession number AAY02671,Smith-Waterman Score=93.
gtcgactttacgagtataatagtttattacctaacttacaggtacaaagtgcaaatgacttgacgcctctctttccccaatcccttgaactctctggatctcaaactttctttaggaaagcaaaggttaaaagcagacagtaactaaattccaaataaagacaagatttcaaacatgaatattatcttgataggcaaaaggtacagtaaaaccaaaatttcattactccacagtttacctttccatttaaaacttgggatagtataacacttgaggactgaggagatttgggtttcagggcattaaccaggatttaattgtttttgggcagggtaaggtacagggctctgggcaggggtttaccaactattctggtcaacaaaagtaaagacaagtggatacttatttttagtggagctttaaaaacctgtgagaagctcacattgactttttggccctcccagtcccacaaaataatacttcatttgataagcctaaagtaaagagccaattttatgggattaactctctcaaagtgaagcacatgaaaaatggggcctaaagtcacaatatattaatccaggatataaaaaattaaattttcacagaggttttcagggatgtttgtttgttaacaatgacctatatgtaataatgttatttgttaataaattcacacaacacaaagcagtaattaactaatgaattttcatttttctttccccaatattaaaaagggataattatactatcattataatttgataatgtctatatctgctaattagggcacataatatcctgcaaactactactataaaatgtgggaaatcctagaactataattaatactgtaattaaaatccccccaaaggccaggcatggtggctcatgcctgtaatcacagcactttgggagcccgaggcgggtggatcacccctgaggtcaggagttcaagaccagcctggccaacatggcaaaattccatctct

SEQ ID NO: 1174 - DNA, 1473 bp, Homo sapiens
  SIMILAR (269)..(466): 961254mologous to Homo sapiens Ku protein subunit,accession number M32865,Smith-Waterman Score=316.
gccctcccaaagtgctggggatgacagatgtgagccactgtgcctggccagttgtcttgactttaatattaccacgaatggtgattatttgaaaagttgtctgaagtcattatagcagttggtttccttagtcactttttctaagtcctgaaaatgttaatagtctagttttcagggagcttttaaaagcatgtttcagttttaactgaaagaacttctcacttgctgaaaattgttttttcctccctcacttttgtttacccttgcaacaggcatcttccttgacttgatgcacctgaagaaacctgggggctttgacatatccttgttctacagagatatcatcagcatagcagaggatgaggacctcagggttcactttgaggaatccagcaagctagaagacctgttgcggaaggttcgcgccaaggagaccaggaagcgagcactcagcaggtgtgcactcagcccgggtcagctgcctacactgcccttaaatcagaagcaggctgggcgcggtggctcacacctgtaatcccaacagtttgggaggccaaggcaggcggattgcttgagcctaggagttgagaccagcttgggcaacatggcaagaccctctctctacctaaaaaaaaaaaaaaaaaaaatcagaagcaatgcactgctacacattgcttaacaaaccagaagcaatacattgctctgacctgactggctacttaactcgactatgccactgcctcactgtcttcctctaaaatagtttatttcaggatagcagaagctatttgctgctttatctctggcaagagctggcatgatatttctctaaagtaacacagccctccatttcgtgggggtagacagttatggtctaagagtatccttagctgtactcactagtacagtcatgtgttaattaatgatagggataccttcttagaattgcgtcattaggcgattttgtcattgtgcaaacatagagggtacttcacacacccagagagtacagcttgactacacacctgggctgtgtggttagcctgttgctcttaggctacaaacctgtatagcatattaccatactgtttactgtaggcaatggtaagtatttgtgtatctaaatgtatctaaaggtatagaaaaggtacaataaaaatatgatataggccagacacggtggctcacgccttgtaatcccaccactttgggatgccgaggcgggtggatcacaagttcaagagattgagaccatcctggcctacatggtgaaaccttgttctctactaaagatacaaaaattagctggacgtgatggcgcgcgcctgtagtcccagctactcaggaggctgagaatcgcttgaacccaggagtcagaggtggcagtgagccaagatcatgccactgcactccagcctggtgacaaagtgagactccgcctcaaaaaaaaaaaaaaaaaaaaaaaaaaaaaaa

SEQ ID NO: 1175 - DNA, 2773 bp, Homo sapiens
  SIMILAR (620)..(1789): 661254mologous to Homo sapiens Ku protein subunit,accession number M32865,Smith-Waterman Score=1133.
aaagtatgcagccagtttttcttatgatatacttgatatcccgtgtaataatggaaaaacgaggacggtgagaaatctggcaggctggcagatatttccataattcagttctttttggatctgtgagcctaatccgattcggcggctccattgggacccgtggcgacggcggccacgacggccctcgggcacccggcagcggcttggaccttcccgtacccgacgggagtgcgaagcggagggagagggggggaccgagcccgggcccgggctgaggggtgggggagaggccgccctgcgctgctcgcgcccccacacccgctaccggcaacgactactgtgaggtgacagagaggggacagggagggcccacacggaagagggggcgggggcagggatgcacttttatgacgtagagggcgttgattgggaccgagtacagggcccgcgcatgcgtggattgtcgtcttctgtccaagttggtcgcttccctgcgccaaaggtaagcgggccgttatccatttgtgttgttcgccagctaggcctggcctcgtcccgcttcgctcggtcagtgccattcggtgtgtggaagaaagaccttccctgcctatctctgctgtctcagagtgaagatgagttgacaccttttgacatgagcatccaggtaagactaccttttaatttaagacaaatttaaaaacagtattggctgggcatggtggcggctcatgctggtaccgagaaagacaaaaattcagtgaattttaaaaatatttacgtcttacaggagctggataatccaggtcagtaatattttaagatcagcttttcccttatatatgagaatatcagtactctgatcaaagaggacatgggccacggatctgactactcactcagtgaagtgctgtgggtctgtgccaacctctttagtgatgtccaattcaagatgagtcataagaggatcatgctgttcaccaatgaagacaacccccatggcaatgacagtgccaaagccagccgggccaggaccaaagccggtgatctccgagatacaggtgggcatatttccccgttctcttaaattggcacttaattattgtttttttattttttatttttttagatcatcagcatagcagaggatgaggacctcagggttcactttgaggaatccagcaagctagaagacctgttgcggaaggttcgcgccaaggagaccaggaagcgagcactcagcaggtgtgcactcagcccgggtcagctgcctacactgcccttaaatcagaagcaggctgggcgcggtggcttcaagcctcctccaataaagctctatcgggaaacaaatgaaccagtgaaaaccaagacccggacctttaatacaagtacaggcggtttgcttctgcctagcgataccaagaggtctcaggtaggtagagatgccttttgttgttgttgtttttgagacagggtctcattgtgtcgcccaggctggagaggtttgatgctcatgggtttcaagccgttggtactgctgaagaaacaccattacctgaggccctccctgttcgtgtacccagaggagtcgctggtgattggtaagtagcgtggaccatggatgagtgactctaacacacagtgcagtttacggagcagcgctttgtaatacacaccccgcaggaacatccctccttattttgtggctttggtgccacaggaagaagagttggatgaccagaaaattcaggtgactcctccaggtatgtggcagagatatttccagggcttctgaaccttgcccatactttggaatcatccatggactcctcagggaggaggcactgtccggctagctctggatgtatcaaaaaagctggagactggaaccaactgccgccaggtaaagggtctttgctggggcaatacaggtaggaacagtaaatacaggagggccgcaaccacagttttgctttctgcagtttcagttacccatagtgcaactccagagcaaggtggggcaagatgaaggctatcgttgagaagcctcgcttcaccatacagaaggtgacagctttgagaacccccgtgctgcagcagcacttcaggaacctgaggggccttggccttggatttgatggagccggaacaagcagtggacctgacattggcccaatgttgaagccaatgaataaaaagactgggctccttggtcggatgagtctaaaggagcctctctaccccaaccagattacaatccttgaagggaaaagttacccaaagaggaaaaacacgaataaatgaaagggtctgggaaagaaaaaaaggcccaaagggtggaagtaattcaagaaagagggagcttgaagaccccacatcaagaaaggggtacgctggggcaaagttcactgtgccccatgctgaaaagaggcttgccggggcttacggggctgaaagagtgggctgaaagaagcaggagctgctggaagccctcacccaagcacttcccaggacttgaccagaggcccgcgcgtccagctgcccttcccgcagtgttgccaggctgccctggccttgtcctcagccagttaaaatgtgtttctcctgagctaggaagagtctacccgacataagtcgagggaacttatgtttttgaggcttttctgttgccatggtgatggtgtagcccctcccactttggctgttccttactttgcggcgtggatgaagagccctaagtttgtactataaaaaaaaaaaaaaaagggcggccgct

SEQ ID NO: 1176 - DNA, 1675 bp, Homo sapiens
  SIMILAR (773)..(1081): 431254mologous to Homo sapiens Human secreted protein encoded by DNA clone vq3 1,accession number AAB34695,Smith-Waterman Score= 185.
gttttttgttttttttttttttttaatgggagccaaaatgtttagagaaagcttctgggtgtgcctttcagattttgaacaagctgccttgtctaaacatcaatttctactactctgtagccttaaaatgtgctctatttagatccacaggacccttctactggtgatatgaaaaacagaatacagaaattaagagaatcactttttactcaacaattaggggaagtaagtcaaagccctcctcttgcgacagcagatttcctgcggggccacctggttcagcgcctttgataaggggataagggtgatcaaaagcactcacggaaaacagttccattccaggtatggaaatgtccagaaattccctttggcccattttctccctgactctttgcctaggtccccctgggtttccttgggcagcacttcttggatggaggacagggtccaccaactttctcaagacattgaggtcttgagacacaagaaaccacagacttcaaccctgaagggcctaactctgtccatatgtctgtcctttgaatacttcctgtccctgcctaaaaggaaacccaaattgtttctaggatactggtgaagttgtagtgaggggcttaatgcagttaataatctaaaagccagcagaaaaccaaaatgcctcagccttaaatggttgtttcttttttattttccataatgaatagactcacaggcattttacccccttattagtaaaattgtgaagagaaagaagatgacacacttttggacgctgtattttatgtatttatttttgagacagagtcttgctctccttcgcccaggctggagtgcagtggcacaatcacagctcactgtagctttgggcctgctgggctcaggcaatcctcctacgtcagccctccaggtacctggaaccacaggtatatgccaccatgcccagctttttaaaattatttttgtagagatgggggtctccctattctgttcaggctggtcttgaactcctgggtttaagcagtcctctcacctcggcctctcaaaatgctgagattacaggcatgagccaccacatgcagccaattgctatgtttttaaaactagatttatagacatattttttaaaagctagggcacttttccccttaactaaaagcactagttcagttcttcaggtaatttcattggaactcacctaagactggaattggaatgtttccatgttgctcattttttctacaggttatgatagaatctcattaaatcttgacatctctcccaggggaagaatatccacaggccagtggtgtgaatggggtatgagatgatagcatttactaaatcggtaatctcttttatgtatgttcttgttatattgaggttaagaggcaagatgattggcagcagaattcttcaggattttgtttgctgtggtatggattatattggagccccttaatctgaaggatgaaactgtgacttgatttatctaattagcttttaattacctatagctattttattttattctctcctatagttttggggaccactgtaaacgtctctcagatgacttgtatttttgtagtgctatgaaatttatttacacacttaaaaactgtatattcacttgaactctaacaatgtacatgtatatgtatatatttgctccaca

SEQ ID NO: 1177 - DNA, 533 bp, Homo sapiens
  SIMILAR (199)..(459): 931254mologous to Homo sapiens Human transport-associated protein-7 (TRANP-7),accession number AAY31645,Smith-Waterman Score= 428.
ccggagaactggccatgcgtcctcttgccagcctgtctgggggccagaagagccgagtggcctttgctcagatgactatgccctggtgaggcctcattttccagagctcttcccctcccatttccccttcttgcccagtagaaaactgtatcagaaggctttattttctctcaccgcaccccttcactgcccaccttcctggttctgccttccagccccaacttctacattctggatgaacccacaaaccacctggacatggagaccattgaggctctgggccgtgcctgcaacaatttcaggggtggtgtgattctggtgtcccacgatgagcgctttatcaggctggtgtgccgggagttgtgggtatgcgaaggaggcggcgtcacccgtgtggaaggaggatttgaccagtaccgcgccctcctccaggaacagttccgccgcgaaggcttcctctagggccaccaggctgaggactcgcccaggacatggactggtctctcagacccctgggccaccatgtaggccac

SEQ ID NO: 1178 - DNA, 1294 bp, Homo sapiens
  SIMILAR (181)..(954): 521254mologous to Homo sapiens Human transport-associated protein-7 (TRANP-7),accession number AAY31645,Smith-Waterman Score= 487.
  misc_feature (1)...(1294): n = a,t,c or g
cacaaaaagcctaattctattttttagcatacagtaaatgagaagaatggactctaaagtaatgatacctgagtggtaggagtacaagccctttctaagttttctctgaacatatattactcgtgtaggaagttatttttttaagtaataaatctagtctacctcatctcttctcccaggcctgagctgaagcctgtggacaaggaatcagaggtcgtaatgaagttccctgatgggtttgagaagttctcgccgccaattctgcagctagatgaggtggatttctactacgatccgaagcacgtcatcttcagtcgcctctctgtgtctgctgatctcgagtctcgcatctgtgtggttggagagaatggggctgggaagtctaccatgctgaagctgcttttgggggacctgggcacctgttcggggcatcagacacgctcacaggaatctgaagattggctatttcagccagcaccatgtgggagcagctgggacctaaacgttcagtgcttgtgggaacttgctgggcacgcaagttttcctggggcggcctgaggaggagtaccngtcaccagcttgggttcggtatgggcatctccggagaactgggccatgcgtcctctttgccagcctgtcttgggggccagaaagaagccgaagtggccttttgctcagatggactattgccctgccccaactttctacattctgggatgaacccacaaacccaccttggacatgggagagccattgaggctctggggccttgccttcaaacaatttcaggggttggtgtgattctggtgtcccacgaatgaagcgctttatcaaggctggtgtgccgggaagttgtgggtatgctaaggaaggcggcgtcacccgtgtggaaaggaaggattttgaccagtaccgcgccctcctccagggaacagtttccgccgcgaaggctttcctctagggccaccagggttgaggactcgcccagggacatgggactggtctctcagacccctggggccaccatgtaggccaccacttcagggtcgtngaacttccccccaactttggggacagcctttatttcccaaatgtctctatccttttgactggagcatcttctgcacaaccttgggagcccatccaagggttggtgaggactggtctcccgggggtgggggtctggggggtaccctctggggttatagattcccccactgccccagctctgactggaccccaagtggctgctatgtaaattaaatctctccccgcgtctcctttgcctcatgtc

SEQ ID NO: 1179 - DNA, 2223 bp, Homo sapiens
  SIMILAR (832)..(1296): 601254mologous to Homo sapiens Human transport-associated protein-7 (TRANP-7),accession number AAY31645,Smith-Waterman Score= 411.
  misc_feature (1)...(2223): n = a,t,c or g
tgttgcgttcggagaggcgcagcatccacagggaagnaggcgcctccttccctggggttcctgagtggaacatggcgacttgcgccgaaatcctgcggagcgagttccccgaaattgacggacaagtcttcgactacgtgaccggcgtcttgcacagcggcagcgcggacttcgagtctgtggatgacctggtggaagctgtaggggaactattgcaagaggtgtccggggacagcaaggatgacgcgggcatcagggccgtgtgccagcgcatgtacaacactctgcgtctggctgagccacaaagccagggaaatagccaggtgctactggacgcccctatccagttgtcaaagataacggagaactacgactgtggaaccaaacttccaggactgctaaagagggaacagtcctcgacagtgaatgcaaagaagttagagaaggccgaggctcgacttaaggcaaagctgaggaagcgctcagagaaggacacgctcaagaccagcaaccctctagtcttagaagaggcatcagccagccaggcaggcagcagaaaggagagtcggttggaatcatctggcaagaacaaatcctatgatgtgcgaattgagaactttgatgtgtcttttggcgatagagtactgctggctggagcggatgtgaacctggcatggggccgccgttacgggctggtggggcggaatgggttggggaagacaacgttactgaagatgctggccacccggagtctgcgggttccagcccacatttccctgctgcacgttgagcaagaggttgctggagatgacactcctgccctgcagagttgtgctggagagtgacagtgtgcgagaggatttgctacggagggagcgggagctcacttgcccagattgctgctggcagggcggagggctctgaagctgcagagctggccagaaatctatgccaaactggaggagattgaggctgacaaggcacctgccagggcatcagtcattctcgctgggcttggctttacccctaaaatgcagcagcagcccaacccgggagtttctcaggttgcctggaggatgaggctggccctggccggggccctcctttgctaggccagatcttctgctgttagatgaacctacaaacatgctggatgtcagggccatcctgtggctggagaattacctgcagacgtggccctccaccatcctagtcgtctcccacgaccgcaacttcttgaatgccatcgccacagacatcatccacctgcacagccagcggatagatggttaccgggtgagactttgagaccttcatcaagagtaagcaggagcggcgtgctcaaccagcagcgtgaatatgaggcgcagcagcagtatcgccagcacatccaggttttcattgaccggtttcgctacaatgccaacagggcctctcaagtgcagagtaaactcaagatgctggagaagctgtctgagctgaagcctgtggacaaggaatcataggtcgtaatgaagtttccttgatgggtttgagaagctctccgccgcccattttgcagcttagatgaggtggatttctactacgatccgaagcacgtcatcttcaagtcgcctctctgtgtctgctgatctcgagtctcgcatctgtgtggttggagagaatggggctgggaagtctaccaatgctgaagctgcttttggggggacctggcacctgttcgggggcatcagacacgctcacaggaatctgaagattggctatgttcagccagcaccatgttgaagcagcttggacctaaacgtcagtgctggtggaactgctggcacgcaagtttcctgggcggcctgaggaggagtaccgtcaccagctgggtcggtatggcatctccggagaactggccatgcgtcctcttgccagcctgtctgggggccagaagagccgagtggcctttgctcagatgactatgccctgccccaacttctacattctggatgaacccacaaaccacctgggacatggagaccattgaggctctgggccgtgccctcaacaatttcaggggtggtgtgattctggtgtcccacgatgagcgctttatcaggctggtgtgccgggagttgtggggtatgcgaaggaggcggcgtcacccgtgtggaaggaggatttgaccagtaccgcgccctcctccaggaacagttccgccgcgaaggcttcctctag

SEQ ID NO: 1180 - DNA, 353 bp, Homo sapiens
  misc_feature (1)...(353): n = a,t,c or g
agaggagtacgtgatccccgggcactgagcctaagatgtcctaacctccacccagaaccccttcagtccctgctgggtgactcagggcgtcctaactcctccatgnnnnnnnnnnnnnnnnnnnnnnnnnnnnnncaggaaaggattgtccttgaggccccaggaagctctgccgccccctccctgtccctcatgccgctcctcagctccctcagctcctagagggggaagaggagagacccccaacaaggggacaggagggtcactgtgccaatcctgtcatcaccctcctgtggatgtacaggcagtgctcaataaatgcttcgaggctgatgagnnnnnnnnnnnnnngg

SEQ ID NO: 1181 - DNA, 2169 bp, Homo sapiens
  SIMILAR (499)..(567): 861254mologous to Mus musculus COP9 complex subunit 7b,accession number AF071317,Smith-Waterman Score=91.
ctccccgtgaagtcccatactacacaatattcatctggtgttgttgcctagagtttgtcccagcggagggttggcttcggatctgcagaggctttagcgacctgctccagccactgagcacactagccgtctgagacggcagctgagttgcactgtgcgacgcgacagagactacatttcccagcattccagcggcgcactcgggggaccacagatcccagcgcaccacagatcccagcgcaccacaaagaggcccggggactacaaatcccagcatcccctgcactcggttcctctgtaacttagactccagtgtgccgcgcagtgtgcgcaaattcacaaacccgcccgctgagttggtcgtttcggaatcccgagacttgaaacccaacgggaagacccttctcaccctcaaaagaagatgacagcccgcagtagagttaacttctgtttacatggaactcagacatctgcaaatcatgatttcaaggccagagaatggcaggggaactgaaaccctcatgtaatctcctggagcagtctattttactagccaaaggtaccagtgtgctcatccctcactgctctcataagccaggtcttaaaagctccctgagtgtatgtctttggagaacttctggagctgtgcaacgtgcatgagcttgcggaatgagctaatgctgcttatttgcagctgttgaacctgtttgcctatgggacatacccagattacatagccaacaaggagagcctgccataactgagcacagctcagcagaacaagctgaagcatcttaccatcgtgagcttggcatcaagaatgaagtgtatcccctactccgtgttgctgaaagacctggagatgcggaatctccgggaactagaagaccttatcattgaggctgtctacactgacatcatccagggcaagctggaccagcgaaaccagctgctggaagtggatttctgcattggccgtgacatccgaaagaaggatatcaataatattgtcaagaccctgcatgaatggtgtgatggctgtgaagcaggctctactgggcatcgagcagcaagttctgagagccaaccagtacaaagagaaccacaaccgaaacttcagcagcaggtagaagcagaggatgtttacattttgcctcaaagtggtaacgactgtagaggacttagatttgtcagcagtcttattggaggagtgaggtgtgtgcatctgaaacacaaaggagatgcagtggtgtgggaggccatcgaagagggagaggcactgccaggcaagtacagattgaagggtggcagatcagtgtgggctgcagcagtcagggcagtttgtatggaccaggttaccaacatcaagaagacactcaaagccaccgcatcctcctcggctcaggagatggagcagcagctggctgaacgggagtgtccccctcacgctgagcagaggcagcccaccaagaagatgtccaaagtgaaaggtctggtctccagctcgccactagggccggctggggcagctggcactcaccaggcctgggtcaggtggggaggggacaccaagggcccatttcctcccctctctacctgcagtgagttccagacctgcccgtcccctcaccagcgcctccccaccctgttggtactgttccagaaaaactgttactccccctcacccactccctccttccccagttgttcccttcagactcaggggctccaccaatgccatcccaaaacagggtcagacactgcccagcttccctccaggaggttcttgtctctgtgtaaagggcttgtctccctcccagtttttcttttgctcccacgtcattttgtcaggctggttataagccggaggcagctttaaccagcccccatggatgattgtgaaggaggcccctccccttgtgaggagggggcactcctctccagcccctggtaccacagtcctcacgatggtgcagtgatttctagccaggcgtcaagatgcgctgctttccctctcctgcctcatcccttgttggcagctccagatcaggccgtggagggacgtgatgctgggctgtgtttactaaacccacgggttttcagcctcttaagcccagctccgatctccaattagttgagagcgctgggttgactaacctctggtatctc

SEQ ID NO: 1182 - DNA, 413 bp, Homo sapiens
  SIMILAR (225)..(413): 761254mologous to Mus musculus putative,accession number AK014473,Smith-Waterman Score=262.
taaaaacaggaacattcagggagtgctcattattggattgtggtcaggaagcagttagcctaatcagtaagacttgtttacaaataagtagaaaacttcaatcagggtgagtttctaattgcatttctacttggcagatattgtttgtgaacagcagtataaaatgtgctccaagggaaattgtgattgtctgggttaatttccttttgtctctggcctgctaaaggatggcctggtgggaatccaacaattaccagtccttctgcctgccctctgaggagagcgagccagaggaccttgagaatggggaagagagctctgctgagctggattaccaagacccagatgctacttccctcaagtacgttagtggtgatgtcacccaccctcaggctggggccgaagatgctctc

SEQ ID NO: 1183 - DNA, 876 bp, Homo sapiens
  SIMILAR (16)..(324): 381254mologous to Homo sapiens Human RECAP polypeptide, SEQ ID NO: 11,accession number AAB68881,Smith-Waterman Score=145.
tttcgtgcctggacgagaagcagaagcgagaggaggaggagaagaaagcggagttcgagcggcagcgaaaaattcgacagcaagaaatagaagaaaaactcatcgaggaagaaacagcacgaagagtagaagaattggtagcaaaaagggtggaggaagaactggagaaaaggaaggatgaaattgaacgagaagttctccgaagggttggaggaagccaaacgcatcatggaaaagcagttgctcgaagaactcgagcgacagagacaagctgagcttgccgcacaaaaagctagagaggtaacgcttcggtccgttttggaaagtagagacagtccatggcaaaactttccagtgttgggttctgcctcctgctcaatttcagaaagagatggaatacagactatctaattcctttctcgtctaaacttaacattgctgcgaaagttaattttttagcctattcagaagtgctgactgataacttaaaagttggaagcttttataaaacatattcaaggatactttttgatttaatggaactggctatttgagaagtgtttgaaacttttgccatggctgcaggacttacattcttttttgggaggacggtggggagacagggagtggtaaagggaaaaggttaaaaatccacctgtggttgtatattcttctattctgtcactctgttacctagactgtgagaggcttttgccttcagtcagattaaaaagagcagggcctaacattgagtgatagcacctgctttgataaataggttttctcactcttctttttttccttcttttatccccttcacttcctcccctaaaccctgcttcagcacaatgggactaattctagcattctgatcat

SEQ ID NO: 1184 - DNA, 1302 bp, Homo sapiens
  SIMILAR (1)..(975): 471254mologous to Mus musculus putative,accession number AK014473,Smith-Waterman Score=524.
  misc_feature (1)...(1302): n = a,t,c or g
ggtaaagattattctaaagagcccagtaaggaagacagaaaatcatttgaacaactggtaaaccttcagaaaacccttttggagaaagctagtcaagagggccgatcactccgaaataaaggcagtgttctcatcccaggccttgtggagggatctaccaaaaggaagcgggaactgagtccagaagagctggaggacagacagaagaaaagacaagaagcagctgccaagagaaggagactcatagagggagaagaagagggcaaaagggaaggaggcttgaacataaggaaaaagatggcctgggttggggattcccaacattttacccagtccttcttgccttgccctctgagggagagccgagccagaggaccttgagaatggggaagagagctctgctgagctggattaccaagacccagatgctacttccctcaagtacgttagtggttgatgtcacccaccctcaggctgggggccgaggatgctctcattgtgcactgcgtagatgactctggccactggggcagaggtggtttatttacagctctgggaaaagcgatccgttgaagccaagaaaaatatatgagctggctggggaaaatgaaaagaccttgagtttgggaggtgtccttttatttcctgtttgatgataaaagattcaagatacaaagggcaagatttgttggccttgattgtggctcagcatcgtgaatcgttccaatgtcctgtccggcatttaagatggcagccctataagaagggcctgaagaagatatttttagcggcaaaaaaggnaggaaagtcaagtgtccaacctccccacgtattggacatgccacgtaaaggttttaaacgggtaggggtacctgaaccgaccttattcgggaaacatccgggcctgcaaagaggccatccccaaccttaccatatattatttcccctagaaggcaagtctgcctgtcccttccattcacagttcttcatccttccctccctcaaggacagctggtgcccttaagggattgggcccagccctcagatcctggtctttaagcaaccagcctaatatttaccccagaggtactgcaataggagtatttcaaaatggaatcaggatctggtggggcctcgagaaattgtctcttttctgagtttcagtttggttctcctggatgttttgctctgttttgatacctgtaatatagggaaacacaactttttttgggaaagccctttgaccccagcttgctagttgcataataataaattttctgttcccaaaaaaaaaaaaaaaaa

SEQ ID NO: 1185 - DNA, 434 bp, Homo sapiens
  SIMILAR (3)..(203): 1001254mologous to Bos taurus cpn10 protein,accession number X69556,Smith-Waterman Score=330.
  misc_feature (1)...(434): n = a,t,c or g
ttgaaaggagtgctgctgaaactgtaaccaaaggaggcattatgcttccagaaaaatctcaaggaaaagtattgcaagcaacagtagtcgctgttggatcgggttctaaaggaaagggtggagagattcaaccagttagcgtgaaagttggagataaagttcttctcccagaatatggaggcaccaaagtagttctagatgacnnnnnnnnnnnnnnnnnnnnnnnnnnnnnnnnnnnnnnnnnnnnnnnnnnnnnnnnnnnnnnnnnnnnnnnnnnnnnnnnnnnnnnnnnnnnnnnnnnnnnnnnnnnnnnnnnnnnnnnnnnnnnnnnnnnnnnnnnnnnnnnnnnnnnnnnnnnnnnnnnnnnnnnnnnnnnnnnnnnnnnnnnnnnnnnnnnnnnnnnnnnnnnnnnnnnnnnntgcttcttacacccg

SEQ ID NO: 1186 - DNA, 431 bp, Homo sapiens
  SIMILAR (3)..(203): 1001254mologous to Bos taurus cpn10 protein,accession number X69556,Smith-Waterman Score=330.
  misc_feature (1)...(431): n = a,t,c or g
ttgaaaggagtgctgctgaaactgtaaccaaaggaggcattatgcttccagaaaaatctcaaggaaaagtattgcaagcaacagtagtcgctgttggatcgggttctaaaggaaagggtggagagattcaaccagttagcgtgaaagttggagataaagttcttctcccagaatatggaggcaccaaagtagttctagatgacnnnnnnnnnnnnnnnnnnnnnnnnnnnnnnnnnnnnnnnnnnnnnnnnnnnnnnnnnnnnnnnnnnnnnnnnnnnnnnnnnnnnnnnnnnnnnnnnnnnnnnnnnnnnnnnnnnnnnnnnnnnnnnnnnnnnnnnnnnnnnnnnnnnnnnnnnnnnnnnnnnnnnnnnnnnnnnnnnnnnnnnnnnnnnnnnnnnnnnnnnnnnnnnnnnnnnnnnnnnnnnttacac

SEQ ID NO: 1187 - DNA, 560 bp, Homo sapiens
  SIMILAR (289)..(426): 971254mologous to Bos taurus cpn10 protein,accession number X69556,Smith-Waterman Score=237.
tctttcacctcggctgggcgcctagaaaagcctagaaacagctccttttttcttccgcctccgagtcttcgcgtcagcgtcctgcgcagggcccttggggcgaatcgcggtgcgcgtcggggcgaccgccctccctccctgggaggggcgagggggctagcggcgaccgctggggcgagcgcgcctgcgcgctgggtgattttttcacgtgtcgccagggccggactgcgagtctctttgcggcgctacactagagcagagtacgagtctgaggcggagggagtaatgggtggagagattcaaccagttagcgtgaaagttggagataaagttcttctcccaaaatatggaggcaccaaagtagttctagatgacaaggattatttcctatttagagatggtgacattcttggaaagtacgtagactgaaataagtcactattgaaatggcatcaacatgatgctgcccattccactgaagttctgaaatctttcgtcatgtaaataatttccatatttctcttttataataaactaatgataactaatgaaaaaaaaaa

SEQ ID NO: 1188 - DNA, 616 bp, Homo sapiens
  SIMILAR (36)..(284): 861254mologous to Gallus gallus heat shock protein 10,accession number AF031309,Smith-Waterman Score=369.
cccacgcgtccgggcggagggagtaatggctgtgacaagcttttagaaagtttcttccactctttgaccgagtattggttgaaaggagtgctgctgaaactgtaaccaaaggaggcattatgcttccagaaaaatctcaaggaaaagtattgcaagcaacagtagtcgctgttggatcgggttctaaaggaaagggtggagagattcaaccagttagcgtgaaagttggagataaagttcttctcccagaatatggaggcaccaaagtagttctagatgacaaggtgtgtaaaccttaataattctaaaaagaagtcagatatttgcaattagttgtcctaactaatggtttttttcacttgcaggattatttcctatttagagatggtgacattcttggaaagtacgtagactgaaataagtcactattgaaatgcatcaacatgatgctgcccattccactgaagttctgaaatctttcgtcatgtaaataatttccatatttctcttttataataaactaatgataactaatgacatccagtgtctccaaaattgtttccttgtactgatataaacacttccaaataaaaatatgtaaatgaaaaaaaaaaaa

SEQ ID NO: 1189 - DNA, 886 bp, Homo sapiens
aataggaagactttggggagtggacacttagctgcagtccctttccccaaatctgttctttggagggaacaaaacaatcacaagagtatgttctaaatccaaaaaaactttaaatttttgtatgttgaaagaaggaaaatatgaccatttgtatatggcattttctgggtgctggctactgttgcaggtttatttcatatagttgataagttatgttaatatttaacagttataaagttagctttagttaactaaagttagcttttccagaatattttcttgaacttttacgttggagtcaggttttagtttaagccactgtgtattatttcaaagtgtaactacagtggtatttttgagtgaagatctgtaattctagtatgagtcgtatcacttagccacgaaatatatttttaatataattggatttggagtgacccatgtttcattagttgtagtgatttaaaagttaactgtttatgttgggtgaactagatatctttgctaaataaacatccttccttttttaagggtggagagattcaacccagttagcgtgaaagttggagataaagttcttctcccagaatatggaggcaccaaagtagttctagatgacaaggtgtgtaaacttaataattctaaaaagaagtcagatatttgcaattagttgtctccaccaagggtttttttcacctgcaggattatttcctatttagagatggtgacattcttggaaagtacgtagactgaaataagtcactattgaaatggcatcaacatgatgctgcccattccactgaagttctgaaatctttcgtcatgtaaataatttccatatttctcttttataataaactaatgataactaatgaaaaaaaaaaaa

SEQ ID NO: 1190 - DNA, 784 bp, Homo sapiens
aatttttttttttttttttttttttcatttacaatattttttatttggaagtgtttatatcagtacaaggaaacaattttggagacactggatgtcattagttatcattaggtttattataaaaggggaaatatgggaaattatttacatgacggaaaggatttcaggaacttcaagtggaatgggcaggcatcatgttgatgccatttcaaatagtgacttatttcagtctacggtactttccaaaaattgtaacaatctctaaataggaaaataatccttgtcatctagaaactacttttggtgcctccatattctggggagaagaactttatctccaacttttcacggctaactgggttgaatcatctccaccctttcctttagaacccgatccaacagcggactactggttgcttgcaatacttttccttggagatttttctgggaaggcataatggcctcctttggggtacaggtttcaggcaggcactcctttcaaccaatactcgggtcaaaagagtggaagaaacctttctaaacgcttgtcctgccattactccctccgcctcagactcgtactctgctctagtgtagcgccgcaaagagactcgcagtccggccctggcgacaccgtgaaaaaatcacccagcgcgcaggcgcgctcgccccagccgtcgccgctagccccctcgcccctcccagggagggagggcggtcgccccgacgcgcaccgcgattcgccccaagggccctgcgcaggacgctgacgcgaagactcgga

SEQ ID NO: 1191 - DNA, 2035 bp, Homo sapiens
  SIMILAR (369)..(401): 901254mologous to Homo sapiens Similar to H2A histone family, member O,accession number BC003602,Smith-Waterman Score=47.
aatacaacggggcgggagcagacttggctggctcatgcatcttaaaacaccagaaatgtgtcgaaagtaaagagcggatttctgctacttatagggcttttatgctaatgagggatggagagtacctcttagttaattggaagacaaactgcacagttgtcatccgtgggcagagctatgcaaatgaggtatgaaagtacagcttttctattggctatctgactagcatttgctaccgaccaatcaaaaagtcggatttactccccaggaactacctataaaagcggccatgctttacatatttcttgattttgtttgttttctcgtgagcttacgctgctggttttggtgattcttgtctgattgcaatgtctggacgtggtaagcaatgaggcaaagttttttgccaaagcgaaatcccgctcttctcgcgctggtctccagttcccggggggccgagtgcaccgcctgctccgtaaaggcaactacgcagagcgggtttggggcaggcgcgccggttgtacctgggcggcggtgttagagtatctgaccgccgagatcctgggagctggccggcaacgcggctcgcgaccaacaagaagactccgcatcatcccgcgccacttgcagctgggccatcccgcaacgacggaggagctcaacaaacttgcttagggccgggtgaccatttgcttcaggggcggcgtcccttcctaaacatccagggccgtgctttctgcctaagaagaccgagagttcaccacaaggccaagggcaaagtgattttgacaggtatcttgagcttccccggaaacgctattcaaacccaaaaggctccttttcagaagcccccctaccgtttcaaaggaagagctaacctcactgcttgtaggtagaaggaaaaaaggcactaaggttgcaaaagcttctcatttcagagagatgccaggatcctaagtgcctgccaaacttaccaattctaaggaataagtggatggatggcattactgattcctaccatacgggatggatttggcacccgcaaattgttttattaaaaacattctacatcatgggtggggagataagggggataaaatgaagagaaagaatattattgaggggaagtttttttgaatacaaaatgggtttaattttttaaataagtattacattcacagggttcaaactatttgaagtaaagagattatatataaagaatccatccctcaacttacccaggtggtcacttttctttttcttgtgtatctgcccagtattcattcctgctgatatcagtcaataatgaatgatacgtgttttcttcactttttttcattcttggcaggtaacagactgtgtaggacttttctgcacttgcccttttcataacaatctatcttgggagaactttcccctatggggaacataccagagcttcccggtacacagttggcatgttactggcattatggcaaatgccattaatattttaatgtaaccctgtccccactgttgggtagggcaccttgagttgttttaagtccttttgcctatccaaacagttctgggggtggattaacccctgatttacctgcaaaattggaaatgttcggctaattctgcttggaatggtggtaagtgaactgaaaattccagtcgactcttgggctagactcaacgtttcttaaaaactatgtggccgatcaccaaattagttattttgaaccttatatttcttcacctctaaaaatggagggtaatacctaccccttaagtgggctatgagaatgaagatcatgtgtatgaattgttggtgctctaaagaacagcacaaataaaattactttcaaatttaattttaattgaactatgtgtaatttcttaattttgaaataattttatttgtaatgtgcataatcttatttaatgtataatgtatacattgtaatagaaacagatttcccgaaattccagcctggcatgaggtaataaaaggtaatgcaaagggaaaaaaaaaaaaaaaaagtcgacg

SEQ ID NO: 1192 - DNA, 414 bp, Homo sapiens
  SIMILAR (151)..(402): 411254mologous to Leishmania major probable CG14353 protein,accession number AL358712,Smith-Waterman Score=152.
ctctgggtgtggcggttgccgtagctgaaattggttgcaccatgtcggccttcgagaagcctcagatcatcgcccatatccagaagggcttcaactacacggtgtttgactattgaaaaggccaaacctattaaatgtggaacatttggtgcaacatctttacagcagagatatttagctactggagattttggtggaaaccttcatatatggaatttagaagctccagagatgccagtatattctgtaaagggccataaagaaattataaatgccatagatggcataggtggactaggaattggagaaggagcacctgaaattgtgactggcagccgagatggaactgtgaaggtgtgggacccaaggcaaaaagatgatcctgttgctaatatggaacctgtacaaggagaa

SEQ ID NO: 1193 - DNA, 383 bp, Homo sapiens
  misc_feature (1)...(383): n = a,t,c or g
cggacgcgtgggcggacgcgtgggaatttatcatttatctgaaatcacatgtagcagattgcatagtctgtaatcctctcagagggaaacttcttgtttaaacagctctatatggatttatacttttatatttataaatttataacttcatacaaatttataaacatttctttataaattgtaatttaatagattatctcagaaaaacctctctgagtgatgacccttccttaatactgggtgatgtgtgaannnnnnnnnnnnnnnnnnnnnnnnnnnnnnnnnnnnnnnnnnnnnnnnnnnnnnnnnnnnnnnnnnnnnnnnnnnnnnnnnnnnnnnnnnnnnnnnnnnnnnnnnnnnnnttttttctctttattttctgt

SEQ ID NO: 1194 - DNA, 943 bp, Homo sapiens
  SIMILAR (477)..(941): 711254mologous to Homo sapiens Human RECAP polypeptide, SEQ ID NO: 11,accession number AAB68881,Smith-Waterman Score=487.
cattacgccaagcttggcacgaggggcgctacgggtttctcgttggaggcggccttcgtggcagttgtatacgccgggaaaaggcataaagtccgttggccgacacctttctttcctccggcctcggtagaaccgccagcccgcgtccgaaggcggaggcgaggggaactggccgcgtgaggggcctgaggcgagcggttagagcgtctcccggaaggatgggccggtctcggagccggagctcgtcccgctccaagcacaccaagagcagcaagcacaacaagaagcgcagccggtcccggtcgcgatcccgggacaaggagcgcgtgcggaagcgttccaaatctcgggaaaagtaaacggaaccggcggcgggagtcgcggtcccgttcgcgctccaccaacactggccgtgtcccggcgcgagcgggaccgggagcgcgcctcgtccccgcccgaccgcatcgacatcttcgggcgcacggagagcaagcgcaggcagcctggacgagaagcagaaagcgagaggaggaggagaagaaagcggagttccgagcggcagcgaaaaattcgacagcaagaaatagaagaaaaactcatcgaggaagaaacagcacgaagagtagaagaattggtagcaaaaaagggtggaggaagaactggagaaaaggaaggatgaaattgaacgagaagttctccgaagggtggaggaagccaaacgcatcatggaaaagcagttgctcgaagaactcgagcgacagagacaagctgagcttgccgcacaaaaagctagagaggaggaagaacgtgcaaaacgtgaggagctagagcgaatactggaagagaataaccgaaaaattgcagaagcacaagccaaactggccgaagaacagttgagaattgttgaagaacaaagaaagattcatgaggaaaggatgaaact

SEQ ID NO: 1195 - DNA, 444 bp, Homo sapiens
  SIMILAR (341)..(183): 961254mologous to Homo sapiens Human secreted protein, SEQ ID NO: 7398,accession number AAG03317,Smith-Waterman Score=278.
aaatttctttatggccctttacagaatatactggcatctctggagcttctaaattccatatatgaaggtttccaccaaaatctccagtagctaaatatctctgctgtaaagatgttgcaccaaactgttccacatttaataggtttggccttttcaatctcccgaagcagcttcaggtccccgtgctggatctcgtacagctgaatgacgccggtgccccgtgcgaagttgcccatggtcacaaatttggcgctgcagggcacccacttacagtcaaaccccgtgtagttgaagcccttctggatatgggcgatgatctgaggcttctcgaaggccgacatggtgcagccaatttcagctacggcaaccgccacacccagagcccccaaaatcggcaacctggaaccagactccaaacattggcaatttgtccctcccgctttc

SEQ ID NO: 1196 - DNA, 2732 bp, Homo sapiens
  SIMILAR (778)..(1551): 661254mologous to Homo sapiens putatative 28 kDa protein,accession number AF164799,Smith-Waterman Score=748.
  misc_feature (1)...(2732): n = a,t,c or g
tgggcgcggaggaactaccccgcggatgagaagaaaggttttaaataggaaacattcctcagtcggcggtcagcttctgtggtctcgcgcggctcaagccatgctttgggggacgctgggcgaaggctctggcaaagaggaatgcagaccccaggatccgcactcgcccccaacggcagtccggatcctcgacccggcacccacctcccgaagcagcttcaggtccccgtgctggatctcgtacagctgaatgacgccggtgccccgtgcgaagttgcccatggtcacaaatttggcgctgcagggcgcccacttacagtcaaacaccgtgtagttgaagcccttctggatatgggcgatgatctgaggcttctcgaaggccgacatggtgcagccaatttcagctacggcaaccgccacacccagagcccccaaaaacggcaacctggaaaccagactccaaacattggcaatttgtccctcccgctttccgtattctgccccagatgccctggcatgttggctgtagttatccccggataatgccagatgcgctcctgcgatcgcacagaatgttccttcacaacagcacgaatttgtttatcgcctttacccactgcctttcgcacacatacatacggccccaaatcctgcaggtccccggcctgtgacgttttaggaaaggggcggagctgcaggggtggttggctgaggctggcttctgcgtggtgcagctgcgcacgtgtttcagccggcagcgctttaagatttccggggatggaatccgaaatggaaacgcagagcgccggggcagaggagggctttacccaggtcacccgcaagggtggccgacgggcgaagaaacgacaggctgaacagctgtccgcagcaggagagggcggggatgcgggccgcatggacacagaggaggccaggccggcgaagaggcccgtcttcccacccctctgtggggacgggctcctgagtgggaaagaagaaacaaggaaaattccagtcccagctaacagatacacaccattgaaagaaaactggatgaagatatttactcctattgtggaacatttgggacttcagatacgctttaacttggaaatcaaggaatgtagaaatcaggacttgtaaagaaaccaaggatgttagtgactctgacaaaagacagactgattttgtgaaagacttttattctcggactttcaggatggaaggaatgacacttgaccctcatcaggttggaatgacctcttcctagaagtcttttgaaattacagatgttaaacccctaaaggggagaccatctatccagggcaataggaagaatcgctgggcaaaggagggaaaaaccaaattcaccatagaggaatgtgacacggacaacgatagttttggctgatgtgaaagttcacatccttgggctccttccaaaatatcaagatggcaagaactgccatttgcaacctaatcttgggaaatcctccttccaaggtttatggcaatattcgagctgtggctagcagatcagcagatcgattctgatttcaagtcagagactttctaacttgcctttgggactctggtgaaaaatactttacagtggcatatccccagaacccagctgaacaattccagtcatttgaagcctccgtcccttcttccattctcagccagaagcttaacctgaaaagaaagatttaaggggattcacaattcaacaggttttaggataatttaaatttcaaaaattgaatggtatactttacacattaggtataatttatcatttatctgaaatcacatgtagcagattgcatagtcttgtaatcctctcagagggaaacttcttgtttaaacagctctatatggcatttatacttttatatttataaatttataacttcatacaaatttataaacatttctttataaattgtaatttaatagattatctcagaaaaacctctctgaatgatgaccccttccttaaatactgggtgatgtgtgaatatttgtttgttggccagaccagggtctcactttgtcacccagggctaggagtgcagtgggtgcaatctcaggctcactgcagccctctgccctccctgagttccaagtgatccctccctgcttcagccctcccctagtagctgggactacaggtatgcacccaccatcccnggcctaattttttgtattttttgtagagatggggtttcgcccatgttgacccaggctggtcttgaactccctggccctcaagggatccgtccgcctcagcctcccaaagtgctgggattacaggcataagccactgcgcctggccttgatgtgtgaatattttagaggtcataagcagtggttttggcccataccgtattataccatatacatcagtaagagctcatcttggaacctgttttgcagtttcaaaaattaaagacctacatcacacggttgatgtgaagaaagctttatttttcaaatgagtatttaatgaaagtatacataaccaatgttgggtatacagatgcttctcaacttatgatgggtttaggtccagataagcccactgtgagttgaaaataccaaaagtcaaacatcatagcttagcctaccttaaaagggctccgaacactacattagcctacagttgggcaaaatcgtctaatacaaagcctattttataataaagtatgttgaatatctcatgtaaaaaa

SEQ ID NO: 1197 - DNA, 1691 bp, Homo sapiens
ccctttttagcgtcttctttccttaaagataaaagaaaactcaaatttgtttacattaggctttcttagcatataaatatatttccaaaataaattacatgttgtgtaaactttctccatgatgaaatagtcaaggaccagaatctgtaatatttttatgtaagattacttgtcaagactactacaagtcagtatgaactaccttcccataaagatttttggtatttgtacttatttatgaactttacttgagacagaatatggttaaaattaggaacatctactttgaatgaggtttatttttctattttgaatttgccttatgtatattcaaaggcttatggaaatactgtaaaggaacattaggaaaaggacaaataggctataaccatctatcttaaaatcagacccttagtataagcacctctttttcttttcctctttgacaatttagtctcttatttaggtccatgtaattaatttcattccattattttttagctgtttattctaaaaaacaaaaattttcagccactcccattttatttctccccatggacagggtccctatataggcagtacttaacacagtgccttgcaccatagtaggccattcagtaaatacttacatgccatgaatgaataatgtattttcagtgtaacaaatttattataaaagtgtagttcgactcttcttggtcttggagtttgagagtacagaattacagggaatgaagagaggtataagtagatattttaatggaaatgaagtataaattaataacttgacttacccctccataagttactgctaactggagataccccttgtatgccccaacctgtaaaggaaaaaagttctatttctatatttataggacattcttctcactcaaggaacatataagaaatatgtaggtttcaatcagttgctctcaaccctgactgcattttagaatcatttggagagtttttaaaaatatcccatgcctgaatcttgattcccattttcatgtaatttgagacaagacctggtcatcagtattttttttaaagttctccaggtaatttgaatgtgcaggaaggattcagaatcactggtttaatttgttattgaaaacagtaccagtattaaatgtgtttcctcttccttcttttctgtatgtatgtgtggtttttgattttttgttgttgttgttgttttgtggccaccctttgcactagaccatcccttttattggtggtattggcctatattcccattgacaaatgcaatttttaattatttatttaatataggagtattttactgtttaatatttaaacaatgtttaatgtatttcattattaaactagtattatagtttgtttttttcccatgtctccataacttttactaacatttgtttttagcagcacaacagtaatccatataaaaacaactaattcataatgaggaaaatctcataatttttaaggcagaaagaagtattaatttttgatctgccatgtagaatgagacaaatacagtttgcttatgaaaggaaagtggcatacttttaaattggtctacacagaaaagtaaaagtaaactattcatttaaataagattcattatctaataaatattgagggaatatttttcctaaataaaaatttttctgactgctaacaaaaaaaaaaaaaaaaaa

SEQ ID NO: 1198 - DNA, 256 bp, Homo sapiens
  SIMILAR (59)..(3): 1001254mologous to Homo sapiens A suppressor of cytokine signalling protein designated HSCOP-4,accession number AAY53884,Smith-Waterman Score=103.
  misc_feature (1)...(256): n = a,t,c or g
gagccctggccgaaccgcgatgagaagctggtcttgtcgcccttgtggtggaggaggcctgggggcagccagggtcgcagtgagcccgggagctccaggctcggccccgccccaccntgggcctcacgcacccgtgtaggagaggccccagctgtcctcatccctgcccagcaggctgcagaacgtgtggcggtatttgtccaggtccacatccgacgtcccgatgcccaccatctaggaactgtggccaaacaca

SEQ ID NO: 1199 - DNA, 2848 bp, Homo sapiens
  SIMILAR (1034)..(2845): 921254mologous to Homo sapiens insulin-like growth factor binding protein complex,accession number M86826,Smith-Waterman Score=2844.
atggccagacgcccccggaacagcagggcctggcacttcgtcctgagtgcagcccgccgagacgcagatgcccgggccgtggctctagcaggctccactaactggggctacgactctgatgggcagctcctgcaggtcacatgcctgagcctcacaggctcgtggctgtgggatgcaggcgtgcctgcgggctcggcagtgttcgacacatgtgctgcttgtcctgtgtcaccaaatgggcctgcagtctgttgtgggcaggagcacagcgactcggactccgaccccgagtactccacgctgccgccatccatccccagtgcggtgcccgtgaccggcgagtccttctgtgactgtgctgggcagagcgaggcctccttctgtagcagcctgcactcggcccaccggggcagggactgccgctgcggagaggaagacgagtatttcgactgggtctgggatgacttaaataagtcatcagccaccctgctgagctgtgacaaccgtaaggtcagcttccacatggagtacagctgcggcacagcggccatccggggcaccaaggagctgggggagggccagcacttctgggagatcaagatgacctctcccgtctacggcaccgacatgatggtgggcatcgggacgtcggatgtggacctggacaaataccgccacacgttctgcagcctgctgggcagggatgaggacagctggggcctctcctacacgggcctcctccaccacaagggcgacaagaccagcttctcatcgcggttcggccagggctccatcattggcgtgcacctggacacctggcacggcacactcacctttttcaagaacaggaagtgtataagaatcaaagaggcctggagcccccttacgcggctgccgcaaccctgcctgccctgcatgcagatggccctgaggaaaggcaatgtgagctttggtggccgacggtccagggttcctacctgtcccccgacggcggtgccccggtcccctcccgcagcacccgaccaaggcctggatgcaggcaggaggcctggccctggcgctgctgctgctgtcctgggtggcactgggcccccgcagcttgaggggaacaagcccccgaaacgcgggggtaagccgagggccccagcgtgcccgcccgcttgtgtctgcagctacgatgacgacgcgaatgagctcagcgtcttctgcagctccaggaacctcacgcgcttgcatgatggagtcccgggcggccacccaagccctgtggctggacggcaacaacctctcgtccgtccccccggcagccttccagaacctctccagcctgggcttcctcaacctgcagggcggccagctgggcagcctggagccacaggcgctgctgggcctagagaacctgtgccacctgcacctggagcggaaccagctgcgcagcctggcactcggcacgtttgcacacacgcccgcgctggcctcgctcggcctcagcaacaaccgtctgagcaggctggaggacgggctcttcgagggcctcggcagcctctgggacctcaacctcggctggaatagcctggcggtgctccccgatgcggcgttccgcggcctgggcagcctgcgcgagctggtgctggcgggcaacaggctggcctacctgcagcccgcgctcttcagcggcctggccgagctccgggagctggacctgagcaggaacgcgctgcgggccatcaaggcaaacgtgttcgtgcagctgccccggctccagaaactctacctggaccgcaacctcatcgctgccgtggccccgggcgccttcctgggcctgaaggcgctgcgatggctggacctgtcccacaaccgcgtggctggcctcctggaggacacgttccccggtctgctgggcctgcgtgtgctgcggctgtcccacaacgccatcgccagcctgcggccccgcaccttcaaggacctgcacttcctggaggagctgcagctgggccacaaccgcatccggcagctggctgagcgcagctttgagggcctggggcagcttgaggtgctcacgctagaccacaaccagctccaggaggtcaaggcgggcgctttcctcggcctcaccaacgtggcggtcatgaacctctctgggaactgtctccggaaccttccggagcaggtgttccggggcctgggcaagctgcacagcctgcacctggagggcagctgcctgggacgcatccgcccgcacaccttcaccggcctctcggggctccgccgactcttcctcaaggacaacggcctcgtgggcattgaggagcagagcctgtgggggctggcggagctgctggagctcgacctgacctccaaccagctcacgcacctgccccaccgcctcttccagggcctgggcaagctggagtacctgctgctctcccgcaaccgcctggcagagctgccggcggacgccctgggccccctgcagcgggccttctggctggacgtctcgcacaaccgcctggaggcattgcccaacagcctcttggcaccactggggcggctgcgctacctcagcctcaggaacaactcactgcggaccttcacgccgcagcccccgggcctggagcgcctgtggctggagggtaacccctgggactgtggctgccctctcaaggcgctgcgggacttcgccctgcagaaccccagtgctgtgccccgcttcgtccaggccatctgtgagggggacgattgccagccgcccgcgtacacctacaacaacatcacctgtgccagcccgcccgaggtcgtggggctcgacctgcgggacctcagcgaggcccactttgctccctgctga

SEQ ID NO: 1200 - DNA, 1970 bp, Homo sapiens
  SIMILAR (348)..(4): 1001254mologous to Homo sapiens A suppressor of cytokine signalling protein designated HSCOP-4,accession number AAY53884,Smith-Waterman Score=611.
tcaggtccggcggcagcgcttcctctggcagggccgaggctcgcgactgctggggtgggcggaggtcgctgcctggggatcggacactggagccttgcggcggctgcaactcatgctcaggacccagcccagcttgttgtgtagcacctgcttgaggcccggcggcagcggcagaccctccagcgtgtctcccgagtctggccgcagctggcgcaggcggtggcagcacaggtactggagggaagtggcgctggcacaggagcgggtgaccttcatgctgctccgggccgccgtggagcacaccatcgggtagaatctcttgttctgcagcttggtggctgccacacctggaagggaggggcccagcctatacacttcctgttcttgaaaaaggtgagtgtgccgtgccaggtgtccaggtgcacgccaatgatggagccctggccgaaccgcgacgagaagctggtcttgtcgcccttgtggtggaggaggcccgtgtaggagaggccccagctgtcctcatccctgcccagcaggctgcagaacgtgtggcggtatttgtccaggtccacatccgacgtcccgatgcccaccatcatgtcggtgccgtagacgggagaggtcatcttgatctcccagaagtgctggccctcccccagctccttggtgccccggatggccgctgtgccgcagctgtactccatgtggaagctgaccttacggttgtcacagctcagcagggtggctgatgacttatttaagtcatcccagacccagtcgaaatactcgtcttcctctccgcagcggcagtccctgccccggtgggccgagtgcaggctgctacagaaggaggcctcgctctgcccagcacagtcacagaaggactcgccggtcacgggcaccgcactggggatggatggcggcagcgtggagtactcggggtcggagtccgagtcgctgtgctcctgcccacaacagactgcaggcccatttggtgacacaggacaagcagcacatgtgtcgaacactgccgagcccgcaggcacgcctgcatcccacagccacgagcctgtgaggctcaggcatgtgacctgcaggagctgcccatcagagtcgtagccccagttagtggagcctgctagagccacggcccgggcatctgcgtctcggcgggctgcactcaggacgaagtgccaggccctgctgttccgggggcgtctggccatggtggaaagaatcggtgcccagccagggctccagaacgcttcaggagcccgtacctcaccccaggatctgagcagctcaataaaacccaggtagatcattggacccgggtgggaggtggtaccgcaggccgcgttgaccggaaagtaggtccgtgtcatcgtctgcgccggaacctgcgggaccggatcgagagctcctccggcaagctgattggctgggacagcaggattaggcctgtcaagaagagccacgggcgggcacgcactgcccattggttggaaggcccttcgctctagctgggaggctgacggcccgcgggcgtaagcggactgcagccgcgagctccagtggggacgatccgttcgccagatcagcgccgtgggccctcctgagtagtgggagccgcatttatcttctaagagacctcgagtccgataccaaaaggaaaacattcctcggacagcaaggtcttgcagcacaactgagaggttgttgccgtccagccacagggcttgggtgccgcccgggactccgtcaggcaggcgcgtgaggttcctggagctgcagaagacgctgagctcatccgcgtcgtcatcgtagctgcagacacaggcggccgggcacgctgggccctcggcttcccccggcgttccggggtctgctccctccaggctgcgggggcccagtgccacccaggacagcagcagcagcgccagggccaggcctcctttcctcagggccat

SEQ ID NO: 1201 - DNA, 2041 bp, Homo sapiens
  SIMILAR (1056)..(736): 611254mologous to Homo sapiens A suppressor of cytokine signalling protein designated HSCOP-4,accession number AAY53884,Smith-Waterman Score=282.
ccaccccccccctgaagtgtgcttgaaagtaagggccagagaaacaagggacagaggaaagggcctgtcccagcccaagaaggcagttccactgggaagtcagtcaggtccggcggcagcgcttccctctggcagggccaaggctcgcgaactgctggggtgggcggaggtcgctgccctggggatcggacactggagccttgcggcggctgcaactcatgctcaggacccagcccagcttgttgtgtagcacctgcttgaggcccggcggcagcggcagaccctccagcgtgtctcccgagtctgggccgcagctggcgcaggcggtggcagcacaggtactggagggaagtggcgctggcacaggagcgggtgaccttcatgctgctccgggccgccgtggagcacaccatcgggtagaatctcttgttctgcagcttggtggctgccacacctatacacttcctgttcttgaaaaaggtgagtgtgccgtgccaggtgtccaggtgcacgccaatgatggagccctggccgaaccgcgacgagaagctggtcttgtcgcccttgtggtggaggaggcccgtgtaggagaggccccagctgtcctcatccctgcccagcaggctgcagaacgtgtggcggtatttgtccaggtccacatccgacgtcccgatgcccaccatcatgtcggtgccgtagacgggagaggtcatcttgatctcccagaagtgctggccctcccccaagctccttggtgcccccggaatggccgctgtgccgcaagctgtaactccatgtggaaaactgacctttacgtttgtcaacaactcagcaggttggctgattgactttatttaagtcatcccaagacccaatcgaaaatactcgtcttccctctccgcaagccgcaatcccctgccccggtgggccgaagtgcaggctgctacagaaggaggcctcgctctgcccagcacagtcacagaaggactcgccggtcacgggcaccgcactggggatggatggcggcagcgtggagtactcggggtcggagtccgatgtcgctgtgctcctgcccacaacagactgcaggcccatttggtgacacaggacaagcagcacatgtgtcgaacactgccgagcccgcaggcacgcctgcatcccacagccacgagcctgtgaggctcaggcatgtgacctgcaggagctgcccatcagagtcgtagccccagttagtggagcctgctagagccacggcccgggcatctgcgtctcggcgggctgcactcaggacgaagtgccaggccctgctgttccgggggcgtctggccatggtggaaagaatcggtgcccagccagggctccagaacgcttcaggagcccgtacctcaccccaggatctgagcagctcaataaaacccaggtagatcattggacccgggtgggaggtggtaccgcaggccgcgttgaccggaaagtaggtccgtgtcatcgtctgcgccggaacctgcgggaccggatcgagagctcctccggcaagctgattggctgggacagcaggattaggcctgtcaagaagagccacgggcgggcacgcactgcccattggttggaaggcccttcgctctagctgggaggctgacggcccgcgggcgtaagcggactgcagccgcgagctccagtggggacgatccgttcgccagatcagcgccgtgggccctcctgagtagtgggagccgcatttatcttctaagagacctcgagtccgataccaaaaggaaaacattcctcggacagcaaggtcttgcagcacaactcgggactcattgtccatggagagcgcactcgccttcctcggggagatggtgcttcgcctccttcctgcacttccagccccactgccccacccggcatgctcatgctgactgtgctttgctgacaatctgcttaggagctgcctcagtttgctgagaagtgaaatgttcttgggggaaccctcagggttgttgtcccggttcctgacactaaggcctgcatttaccat

SEQ ID NO: 1202 - DNA, 488 bp, Homo sapiens
  SIMILAR (368)..(487): 601254mologous to Arabidopsis thaliana putative protein,accession number AL161576,Smith-Waterman Score=127.
  misc_feature (1)...(488): n = a,t,c or g
cgggtaggcctgccgggnccncccaccctggggncctgnnnggcccgcagnaccacaggnatgaanaccggncgcactacgcgttcgggggttcggctcggctacttgcataatccgtttagctaaaatgtaatttcagattggacaagtactgtggaggaactgcaatgtctggtggagaacaaaaaccagagaggtactatgtgggtgtggacgttggaacaggcagtgtccgtgcagctctggtggaccagagtggggtcctgttggcttttgcagaccagccaattaagaattgggagccccagttcaaccaccatgagcagtcctccgaggacatctgggctgcgtgctgtgttgtcacaaaggggattcccatcgaaacgtcatcatgtggctggaccatcgagcagtcagtcaagttaacaggatcaatgagaccaagcacagtgtcctccagtacgtcgggggggtgatgtctgtggaan

SEQ ID NO: 1203 - DNA, 401 bp, Homo sapiens
  SIMILAR (134)..(310): 931254mologous to Mus musculus putative,accession number AK009249,Smith-Waterman Score=307.
agcttcactcattgatgcccatgcaggaggactaggagtgattggggcagatgtgagagggcacggcctcatctgtgaggggcagccagtgacgtcacggctggctgtcatctgtggaacgtcttcttgtcacatggggatcagcaaagacccgatttttgtaccaggcgtctgggggccttatttctcagccatggtacctgggttctggctgaatgaaggtggtcagagcgttactggaaaattgatagaccacatggtacaaggccatgctgcttttccagaactacaagtaaaggccacagccaggtcaccggattgaaactgtctcaggaccttgatgatcttgccattctctacctggccacagttcaagccattgctgtaagatactgtgatgc

SEQ ID NO: 1204 - DNA, 869 bp, Homo sapiens
  SIMILAR (479)..(288): 571254mologous to Homo sapiens Human RECAP polypeptide, SEQ ID NO: 11,accession number AAB68881,Smith-Waterman Score=156.
aatgtgatctgctcttcctcagaccactaatatagaatccaaacaggtgaaaaatacgtcactccttagaatacaacaatgatctgataaggatttgacttaagtggaagggaaaaaaaaaaaaaaaagggaattgcagagcatagcccctattagaacaagctaactttccagatttttccaatttaaaaagccaaaacaaaaacaaaaaaccacttcaaacatgaagctaccatacaaagttttcccatttttctttgtaaaaaagttccagagtttgcaatttaatcctgggtttttaatgagaaggacagttttggcctggacttccccttgcccaggataattttttgttcttctttttgttgaccgttgtcggttcttgttctagtttcatcctttcctcatgaatctttctttgttctttcaacaattctcaactgttcttcgggccagtttggcttgtgcttctgcaatttttcgggttattctcttccagtattcgctctagctcctcacggttttgcacggttcttcctcctaaaggggaggatatgttaagatattaggaaaaacaaaatgtttatttttattgataaatatttactaatcttcctctggaacttttttggatatggacttacagggggaggctttataggctaccttctggtctgacaaaatggataaactgtgcaggtcacctaaaaattgggtttctaggcacctaaattttaaatcatccctcccagtccaaacagcaaccaactaaaccctccctaatgatagtttcctggcaattattactaatactttaatatcacacaaatcaacaaggacaactacaaaactgaataaaatttaccaaa

SEQ ID NO: 1205 - DNA, 566 bp, Homo sapiens
ctcattctcatctgcaaaaatcttcttccttagatcttattaggaggaataagatattactgggaaaaggcttaacaactacagttaacaccagttgccattccctaaatgtacaccagaccttccaacactgcccagttggggaggtaccactaacatacagaggagatgcttcaagaggtgaagagacaggtctgagtccagctttaaacccttctccttgtgattctgaagccatggactttctgtatcttagatcaacaaagacccaatttttgtaccaggcgtctgggggccttatttctcagcccatggtacctgggttctggctgaatgaaggtggtcagagcgttactggaaaattggatatcctttccaccaatacacctcatcccataacaatcctggggaacaccaactccattttgaagactcagttgcagcatcagaagcctttcctgatcacatctccccacatccccaaaacaccccagaccagcagaaccgaccaagcctccttcctttgtagcccatcttctgactctctacagattctgtcactgtaa

SEQ ID NO: 1206 - DNA, 519 bp, Homo sapiens
  SIMILAR (1)..(225): 891254mologous to Mus musculus putative,accession number AK009249,Smith-Waterman Score=331.
gttgcagatctgacactaaagggcatggtcaccggattgaaactgtttcaggaccttgaatatcttgccattctctacctggccacagttcaagccattgctttggggactcgcttcattatagaagccatggaggcagcagggcactcaatcagtactcttttcctatgtggaggcctcagcaagaatcccctttttgtgcaaatgcatgcggacattactggaagcaatggcaaaaatgagcaaagttgggaaagttgtgttcccgagactacaggataaaaaatactatgataagaaataccaagtattcctgaagctggttgaacaccagaaggagtatttggcgatcatgaatgatgactgaacagggcttgcaggtgctgatgccagaagcttctgtgccattgcattaaagacttgtcatttgatccatgttcaagacccttgaggtattgtttcatcatttctgtattgtctttcaataaagaaaacaaacatgtgcaaaaaaaaaaaaaa

SEQ ID NO: 1207 - DNA, 1950 bp, Homo sapiens
  SIMILAR (1498)..(1626): 461254mologous to Arabidopsis thaliana putative protein,accession number AL161576,Smith-Waterman Score=98.
ttccgggacgacccacgcgtccgggcgcggctacgtgcagaatccgtctatctaaaatttaatttcagattggacaagtactgtggaggaactgcattgtctggtggagaacagaaaccagagaggtactatgtgggtgtggacgttggaacaggcagtgtccgtgcagctctggtggacccagagtggggtcctgttggcttttgcagaccagccaattaagaattgggagccccagttcaaccaccatgagcagtcctccgaggacatctgggctgcgtgctgtgttgtcacaaagaaagttgtacaagggattgatttaaaccaaattcgaggacttgggtttgatgccacgtgttctctggttgttttggataagcagtttcacccattaccagtcaaccaggaaggggattcccatcgaaacgtcatcatgtggctggaccatcgagcagtcagtcaagttaacaggatcaatgagaccaagcacagtgtcctccagtacgtcgggggggtgatgtctgtggaaatgcaggccccgaaacttctgtggctgaaagagaacttgagagagatttgctgggataaggcgggacatttctttgatctcccagacttcttatcgtggaaggcaacaggtgtcacagcacggtctctctgctccctggtgtgtaagtggacatattcagcagagaaaggctgggacgacagtttctggaaaatgattggtttggaagactttgttgcagataattacagcaaaataggaaaccaagtgctacctcctggagcttctcttggaaatgggctcacaccagaggcagcaagagaccttggccttctccctgggattgcggtcgcagcttcactcattgatgcccatgcaggaggactaggagtgattggggcacatgtgagagggcacggccttcatctgtgaggggcagccagtgacgtcacggctggctgtcatctgtggaacgtcttcttgtcacatggggatcagcaaagacccgatttttgtaccaggcgtctgggggccttatttctcagccatggtacctgggttctggctgaatgaaggtggtcagagcgttactggaaaattgatagaccacatggtacaaggccatgctgcttttccagaactacaagtaaaggccacagccaggatgccagagtatatattgcatatttgaacagtcacctgggatcttgattaaggaagggttcagcctgtggggttttcctttactgtttgattttacatgtttgggccagatttccatggcaaccggtctcccttagcagatctgacactaaagggcatggtcaccggattgaaactgtctcaggaccttgatgatcttgccattctctacctggccacagttcaagccattgctttggggactcgcttcattatagaagccatggaggcagcagggccactcaatcaagtactcttttcctatgtggaggcctcagccaagaatccccctttttgtgcaaatgcatgcggacattactggcatgcctgtggtccctgtcgcaagaggtgggagtccgttcttgtgtggtgctgctgttctgggtgcctgtgcctcaggggatttcgcttctgtaacaggaagcaatggcaaaaatgagcaaagttgggaaagttgtgttcccgagactaccagaataaaaaatactatgatagagaaatacccaagtattccctgaagctggttgaaccccagaaggagtatttggcgatcatgaatgatgactgaacagggcttgcaggtgctgatgccagaagcttctgtgccattgcattaaagacttctgtcatttgatcccatgttcaagacccttgaggtattgtttcatcatttctgtattgtctttcaataaagaaaacaaacatgtgcaaccagaaaaaaaaaaaaaaaaaaaaaaaaa

SEQ ID NO: 1208 - DNA, 581 bp, Homo sapiens
  SIMILAR (4)..(267): 921254mologous to Homo sapiens HIT-17kDa,accession number AF356515,Smith-Waterman Score=396.
gcagcaacctcctggggagcagcccaaaccatctcctccccgatcctggacaagagcctcccagctgacatctctatcgaggaccagcagtgtcttgtgttccgtgatgtggcccctcaggctcctgtgcacttcctggtcattcctaagaagcccattcctcggattagccaggctgaagaagaagaccagcagcttctaggacacctactccttgtggccaagcagacagcaaaggctgagggcctgggagatggataccgacttggtgagtgacttttggcccttggtccctcacctatgaattctcattcctacttctcaatatgatcttcattcttcgacctctgccatgatcctgactccctaaccccaagctcaatttcagtgatcaacgatgggaagctgggtgcacaatctgtgtatcatctgcacattcatgtacttgggggccggcagctccagtggcctccaggttgaacctgccaactgattaaaggacaccagactctggatgcttggatggaaagggaaaaatggaccctgtgatgctaataaaactgttctcccttaaaaaaaaa

SEQ ID NO: 1209 - DNA, 719 bp, Homo sapiens
  SIMILAR (637)..(332): 541254mologous to Homo sapiens HIT-17kDa,accession number AF356515,Smith-Waterman Score=193.
ttttttttttttttttaagggagaacagttttattagcatcacagggtccatttttccctttccatccaagcatccagagtctggtgtcctttaatcagttggcaggttcaacctggaggccactggagctgccggcccccaagtacatgaatgtgcagatgatacacagattcgtgcacccagcttcccatcgttgatcacaagtcggtatccatctcccaggcccctcagcctttgctgtctgcttagccacataggagtaaggtgtcctagaagctatagagagagcggagggacataggtggctgctggtcttcttcttcagcctggggtaatccgagggaatggggctttttagggaatgaccagggaaggtgcacagggagcctgagggggcccacatcacgggaacacaagacacttgctggtcctcataagagaattgtcagctggggaggctcttgtccaaggatccggggagaagatggttggggctgctcccccaggagttggcttgctggggccttggccactttcattcccatcagtcacacctgcagctcctcggacctgccccccgcgcactccccgtgtgacgccacgtgcatctgcgccgcgcgcaacccagcagccagcaccacggctgccgccatcttccctgagccgcgggaacctctcaccccgggtcacagctcggctccgcgaccgaccgtgggtg

SEQ ID NO: 1210 - DNA, 2077 bp, Homo sapiens
  SIMILAR (1955)..(2077): 1001254mologous to Homo sapiens Human secreted protein sequence encoded by gene 21 SEQ ID NO:80,accession number AAB51640,Smith-Waterman Score=209.
  misc_feature (1)...(2077): n = a,t,c or g
ctcttaatataactgtttattttcactgtgtaatgtgcaaagcaaaagggaaattatttggtggatggtagctcaaaattggaactcttgttctaattcagttacattggctttaccctccttagatttttcatcaaagggctgtcccattgcaatcttactaaaacattttgttaaaataaactcttttcctttttatattaataattaggcttttaaataaagatgttattcctttaaaatggtgggcttaccatcattgaagatgtcactcaggtggccttgtttgatcaaaactctcttttttataaaccaagctttaaaaacatgtttataggtttcatgaagcacatatatattgttcccatagtcttcagctttaaaactataaatatgcccaaattttgttatttgccctactttaagtaggtttattgtgtttgttttttcagtacttgcttttctctgataagactcaggaattctgaaatgtgaaattgtctcaattctttctcttgtagcatgaatcaaatgtatttattaatagcacttatgactatagaatataatttggcatatgattcatattacatatgtattcattttatttttaaaatagtttataaacttactgatttttttttacaaatgaggttatagatattaatgcaaattttctggtagggatctctttttttgctatgatgattccaacttatcagagacctcccatttgccttttcattacggtgaaagctttgccctcatctactaaagtacaaaggaattctttggaagcagattattctagtcttatgctagagatgaattttgatcattttaatgtgtgatctttttgctctatcaggtataattgttttcctttcctttataatgcgtaagttttctcacctttgagtaacagtaaagttcatttatatgtccatacctagaagaccagtgcaaatactttgagagcacctgggtctacaggacataattggcatctaaatcctcatttcttgctattagtaggaaaacagatatagtattgtaatacccttattctttttgaatcctaattactcatttcggttttttttctctcttttgaatctagttgctggttttcgtttaatgattttagtttaacaatcccaaccaacaatacatttgatttatttttttctgtctaacctgacaacctttttcttgtgcttcttggttggtgggtagtttttgtgaaaggaatcattgtttaagatcactgttttcatacttgttttacacttcacgtattttgaagtacatttatttactaagcatttgtgacttgaataatttcaccaaatgaatacattttggtagtttgtaatgagttcttctaattgttacactttgcttggtacttaacaataaatatgtaaaggtaaaagaaataattttctgtattctgccaatcttaattttatataataaatcatccatttttttcttaaaatagtatggattgactgtttctaaaataccaatctgtggctgtggtttttcttttcttcagcatttccagcatccaagtaaacaatagtcccttatagtcctgctacttgatgggtaaatttggttgctgggttttttaagttgcactcacaataaatcgtgcaaagcatttgtcatgccttatttactccatttttaatcctgcatcccagatttatggcagcaacacatatctacaggatacttttatgttgtccaaatattgctgtcagtcatatgtacttataaaatgtctccagtcatgtatatttatagaaatgaaatgtcaaatttctcagactgttaaagtgcagtataaagttgcttaatgcacacttaaaaatgatatataatttctgaatcctatgnaaaatgngttcttttttaattctttgggagttttcttaagttttacatgttttttggtttattgttaatgattttgtttactctttgccaaattttgtcatgtaggttattttacaatagcacctttaaaaaaaatgtatatgctaatttactaagcatattcatgtcc

SEQ ID NO: 1211 - DNA, 888 bp, Homo sapiens
  SIMILAR (119)..(226): 1001254mologous to Homo sapiens BCL2/adenovirus E1B 19kD- interacting protein 3,accession number U15174,Smith-Waterman Score= 199.
ccatgtgcctctgggctcttgaattgagcctgcggatctgaagctcgggtgggagctgggtgctttcccgtgtcacgtgtggtacactgatctgcctttaacattgactttatcttagtctgaggaagatgatattgaaagaaggaaagaagttgaaagcatcttgaagaaaaactcagattggatatgggattggtcaagtcggccggaaaatattccccccaagtgagtgtgttctcagtgtcacgggggcaccccttgacagaggacacatcagctgacacgtttcttcccgcctcagggagttcctctttaaacacccgaagcgcacggccaccctcagcatgaggaacacgagcgtcatgaagaaagggggcatattctctgcagaatttctgaaagttttccttccatctctgctgctctctcatttgctggccatcggattggggtaggtgatgtgactgtgtgactcctgtcatggcatgtcgtggggcgattctgggttgcagtgatttattcgtaacctgtttcctgaagtccagatcatcagttacagcttggtgcattttcacaaacacccacgtagtctctgttcaggttcagaaacccaccagccttcaagcccccaaaggccccagcacaggcgccctgtggtgctgctgtctggcctgacgagtctgcctgttgctcactgaatataaacggagtcaaagcagggcttcttaggtctgacctctttgtcctgtgtgtaggtgaaagcagtctcatttctgtgtagtactgtggcgggaatgcacccagctctgctgtaggtggagggtctcagttacctgctgtacttcctccagacaggactgttgttctagtaactctcagcaatgaagg

SEQ ID NO: 1212 - DNA, 1197 bp, Homo sapiens
  SIMILAR (127)..(729): 661254mologous to Homo sapiens E1B 19K/Bcl-2-binding protein Nip3,accession number AF002697,Smith-Waterman Score=582.
cctccgctcagtccgggagcgcacgtgggccgcggcgctccgacctccgctttcccaccgcccgcagctgaagcacatcccgcagcccggcgcggactccgatcgccgcagttgccctctggcgccatgtcgcagaacggagcgcccgggatgcaggaggagagcctgcagggctcctgggtagaactgcacttcagcaataatgggaacgggggcagcgttccagcctcggtttctatttataatggagacatggaaaaaatactgctggacgcacagcatgagtctggacggagtagctccaagagctctcactgtgacagcccacctcgctcgcagacaccacaagataccaacagggcttctgaaacagatacccatagcattggagagaaaaacagctcacagtctgaggaaggatgatattgaaagaaggaaagaagttgaaagcatcttgaagaaaaactcagattggatatgggattggtcaagttcggccggaaaaatattccccccaaaggagttcctctttaaacaccccgaagccgcacggcccacccttcaggcatgaggaacaccgagccgtcatgaagaaagggggcatattctctgcagaaatttcctgaaagttttccttccatctctggctgctctctcattttgctgggccatcgggattgggggatctatattgggaagggcgtcttgacaacctccaccagcaccttttggatgaaggaactgggagtcttgactttggttcgttagttggatttacttcttgagcttgccaacatagcttcactggaaggagctgttagatcctggggtggccacgtcacttgtgtttatttgttctgtaaatgctgcgttcctaatttagtaaaataaaagaatagacactaaaatcatggttgatctataattacacctatgggattcaataagcatgtcagactggattaatgtctactgtgaaaatttgggtagtaaatttttcatttgaaattagaaataaaatatctgaatataaataattttaatatactagtccatgatgtgtgttgtattttaaaaattatctgcacccttaattcagctgaagtactttatatttcaaaagaatgaataacattgataataaaatcgctactttaaggggtttgtccaaaataaatattgtggccttatatatca

SEQ ID NO: 1213 - DNA, 387 bp, Homo sapiens
  SIMILAR (88)..(381): 981254mologous to Homo sapiens aryl sulfotransferase,accession number X78282,Smith-Waterman Score=510.
cacagacaacacccctgcattccccacacaacacccacactcagccactgcaggcgaggagggcacaaggccaggttcccaagagctcagaaccccaaaagggagattcaaaagatcctggagtttgtggggcgctccctgccagaggagactgtggacctcatggttgagcacacgtcgttcaaggagatgaagaagaaccctatgaccaactacaccaccgtccgccgggagttcatggaccacagcatctcccccttcatgaggaaaggcatggctggggactggaagaccaccttcaccgtggcgcagaatgagcgcttcgatgcggactatgcggagaagatggcaggctgcagcctcagcttccgctctgagctgtgagag

SEQ ID NO: 1214 - DNA, 464 bp, Homo sapiens
  SIMILAR (41)..(310): 1001254mologous to Homo sapiens aryl sulfotransferase,accession number X78283,Smith-Waterman Score=475.
  misc_feature (1)...(464): n = a,t,c or g
gaccggccgaattcccggtcaccacgcgtccggagattcaaagatcctggagtttgtggggcgctccctgccagaggagaccgtggacttcatggttcagcacacgtcgttcaaggagatgaagaagaaccctatgaccaactacaccaccgtcccccaggagttcatggaccacagcatctcccccttcatgaggaaaggcatggctggggactggaagaccaccttcaccgtggcgcagaatgagcgcttcgatgcggactatgcggagaagatggcaggctgcagcctcagcttccgctctgagctgtgagaggggctcctggagtcactgcagagggagtgtgcgaatcaaacctgaccaagcggctcaagaataaaaaatgaattgagggccccggacnnnnnnnnnnnnnnnnnnnnnnnnnnnnnnnnnnnnnnnnnnnnnnnnnnnnnatttaacg

SEQ ID NO: 1215 - DNA, 425 bp, Homo sapiens
  SIMILAR (302)..(424): 631254mologous to Macaca fascicularis hypothetical protein,accession number AB047600,Smith-Waterman Score=142.
tttctaccactataatacagaggcatattactctgaacatcgacctcatacatcactcaataagttagccacaaagagcctctccacttagattttcatcaagcatcttacattttaatgtccttacttttttacagaagaggccataatttccacctaatgagtctatatgtgatgcagcaataattgatcacatgctttcacatgtgaataggaacaatgaaacagcatgaagtaatttgatacttgaattatatcataatttgcttttcaaaaattttatatatatacatatttttaaaagcatactttgggctgggtgcagtggctcatggctgcaatcccagcactctgggaggccaaggtgggcagatcacttgagatgaagagtttgagaccaccctggacaaaatggtgaaatccca

SEQ ID NO: 1216 - DNA, 579 bp, Homo sapiens
  SIMILAR (154)..(528): 1001254mologous to Homo sapiens aryl sulfotransferase,accession number U28169,Smith-Waterman Score=650.
atgcgccgcgccgcacgggcgatggccttcgggcctccccggccccagggcaccgcgcaggtccctttgctggcaccaagcccgagcctgagccggacccggggcccaagaggcctgtgcgccctgcgagcccttgagctccaggggaggaacatggagctgatccaggacatctctcgcccgccactggagtacgtgaagggggtcccgctcatcaagtactttgcagaggcactggggcccctgcagagcttccaggcccggcctgatgacctgctcatcagcacctaccccaagtccggcaccacctgggtgagccagattctggacatgatctaccagggcggtgacctggaaaagtgtcaccgagctcccatcttcatgcgggtgcccttccttgagttcaaagtcccagggattccctcagggatggagactctgaaaaacacaccagccccacgactcctgaagacacacctgcccctggctctgctcccccagactctgttggatcagaaggtcaaggtgagactgggcacagtggttcacacccgcaatctcagtactttgggaggctga

SEQ ID NO: 1217 - DNA, 589 bp, Homo sapiens
  SIMILAR (178)..(282): 941254mologous to Homo sapiens aryl sulfotransferase,accession number L19956,Smith-Waterman Score=189.
ggtctcctactaccatttccaccgtatggaaaaggcgcaccctgagcctgggacctgggacagcttcctggaaaagttcatggctggagaaggtgggcttgactggaggaaggagggtgtgaagccgaggggtggtggctataacgtacagcaaccctgtgtcggtgccccctgcccgcttctctagtgtcctacgggtcctggtaccagcacgtgcaggagtggtgggagctgagccgcacccaccctgttctctacctcttctatgaagacatgaaggaggtgagaccgactgtgatgcttccccccatgtgacacctgggggcaggcaccttacagggacccaccaaggccacccagccccgtccctgggcggctcccacagcaagcccggattccccatcctacctccctggcccaggcccccccactgcagccccacctggcagcaggctcggcacagctttcatcttctgcacctgagtcagctgcatgggtggccacggatcaaatacttagtcctattgcttatcctcaccaaagggtgtgccacccagggccacagtcatggaagaagaccatcccggtc

SEQ ID NO: 1218 - DNA, 2165 bp, Homo sapiens
  SIMILAR (998)..(1846): 391254mologous to Homo sapiens aryl sulfotransferase,accession number X78283,Smith-Waterman Score=302.
ttttgagacagagtctcattttgttgcccaggctgaagtgcggtggcacgatctcagctcactgcaacctctgcccactgggttcaggcgattctcttgcctcagcctctggagtagctaggactacaggccctcatcatcctgcctggttaatgtttaagaatttttttaaagatttttagagatggggtcttgcaatgctgcaccaggttggtctccaactcctggcctcagcctccctagggtctgggattataggtgggagccaccctgcctaggcctctgcttttgctgagtcatcagagttttgttcattcccacagcagctctggcccctagtagcagctcagttcctcaatgggccgtgtttgtcctggagcccagatggactgtggccaggcaagggggatcacaggccttggctggcctgggcggtttccacatgtgaggggctgaggggctcaaggaggggagcatctccactgggtggaggctgggggtcccagcaggaagtggtgagacaaagggcgctggctggcagggagacagcacaggaaggtcctagagcttcctcagtgcagctggactctcctggagaccttcacacaccctgatatctgggccttgcccgacgagggtgctttcactggtctgcaccatggcccaggccctgggattttgaacagctccgcaggtgaatgaaaggtgaggccaggctggggaaccaccgcattagagcccgacctggttttcagccccagccccgccactgactggctttgtgagtgcgggcaagtcactcagcctccctaggcctcagtgacttccctgaaagcaagaattccactttcttgctgttgtgatggtggtaagggaacgggcctggctctggccccttgacgcaggaacatggagctgatccaggacacctcccagcccagccactggagtacgtgcaagggggtcccgctcatcaagtactttgcagaggcactggggcccctgcagagcttccaagcccgacctgatgacctgctcatcaacacctaccccaagtctggcaccacctgggtgagccagatacttggacatgatctaccagggcggcgacctagagaagtgtaacccgggctcccatctacgtacgggtgcccttccttgagttcaaagccccagagaatcccgttaaggatggagactcttgaaagacacacccgcccccacggctcatcaagtcacacctgcccctggcttctgctccctcagactctgttggatcagaaggtcaaggtggtctatgttgccgcgcaacgcaaaaggagtgtggcagtttcctactaccacttctaccacaatggccaaggttgcaccctgagcctggggacctggggacagcttcctgggagaaagttcattggttctgtagaaagttgtcctagcggattcctggtaccagcacgtgcaggagtggtgggagctgaaccgcacccaccctgttcttttacctcttctattgaagacatgaaggagaaccccgaaaagggaagatttcaaaaagatccctggagtttgggggggcgctccctccaagagaagaccggtgattttcagggttcagccacacgtcgttcaaggagatgaagaagaacccctatgaccaacttacacccaaccgttcccccaggaagttccatggaccacaggcatctccccccttccatgaggaaaaggcatggctggggactggaagacccaccttcacccgtggcgcagaatgagcgccttcgatgcggactatgcggagaagatggtcaggctgcagccctcagcttcccgctctgagctgtgagagggggctccctggggtcactgcagagggagtgtgcgaatcaaacctgaccaagcggctcaagaataaaatatgaattgagggcccgggacggtaggtcatgtctgtaatcccagcaatttggaggctgaggtgggaggatcatttgagcccagggagttcgagaccaacctggggcaacatagtgagattctgttaaaaaaataaaataaaattaaaaccaatttttaaaaagagaataaaatatgattgtgggccaggcagagtggctcatgcctgtaatcccagcaatttgagaagttgaggctagaggatc

SEQ ID NO: 1219 - DNA, 372 bp, Homo sapiens
  SIMILAR (6)..(227): 851254mologous to Homo sapiens 3-methylcrotonyl-CoA carboxylase biotin-containing subunit,accession number AB029826,Smith-Waterman Score=312.
ggcacgaggaaggaagtattgagattgacattccagtccccaaatacttatcttctgtgagctcacaagaaactcagggcggccccttagctcctatgactggaaccattgaaaaggtgtttgtcaaagctggagacaaagtgaaagcgggagattccctcatggttatgatcgccatgaagatggagaacaagttgaaatcatcgcagaaggataaagttcgtcagtttatgatcttcacacaatctagtgaaaaaacagcagtaaggttgtctttctcaaaatgactggaagttagatgttgcaacagataattttttccaaaatccttgacttttatatacgagaagagtgtaaaagggatcattgacg

SEQ ID NO: 1220 - DNA, 576 bp, Homo sapiens
  SIMILAR (2)..(280): 731254mologous to Homo sapiens 3-methylcrotonyl-CoA carboxylase biotin-containing subunit,accession number AB029826,Smith-Waterman Score=319.
cactatttacctattttccaaggaaggaagtattgagattgacattccagtccccaaatacttatcttctgtgagctcacaagaaactcagggcggcccccttagctcctatgactggaacccattgaaaaggtgtttgtcaaagctggagacaaagtgaaagcgggaaattccctcatgggttatgttccccatgaagatggagcataccataaagtctccaaaggatggcacagtaaagaaagtgttctacagagaaggtgctcaggccaacagacaccactcctttagtcgagtttgaggaggaagaatcagacaaaagggaattcggaataaactccagcaaggaaatggccagttaagtagtgttttctctctcccccaaaaaaaggaagtgcctccagcttttttgggggtctcataaagagcagttttactaaatgattgtatgcttatgctgaacccctttcatattggagatctcatgcatttgggtcccctaattatctcacaaatatttcatactaataaagttgaattattttttattggaagccaaaaaaaaaaaaaaaaaaa

SEQ ID NO: 1221 - DNA, 420 bp, Homo sapiens
  SIMILAR (114)..(365): 931254mologous to Homo sapiens similar to ribosomal protein L23a; similar to P29316 (PID:g132848),accession number AC004908,Smith-Waterman Score=402.
tttcgtccgagatggaccctgggctcggcgtcctccggaaaactgcactgtgaggcggggcgatggggaagggccgaagccccgccagcccagctaaagcagacggctcgcactgcgacccgaagacggcaccgaaagcgaaggaagctcctgctcctcctaaagccgaagccaaagcgaaggccttaaaggccaagaaggcagtgttgaaaggtgtccgcagccacacgcaaaaaagaagatccgcatgtcactcaccttcaggcggcccaagacactgcgactccggaggcagcccagatatcctcggaagagcacccccaggagaaacaagcgtcgccactatgctatcatcaaagttccgctgaccactgagtcggccgtgaagaagatagagaaaacaacacgcttgtgttcact

SEQ ID NO: 1222 - DNA, 370 bp, Homo sapiens
  SIMILAR (198)..(362): 901254mologous to Homo sapiens Human RNA-associated protein- 22 (RNAAP-22),accession number AAY70241,Smith-Waterman Score=249.
cggacttctggagaccttaactgagtcaagtgtatggtcttaaagttatttaagcaatatcatcagaagcctataaccagagtacctgtcatagtcttttctgtgagtctcagagggagtcctgtcttggagacgaacattctgacctgtagttgattgcaggagctttcaggaaagcatcagggggaaataatatcttcaggcggcccaagacactgtgactccggaggcagcccagatagcctcagaagagcacccccaggagaaacaagcttggccactatgctatcatcaagtttccgctgaccactgagtcggccgtgaagaagatagaagaaaccaacacgcttgtgttcactgtgctcgtgcc

SEQ ID NO: 1223 - DNA, 1773 bp, Homo sapiens
  SIMILAR (1)..(1020): 991254mologous to Escherichia coli K12 putative ATP-binding component of a transport system, fragment 1,accession number AE000424,Smith-Waterman Score=1715.
atgagcgtgctggtcgccaccgcctatatggaagaggccgaacgcttcgactggctggtagcgatgaatgccggagaagtgctggcaactggcagcgccgaagagctacggcagcaaacgcaaagcgctacgctggaagaagcatttataaatctgttaccgcaagcgcaacgccaggcgcatcaggcggtagtgatcccaccgtatcaacctgaaaacgcagagattgccatcgaagcgcgcgatctgaccatgcgttttggttccttcgttgccgttgatcacgttaatttccgcattccacgcggggagatttttggttttcttggttcgaacggctgcggtaaatccaccaccatgaaaatgctcaccggactgctgcccgccagcgaaggtgaggcgtggctgttcgggcaaccggttgatccaaaagatatcgatacccgccgtcgggtgggctatatgtcgcaggcgttttcgctctataacgaactcaccgtgcggcaaaaccttgagttacatgcccgtttgtttcacatcccggaagcggaaattcccgcaagagtggctgaaatgagcgagcgttttaagctcaacgacgttgaagatattctgccggagtcattgccgctcggcattcgccagcggctttcgctggcggtggcggtgattcatcgcccggagatgttaatcctcgatgagcctacttctggtgtcgatccggtggcgagggatatgttctggcagttgatggtcgatctctcgcgccaggacaaagtgactatcttgatctccacccactttatgaacgaagcggaacgttgcgaccgcatctcactgatgcacgccggaaaagtgcttgccagcggtacaccgcaggaactggttgagaaacgcggagccgccagtctggaagaggcatttatcgcctatttgcaggaagcggcagggcagagcaacgaagccgaagcgccgcccgtggtacacgacaccacccacgcgccgcgtcagggatgtagcactgcgcccatacagccgccacgaaggcagccacacgcaaaaaagaagatccgcatgtcactcaccttcaggcggcccaagacactgcgactccggaggcagcccagatatcctcggaagagcacccccaggagaaacaagcttggccactatgctatcatcaagtttccgctgaccactgagtcggccgtgaagaagatagaagaaaacaacacgcttgtgttcactgtggatgttaaagccaacaagcaccagatcagacaggctgtgaagaagctctatgacagtgatgtggccaagcatacagaagaacgaagacacgacgaacagaacaacatactaacacgagaagccaagaacagaaacgacaacacacgaaacagagcacgcacagaaacaaacacagagacgcagaagaattcagggtaccaagccctgataagttttcacagttactattcagacactagtgataataaagcccacctagtgagctatcaatcaggtcaatgcacctacgaccgcttagggtggaatttgctcattcgcatgacatgccgatcgctccaacatacatacgacatacagagtactcagattgcgtcgtgcttccaccccgtttcggtgcgagtaaatctccgcctctattgcgccaattacggtggtattagtgccgtgtttatgccgttacggaaggaattgttgattttaacaagaagtagcaatagcaaggtttctcaactgcgcatctga

SEQ ID NO: 1224 - DNA, 399 bp, Homo sapiens
  SIMILAR (3)..(203): 1001254mologous to Homo sapiens ribosomal protein L23a,accession number U02032,Smith-Waterman Score=342.
cgaaagcgaagaaggaagctcctgcccctcctaaagctgaagccaaagcgaaggctttaaaggccaagaaggcagtgttgaaaggtgtccacagccacaaaaagaagaagatccgcacgtcacccaccttccggcggccgaagacactgcgactccggagacagcccaaatatcctcggaagagcgctcccaggagaaacaagtcagtactgccccctgtacccatgaaaagatttgggtattctccattggtaatttggaaattcactcactctgcgtgatggtttctcaaacgcaaattgtgtccagtgtgcttctctaattggaagtatgaggagattgtttctgctgcatttacaaaactggcaggatcagcccagaggccgggcgcggtggctc

SEQ ID NO: 1225 - DNA, 605 bp, Homo sapiens
  SIMILAR (356)..(595): 961254mologous to Homo sapiens Similar to ribosomal protein L23a,accession number BC000596,Smith-Waterman Score=390.
agtgcggtggaattccctggctgtgggtgtggtaccgaggcttcagcgggtgccgcccgcctagagggagtggagcggtgagcacgtcaggggtggggggcgcaggtcaagctttcaccagtttttaattctttgatggggtaaatttgagcaattttctcgacttgtcgacattcgttattaactgagcaggaatcaggagaggaacccggtcctctccacacagcccagcagagagcctacgactagatttgcatctttacgtcctgcgcggaggctgctacacacatgcagaagtcatgctggtggcctggacagtgaagggagagaagtggatttgggagacatttaggagatggcaccaaaagcgaaggaagctcctgctcatcctaaagccgaagccaaagcgaaggctttaaaggccaagaaggcagtgttgaaaggtgtccgcagccacacgcaaaaaagaagatccgcatgtcactcaccttcaggcggcccaagacactgcgactccggaggcagcccagatatcctcggaagagcacccccaggagaaacaagcttggccactatgctatcatcaagtttccgctgaccactga

SEQ ID NO: 1226 - DNA, 861 bp, Homo sapiens
  SIMILAR (459)..(860): 951254mologous to Homo sapiens Human OXRE-12,accession number AAY92515,Smith-Waterman Score=639.
tttcgttacccgacccgacgccggcgtgatgaggcttccgctggtgctgctcctggctgtgctgctgctggccgtcctctgcaaagtttacttgggactattctctggcagctccccgaatcctttctccgaagatgtcaaacggcccccagcgcccctggtaactgacaaggaggccaggaagaaggttctcaaacaagctttttcagccaaccaagtgccggagaagctggatgtggtggtaattggcagtggctttgggggcctggctgcagctgcaattctagctaaagctggcaagcgagtcctggtgctggaacaacataccaaggcagggggctgctgtcatacctttggaaagaatggccttgaatttgacacaggaatccattacattgggcgtatggaagagggcagcattggccggtttatcttggaccagatcactgaagggcagctggactgggctcccctgtcctctcctttttgacatcatggtactggaagggcccaatggccgaaaggagtaccccatgtacagtggagagaaagcctacattcagggcctcaaggagaagtttccacaggaggaagctatcattgacaagtatataaagctggttaaggtggtatccagtggagcccctcatgccatcctgttgaaattcctcccattgcccgtggttcagctcctcgacaggtgtgggctgctgactcgtttctctccattccttcaagcatccacccagagcctggctgaggtcctgcagcagctgggggcctcctctgagctccaggcagtactcagctacatcttccccacttacggtgtcacccccaaccacagtgccttttccatgc

SEQ ID NO: 1227 - DNA, 1727 bp, Homo sapiens
  SIMILAR (472)..(963): 551254mologous to Homo sapiens Human RNA-associated protein- 22 (RNAAP-22),accession number AAY70241,Smith-Waterman Score=355.
ctgagcattccgtgtgtccagaggtagggttagcagggatagatggacttcctgcttattttctgttcacatttccactgaccttcaatcctgtagactgcaaagattgagccagctgagcccccaaagagactcagcagtgcagaatgtgggcctgagtgggaggactgcccagccgcacaccttccagctctgttcttcccgggccctggatgcttcttgccacgctgtcctctgaaatgacgctctgccccagcagacctgtgcgggcccagcacagggatcacattgtcggggtgacctggatcctacttgaagcctttgagctggactgtggctttatccctgaggccaggcttcatgtccagatggccatgccagaggttgacgtggcagagaaggagtgtgacacaggccagtggagcgagtggagccagcctgtgtgcttccaggctccccagagacaagacggcaccgaaagcgaaggaagctcctgctcctcctaaagccgaagccaaagcgaaggctttaaagcccaagaaagcagttgttgaaaggtgtccgcacacacacgcaaaaaagaggatccgcatgtcacccaccttcaggcggcccaagacactgcgactccggaggcagcccagatatcctcggaagagcacccccaggagaaacaagcttggccactatgctatcatcaaagtttccgctgaccactgagatcggccgggaaaaagaataaaaaaaacaacacgcctttggttcactgtgggtgttaaaggccaacaaggcaccagattcagacaggctgtgaagaaggctctatgacagtgatgtgggccaaggtcaccaccctgatttgtcctgataaagagaagaaggcatatgttcgacttgctcctgattatgatgctttggatgttgccaacaaaattgggatcatctaaactgagtccagctggctaactctaaatatatgtgtatcttttcagcataaaaaaataatgtttttcataagaatgacaacttaattagaatcaaatctataagctttaagattttacgtttctagtaagtataatattagcttatttgactagaactcaagcagaataggaatttatgcttgttttatattcaataatgataattttgaagatatagttgttttattacaccaaaaatactatattaatcttatttaactaagttttatccaaatcatgttaacttaagaaacatttgatcagttcctatatttctaggagtttggtgaatatttatttataaatgcttatttttttccaagccaagtttggaataggaggcacttttaggagggtttccataaatggaattttgtaatgctctctggagttaagaaaatatcacatatacataacgtacattaatagatacacaaacacaaatagagatttcatagctttcatcctgaaatttcagccatgaatcaggcataaatattctgatggttaatttcagacatctacttgatcggattgagagacacacatagctggtcaaacacgatttcagccatgaatcaggcataaatattctgatggttaattttagacatctacttgagtggattaagagacacacgtagctggtcaaacatgatttcagccatgaatcagccataaatattctgatggttaattttagacatctacttgagtggattaagagacacaccctgtatt

SEQ ID NO: 1228 - DNA, 1605 bp, Homo sapiens
  SIMILAR (637)..(1491): 791254mologous to Homo sapiens bA48B24.1 (A novel protein containing a formin binding protein (FBP28) domain),accession number AL161936,Smith-Waterman Score=1110.
atgcacttaattcctccagcaacaaattgtgacacacttgtggaatgttgtctaccagggaagctcactagagatttagtgtgcacggcttttactggatttgggaccagttactctccacaagaaaattcacacaaccacagtgctcttcatagttcaaattcacattcttctaatccaagcaataacccaagcaaaacttcagatgcaaatattttgtctcaaacaagcagacacaatgacagagactacagactgccaagagcagagactcacagtagttctacgccagtacagcaccccatcaaaccagtggttcatccaactgctaccccaagcactgttccttctagtccatttacgctacagtctgatcaccagccaaagaaatcatttgatgctaatggagcatctactttatcaaaactgcctacacccacatcttctgtccctgcacagaaaacagaaagaaaagtattacagcaactgtcaaaacacaacaggaaagtaatgattagaagtgcacttattaccagtatcattttagatcttctgtatattgaaaaggatttgagataccagaaaaatatagaatctacatcaggagacaaacccgtatcacattcttgcacaactccttccacgtcttctgcctctggactgaaccccacatctgcacctccaacatctgcttcagcggtccctgtttctcctgttccacagtcgccaatacctcccttacttcaggacccaaatcttcttagacaattgcttcctgctttgcaagccacgctgcagcttaataattctaatgtggacatatctaaaataaatgaagcccagccatctaatcagtctccgatgtctttaacatctgatgcgtcatccccaagatcatatgtttctccaagaataagcacacctcaaactaacacagtccctatcaaacctttgatcagtactcctcctgtttcatcacagccaaaggttagtactccagtagttaagcaaggaccagtgtcacagtcagccacacagcagcctgtaactgctgacaagcagcaaggtcatgaacctgtctctcctcgaagtcttcagcgctcaagtagccagagaagtccatcacctggtcccaatcatacttctaatagtagtaatgcatcaaatgcaacagttgtaccacagaattcttctgcccgatccacgtgttcattaacgcctgcactagcagcacacttcagtgaaaatctcataaaacacgttcaaggatggcctgcagatcatgcagagaagcaggcatcaagattacgcgaagaagcgcataacatgggaactattcacatgtccgaaatttgtactgaattaaaaaatttaagatctttagtccgagtatgtgaaattcaagcaactttgcgagagcaaaggatactatttttgagacaacaaattaaggaacttgaaaagctaaaaaatcagaattccttcatgataagtgcttccaaaactggcagcaccaagggcttattttttatgttagacatcaatgtcaatgttactacattctcggatgctaacataaattttgaaattgctcttgtgctttaa

SEQ ID NO: 1229 - DNA, 871 bp, Homo sapiens
  SIMILAR (179)..(628): 981254mologous to Homo sapiens bA48B24.1 (A novel protein containing a formin binding protein (FBP28) domain),accession number AL161936,Smith-Waterman Score=752.
gatagggaagtaattttatgaccttgggccattttcacaaagaaatgagatctaagtttcagaacttgactgtcttctttaaaacaccacattttacatgtttcaagacgattacctagattttggggggagagatgtggattagatttggagaccatctcaccagattttgacatttcaggttagtactccagtagttaagcaaggaccagtgtcacagtcagccacacagcagcctgtaactgctgacaagcagcaaggtcatgaacctgtctctcctcgaagtcttcagcgctcaagtagccagagaagtccatcacctggtcccaatcatacttctaatagtagtaatgcatcaaatgcaacagttgtaccacagaattcttctgcccgatccacgtgttcattaacgcctgcactagcagcacacttcagtgaaaatctcataaaacacgttcaaggatggcctgcagatcatgcagagaagcaggcatcaagattacgcgaagaagcgcataacatgggaactattcacatgtccgaaatttgtactgaattaaaaaatttaagatctttagtccgagtatgtgaaattcaagcaactttgcgagagcaaaggtaagtctttcactgaaatatatttttatgtttctcaggattatgattcttaaatcgaactaaagaatgtaaatcacattttatttatgaaatgtaaagttctcttcgatacattgatcacattctatcactgcattttcataagttaatatttctcgtgaaggataaagcctgtcgattttctcttaacccatgatgaatgcttcattagacttttctcataactccataagctgcaataatatattactga

SEQ ID NO: 1230 - DNA, 2511 bp, Homo sapiens
  SIMILAR (24)..(887): 691254mologous to Homo sapiens Human secreted protein encoded by gene 74 clone HGBAC11,accession number AAW78199,Smith-Waterman Score=869.
  misc_feature (1)...(2511): n = a,t,c or g
ttcagcggtccctgtttctccgtgttccacagtcgccaatacctcccttacttcaggacccaaatcttcttagacaattgcttcctgctttgcaagccacgctgcagcttaataattctaatgtggacatatctaaaataaatgaagttcttacagcagctgtgacacaagcctcactgcagtctataattcataagtttcttactgctggaccatctgctttcaacataacgtctctgatttctcaagctgctcagctctctacacaagcccagccatctaatcagtctccgatgtctttaacatctgatgcgtcatccccaagatcatatgtttctccaagaataagcacacctcaaactaacacagtccctatcaaacctttgatcagtactcctcctgtttcatcacagccaaaggttagtactccagtagttaagcaaggaccagtgtcacagtcagccacacagcagcctgtaactgctggacagggccaaggtcatggaacctgtctctcctcggaggtcttcagcgctcaagtagccagagaagtccatcacctgggtcccaattcatacttcttaatagtagtaatggcattcaaatggcaacagttgtaccacaggaattctttctggcccgatccacgtgttcattaacggctggcactagcagcacacttcagtgaaaatctcataaaacacgttcaaggatggcctgcagatcatgcaggagaagcaggcatcaagattacgcgaggaagcgcattaacatggggaactatttcacatgttccgaaatttgtactgaattaaaaaatttaagatctttagtccgagtatgtgaaattcaagcaactttgccgagagccaaaggatactattttttgagacaacaaattaagggaaccctgaaaaagccctaaaaaaatcccagaatcccccctccatggtgtggaaagatgtggaaataaattgccaccatggttttgaagaaaccaggaaacctgtaaaatcctgttgcccccccaaccctaaacatttttgagcctgccatttaaagtagacctttggacccgttaagcctgggccaaaggaaatgaccaaggggacggggtcctgtgagagtcaattccaggggaaagataccaagattgatttgtaaaaccccttgaaatgtagatttcttgtagatgtatccttcacgttgtaaatatgttttgtagagtgaagccatgggaacgccatgtgtaacagagcttagacatccaaaactatatcaatgctgaggtggctaaatacctagccttttacatgtaaacctgtctgcaaaattagcttttttaaaaaaaaaaaaaaaaaaattgggggggttaatttatcattcagaaatcttgctttttaaaaaattcagggcaagcgccaggcgatttgtgtttaaggataccattttgaaccatatgggcagtgtacaaaatatgaaacaactgtttccacacttgcacctgatccaagagcagtgcttctcccatttgttttgcagagaaatgtttttccatttcccgtgtgtttcccatttcccttctgaaattctgattttatccattttttttaaggctcctctttatctcctttcctaaaggcactgttgcttatgccactttttctataaccttttcattcctgtgtacagtagcttaaaattgcagtgattgagcataacctacttgtttgtataaattattgaaatcccatttgcaccctgttaagaatggacttaaaagtactgctggacaggcatgtgtgctcaaagtacattgattgctcaaatataaggaaatggcccaatgaacgtggttgtgggagggcgaaagaggaaacagagctagtcagatgtgaattgtatctgttgtaataaacatgttaaaacaaacaaaaaattgttatttttcttttccttcggtcagtgcacattaggcatttgaactacctgggggattctttatcagaactgttcttgttgaatatttatacttaattggaaataatncccttaaggggagggtttgttttaaaacgtattaacaggggaattgtgtatggaggatattttaatggaaataagaaattcaacaagaatgattaagtcacttcccaagtggttgtcatttgttaaaccctggtttacctgtcttgctattatgacatttcatttggaaggatgtttgtgttgtagctaactgttcaagtctggtgctgaactgctgttcttaagccatcacaaaacgctaaatttgtgtaattggagcttcctgctgttatctggaaatagcaggaaagcgcagctttgtatattgtttcctaaagtatattaaaataaaaaaaagaaactattgctaatataaaattaccttgactttttttttcctttgctgaaatattagtcacatagccttagcttcacactgccagtaatgtatcaaatcacaagggtttccgcatgaaaaaaaaa

SEQ ID NO: 1231 - DNA, 1038 bp, Homo sapiens
  SIMILAR (1)..(537): 631254mologous to Homo sapiens putative p150,accession number U93567,Smith-Waterman Score=573.
atggaagactttaccaccccactgtcaacattagccagctcaatgagacagaaggttaacaaggatatccaggacctggactcagctctgcaacaagcagacgtaatagacatctacagaactctccaccccaaatcaacagaatatacattcttctcagcactgcattgcacttattctaaatctgaccacgtaattggaagtaaagcactcctcagcaaatgcaaaagaacagaaatcacaacaaactgtgtatcagaccacagtgcaatcaaattagaattcaggattaagaaactcactcaaaaccgcacaactacatggaaactgaacaacttgctcctgaatgactactgggtagataacgaaatgaaggcagaaataaaggtgttctttgaaaccactcagcatgatcaaaacttcactaaagccaggtgcattcaagaacacaggactccctattcccagagcttcaagttgaaagctgagacccgggatccttccagtttcacgaagaacgtgcagaagatgaaaagagtgagggacgcggacctagctgtagctgcactcagccgcctccgtggtaaagtctgggtgaaggcctggcctccgctccggggctgcaggtgcgtcctgggctgctgcttcctggcattctgcataaggagcctaatggacgtgaagcactcgtgtcccgtgtgtcagcgcgagctcttctactaccaccgcctcccacggcccagccccaggtctgcctatttggcagtccgggacataggcccaaaaatggccagagacacagtgaatctctggcctcaggcaagagatccatctgagaacgcgtccccagccttgctccagactcacgccgagaaggtcctcgtccggcgagtgggcagtgggcttgggaccacgttgccccgcagaggggatgatcccactccagaaagacaaatttctttcttaaaatgcttgttgaagaagctatctcatggttttggttcagaaggggctatgcccgaggaaatctcccactga

SEQ ID NO: 1232 - DNA, 2335 bp, Homo sapiens
  SIMILAR (568)..(1053): 471254mologous to Homo sapiens calcium-regulated heat stable protein CRHSP-24,accession number AF115345,Smith-Waterman Score= 233.
  misc_feature (1)...(2335): n = a,t,c or g
atggggagaaaccagagcagaaaagctgaaaattctaaacacgaaagcacctattctcctccaaaggatcacagctcctcacaagcaatggaacaaagctggacagagaatggctttgagaagctaggcttcagaaggaaagaagccctgtattacttagatttgactgcttcatgccagtctcaggagcttttccagctgtatgccggcatgtccgtggtggggacgtccatgccggtgcaggccgtgtgtccctactgtggaaaccgcatcatcacggtgacgacctttgtcccgggtgccctcacctggctgctgtgtaccaccctcttcctgttcgggtacgtcctgggctgctgcttcctggcattctgcataaggagcctaatggacgtgaagcactcgtgtcccgtgtgtcagcgcgagctcttctactaccaccgcctgcggcagatggagctcgcgtcctccgcacgcaccgtcgtcgcccccagccggccctgtgctggcagagaggggagaggggacgccaatgggaagaacagctcccccactgctgggtcagccatgtcatctgagcctcccccaccaccacagccccccacccatcaagcttggagtcgggctgctggacacccctcggagccgtgagcgctcaccatccccctctgcggggcaacgtggtcccaaggcccactgcccactcgccggacgaggaccttctcgggngacggtgcggggcttcacagggccccgtctacaaaggagtcttgcaaatgcttctgccggtcccaaagggccattggcttcaattaccccccagctggatgggcgggccccgacatctttcctggcacatctcttgattgtggaaagggggagttattgttcccagtgggaagggcgacgagggtcaccctaataaaatgtgctcccatccccaccccaaagaatgaagaaagctgccaggcccgtgaaggtcgtccatcacctcaccctggcaccccaggcacccaagcatgagaccctggtcctggacatgtcatcagctccctaggaggattggtggaaagcacccctttgtccctgtgctttgtgggagactttgcggggaggaggcagcagacactggaggatgacattcttccacacgagacggggcttcagcggggcaatggtccctctcaagtatctcctggaggaaaggggtatgggggggcaggtgtggggtgtggggtgttcccggccatcagcacagcctatggaccattgcaacaacctctccaccatctgaagagcattaaaagcatttaaaaaggagaggtgcccactggtggctgagtggaggttccaaccccatcccagggagtggatcaagggttggtatttcttcccagcttgctcagacacatgggctcaacccacagaatccctcttcctcctggagctggaggccccagattcccagatctggccccctggcagcctgacagggaccttgcgtgacttctccaaggcaaatttccacctaagtgccccttgcgcctctcctggggcctgggcaaagcagttttctaattcttggcttggttggttctaggggagctggcttgaagtgggtggggaaaggcgggggtggcggtctttggattggacggatgttgccttttggtgcctttgcagtgggaggcggcatagctgcctgtctggggaagacagttctcccagcactcccacccctgggcacagcaggctggtactgggaggctgaacccctcttagagcctgaccttttcatctgccttctggttgtgtgaccatcactcaacagccatttcacagcccctgtaattatggcggcggcgggctggggtggtggtggtgggaagggcttgtggagaggacacaggctttgtttaaaaactttgtcccgatccatccagaaaagagtaggtagcttgcatcctgacagcctggcaaagtcaagaaagttgaaggagaaacatacctttggagagggggttttctttaaaactagtgttaagaaatgcttagggattttttttttttcttatttttcataactaaagctttcacccagagccggctctgtttgcactttgctgccgacattgcaaactttttggcagggtgggagactgagtctcattctgtcacccagggctgggagtgcagtggcccgatctcagctttactgcaacctcttgccctccagggttctgggcaattccgcctcagtctcctggagtaggctggggattacagggcatgcgccaccacacccggttaatttttgtatttttagtaggagaca

SEQ ID NO: 1233 - DNA, 411 bp, Homo sapiens
agcctgtaatgaaaggcagagcagaagcttcttgaatggccatcctgtgtggaagccctcagagatacaaatagcccattatcacaaaggagcacctattttatgttatcttggttccatcctctggccttgatggtatccaagggtgaagtcaaaaagaagggagaggtttggcggttcccacccctgtctccgtagccgcagggctgccggcagcttccatggccgaagaggcagcggaccaggttgggcgggcggccctggcctggctttgccccgctgggcggcgccggggattcggcggcgaagtgatgagggccctagttgcttctcgcccagacctcctaaccctgagtgcctcctcgggttgggccctagggtcagagggcagggtgaaagcttctgcggacg

SEQ ID NO: 1234 - DNA, 1240 bp, Homo sapiens
  SIMILAR (133)..(549): 691254mologous to Homo sapiens Similar to RIKEN cDNA A030010B05 gene,accession number BC006135,Smith-Waterman Score=435.
ggaattaagaggaggtctgggcgagaagcaactagggccctcatcacttcgccgcctaatccttttcgccgcccagcggggcagagccaggccagggccgcccgcccaacctggtccgctgcctcttcggccatggaagctgccggcagccctgcggctacggagacaggcaagtatatcgcgtcaacacagcgacctgacgggacctggcgcaagcagcggagggtgaaagaaggatatgtgccccaggaggaggtcccagtatatgaaaacaagtatgtgaagtttttcaagagtaaaccagagttgcccccagggctaagccctgaggccactgctcctgtcaccccatccagggcctgaaggtggtgaaccagggcctctccaaggacagccaaacgttaaccttgaaggcgaaagggagaaggaggcggcagcaggcaagagaaaggagagggcagagggcttgagcaaggactcttgattaaggtgtccctgggaagagacagcccaactccccagtgctccacagggctctcgggcagcccccacagctgcatctgaccagcctgactcagctgccaccactgagaaagccaagaagataaagaacctaaagaagaaactccggcaggtggaagagctgcagcagcggatccaggctggggaagtcagccagcccagcaaagagcagctagaaaagctagcaaggaggagggcgctagaagaggagttagaggacttggagttaggcctctgaggcctttggggaatagggaatggactgcagaacaaaccgtggggctctctggggtctgggggaatacgggcaacagcagtcaggaggggtaccccccatactggcttacttccacctcctgcggcccagctctgtcctcacagagcctagcgtctccctcaatccttcccttttcttcccaacttctactttttggactttccccctcccattccccagtgttcaaaatctcagtgactacccccaggtacctttgctgctgatttgggtgtcttgtttaaaagaaaatcaaggtgggtgggaatctcttggagaactgaggctgagggtagagggagtatgcccaagtcttggagtcttggttcctgttcgcggtgtttatgggttatttccctctccatccctcatttttttttttttttttaaaaaaagcaaaaatgagaataaacacaagtagacatgtaaaaaaaaaaaaaaaaa

SEQ ID NO: 1235 - DNA, 414 bp, Homo sapiens
  SIMILAR (414)..(166): 361254mologous to Mus musculus putative,accession number AK021073,Smith-Waterman Score=145.
aaatttttttggtttaatgttcatacaatatttcaaaggaatccatttgtaattgtcaagattattcagtgcttctgtaaagggcattgtgttatgtattgtataaagccactaataaaaaatctcctgtctctgtgtgtgtatgtgtgagagagagagagagagagtgtgtgtgtgtgcatgtgtgtgagagtgtgtgtttgtgtgtgcctgagagagagagagagacagagacagagagacaagagattgtgtggagaaatgagaaaaatccaatatgtaaataaattgcattatattttaaatacttatatatatataaatatgtaattttacaaacatgaacatttatacatatatacatttatttgtacaaataaatatgtatacatacacaaatgtatgctgtgtatg

SEQ ID NO: 1236 - DNA, 396 bp, Homo sapiens
  SIMILAR (3)..(137): 1001254mologous to Homo sapiens HDCMD38P,accession number AF068286,Smith-Waterman Score=249.
gaggacacttcccttgtgccctcaaatcagttgtccctccagatgagaagcactggaatgatctggctttggaatttcactatatgaggtgggtcctggcctcattcatctctatgagaaagatccagagaagaatctagaaccctggtttagattttgtaccaagagctacagcatggcctctctatatttagttaatctgtgtctaacagacatgtgctccctttcaggcctttactgtctttgcttgctctttccccaccatcctaatttctcagactcatcattccatttaactttcttctttagtccttaagccttatcagtttttagaatccaggattcttcatccttgttgaagaggccatgctctgtctgtactgagggctctgtctg

SEQ ID NO: 1237 - DNA, 6543 bp, Homo sapiens
  SIMILAR (1125)..(2075): 891254mologous to Homo sapiens Novel protein kinase, SEQ ID NO: 203,accession number AAB65675,Smith-Waterman Score=1476.
  misc_feature (1)...(6543): n = a,t,c or g
atgatttcttgcctgtgataacctatgcactccacaaagatgaactctctgagagggatgagcaagagcttcaggaaatccgaaagtatttctcctttcctgtattctttttcaaagtgccgaaactgggctcggagataatagactcctcaaccaggagaatggagagcgaaagatcaccgctttatcgccagctaattgacctgggctatctgagcagcagtcactggaactgtggggctcctggccagggatactaaagctcagagcatgttggtggaacagagtgaaaagctgagacacttgagcacattttctcaccaggtgttacagactcgcctggtggatgcagccaaggccctgaaacctggtgcactgccactgccttgacatctttattaaccaggcatttgacatgcagcgggacctgcagatcactcccaaacgtctggaatatactcgaaaaaaggagaatgagttgtatgaatcattgatgaatattgccaaccgaaagcaggaggaaatgaaggatatgattgttgagacacttaataccatgaaggaggaacttctggatgatgctactaacatggagtttaaagacgtcattgtccctgagagtggagaaccagtaggcaccagagagatcaaatgctgcatccgacagatccaggaactcatcatctcccgacttaatcaggcagtggctaataagctgatcagctcagtggattacctgagggaaagcttcgtcggaaccctggaacgatgtctgcagagcctggagaagtctcaggatgtctcagttcacatcaccagtaattatctcaaacagatcttaaatgctgcctatcatgttgaagtcacgtttcactcagggtcgtcagttacaaggatgctatgggagcaaatcaaacagatcatccagcgcatcacatgggtgagcccacctgccatcactctggaatggaagaggaaggtggcccaggaagccattgagagcctcagcgcctccaaattggctaagagcatttgcagccaattccggactcggctcaatagttcccacgaggcttttgcagcctccttgcggcagctggaagctggccactcaggccggttaggagaaaacggaagatctatgggctgagggttcgggaaagatcatgctccccgcctggcccgcctttctctggaaagctgttcttttacaggatgtctttgcnttcatcgtaaaccctaaactgggacaggaactgggccggggccagtatggtgtggtatacctgtgtgacaactggggaggacacttcccttgtgccctcaaatcagttgtccctccagatgagaagcactggaatgatctggctttggaatttcactatatgaggtctctgccgaagcatgagcgattggtggatctccatggttcagtcattgactacaactatggtggtggctccagcattgctgtgctcctcattatggagcggctacaccgggatctctacacagggctgaaggctgggctgaccctggagacacgtttgcagatagcactagatgtggtggagggaatccgcttcctgcacagccagggacttgtccatcgtgatatcaaactgaaaaatgtgctgctggataagcagaaccgtgccaagatcactgacttaggattctgcaagccagaggccatgatgtcaggcagcattgtggggacaccaatccatatggcccctgaacttttcacagggaagtacgataattccgtggatgtctacgcttttggaattcttttctggtatatctgctcaggctctgtcaagctccctgaggcatttgagaggtgtgctagcaaagaccatctctggaacaatgtgcggaggggggctcgcccagaacgtcttcctgtgtttgatgaggagtgctggcagttgatggaagcctgttgggatggcgaccccttgaagaggcctctcttgggcattgtccagcccatgctccagggcatccatgaaatcggctctgcaagtccaaattctgagcagccaaacagaggactagatgattctacttgaaagcaaagaccctttcctctttcactctcctagttatttcccttccccctcaccttttggcccatggggagaatttgacatttattcactataggacacaactcccaaggnaaactggtgcttgctggggaaacttggacccttcccaggcagggatgactccctggaccagtgaaggagttgaatgactgagcatattcagcagctcactgaagcccccaagctatcccctttagcaaaaaagtgtctcagatgtgtaaaagctgaggaatgtggtgttctggcttcacaaatgaaaaggaggcagatgttacccattgtccttttcactgtatatacctcctaagaccagcaaccgggacacctgcagtggccaatagtgttaaaaaatcctcattcctcatgatttttggctcctagcctaggaatagtttagtcaggacctcagaaaatttgagccttagttctgggattatgaaaacatggggacaaaaacaataacttgtggatgtctggttccctgctgtctgcagcccaggtatctcaggttgcaatggtcagaagtcccagtgagggagctagaaacagagctatctgttcctcatagtgccagtgtgtttacatttataggaccacatatccctggtttctgggggagggtttcactgttacatcaccaagaggccctgaaaagaggaaaaaaaaaaaaaaagaggccaggcatggtggctcacgcctgtaatctcagcactttgggaggctgaggcgggcggatcacaaggtccagagttcaagagcagcctggccaacatggtgaaaccccgtctctactaaagatacaaaaaattagccgggcgtggtggtgcatgcctgtaatccaagatactcaggaggctgaggcaggagaatcgcttgaacctgggaggcggaggttgcagtgagccgagatcatgccattgcactccagcctgggtgacagagtgagactctgtctcaaaaaaaaaaaaaaatagaatgtgtatgcatatatttgtgtgtatatgtatatatgtgtgtgtgtctatatctctatctatatagacatacacacaggagttattggatttagagttactgctaaccccagaacagaatctgttcttttacctttgagtcttttcttttgtttacctcttttcatctcaaagtgggaaagctccagataacatggtacttaggagtgagtgtctaagcaaaaccaacccaatgcgaagtatttgggtgagaactgagaggtgggagatgattggaggccatggcctatgtacaaacatactggaagaaaaccagcttgtttttaaaacttaacacaatcagaaatttttctttttgtgtttgaatctaacacactgacgtttggaaaacttgatcaatgagcttttaaccacgatttctcccgcaatttgttccttctttttacctttttaaaaatctgttagaagaaaaaaagcagcagacgaaagagaaaaaccctcctctggtagttctgtgtgtgcccctcacccctgtgtgctagtgtctgtgaagtttccctgaaaggtgggaggcgggtgggtggtcttttggagggttcctcatgaagtgtgcttgaggaaagaaattctgattctaggcagaggaaggggaacaatttaaatattggtgcatctcagatgcacttgacttcaagccttcctcaaccaaactggtccattagattccgaaaaacaggtagacgaggaagtagacagtggaagtgagtagtctccctccatctgcctaatccccaataactgtggtctggcccctgtgttcagccccagagtttgtaaaacaggtccccaggtaggtgtataagatgagttgcaaattagccgggcatgctggcacgcaccagtaatcccagctacttgggaggctgaggcaggagaatcacttgaacccgagaggcagaggtcatggtgagccgagatcacgccactgcactccagcctgggcaacagagcgagactctatcaaaaaaaaaaaacaaaaaaaaaaaacaaaaaacaaagatgagtcgcacatctgctgctgggattttctagggttgtctatgacagaatgaccatcttttaaatattaatggagtataaatggagtctataatgggtctttcatataacttttaactctttggctatcctgggctctgatcatgatatgtttgagcatagtagctccctaaactcttggagcctttcagaaattccatgtagtgctaataacctttttacttgcaaatgataaagtaactgactcagtgtctttgggctctgcaggctttagccttgttttggtaggatgttcagtatattctcagaatttttaccacctatttagctatacttcaagtactctattctctgcactaacttactgtccttctgggaactatgatggggcttcaagggagtcaggtgtcaagaaaggaggggtaagtactctctacttgctggaaaatcattgtaagtctgttgtgtatgaaattttaggaaaagtcttatatagttccctttccagactgttttcttttgactctaactataatcataagtctgtgcttccattatgaaggtcacattcctagcattcttgggaagtattagctcatactctcattcacatatgggaggttagatttttttcctctacccagagtccctttttagtttaccccacggcttagtttgctgtcagataccagttctctagcagattccccaacagttttttccccagtggggagggtggaagggagggactgatataagtaaggagatgagtagttgtgttacagttcattttctttaaaaaaaagtactttgagaaaaggtgcaaaatattcttgaaagtctctaggccagccaaagtccacatatggatatttggggatgttatttaaatactcagcaggctgagtgcaggtatacgtgtgtatagagtgtgtatactttgcttttgttttataacattgtcagctaattttggctttgttctttggcatccattcttattataagtgatggaatgccatgaaatgtactgtattgtatattacttgggaggacactaggttttcaaagaagtctggcagcacttgggttatagagggctcagcatgaccaaagtcctaaagattttacctcccagctttggttgtatgtgttcccaagtggtgaggtgagattgtggctggaggaagaaaaaggatggcatgaaagaatgacccttattgtggtctgtccttctaatcaacataattagggcagcttaccccaacatgaaaatgatgacctggccatttttaatggccagagcttgaagtctggtctctcattttgtttcagaaatgagtgagaggccttcctgcagagcagtcaggagaaatggtggagcctggggccctggaatggctgaccctgtgcctagagagctgatggcaagggctgtctggcatggctcatttgggtggggtttccccaggcataccttagttccctgatcctctgcaaagagtagctcattgactgagcaagcgcttcaggaggactgtgctggttgttcccagaccaaagagagtcacttttgactccatcaacttcaaggggacagagcctaggcagcagattctcctaatttttaacactaaaattcaaggaagcagtggaggaaagaatgcattactaccacacgatagaaataggggactcatagaactctcgactagtacctgtcagctctcaaatgcattcttgtgtctttgcttgagctgccaaaggaagggtcacaaagtgttcttcctcatggaagaagtgcctcgggggttgcagggctgcaatagtgacaactggcactggaatggacactttatttttttggctttggcttatttatttaggcactggggagggcccagggggaatttggtggatttacagttaggcactttggggaagtttaaagccccctttgggctttgttttgggagagatgatggcatgcttggtattcccatttggataatcagggaagcctccctagtccatccatattgtgtcagagtgggattaacaaccctggaagagtccactgccaaaagagtagttgctttcctggaatttccaaagcttttggattttctggatcaagtaacccactttttaaaacctgaggtcaggagttcgagaccagcctggtaacatggtgaaaccccgtctctattaaaaatagaaaaaattagccagggcatggtggcgggcacctatagtcccagctactcaggaggctgaggtaggagaattgcttgaacccaggagacagaggctgcattgagccaagatcacaccactgcactccagcctgggcagcagagcaagactccatctcaaaaaaaaaaaaaaaaaaa

SEQ ID NO: 1238 - DNA, 1539 bp, Homo sapiens
  misc_feature (1)...(1539): n = a,t,c or g
ggggcccgaggccgtccctcaccgggcatgttccctctggctgcccactccctcagggcccacatgtcctgccactcgccactctgagcacgagttcaccttccagatgtggccagggtgtgccagctcctctctcctgtgcgttggaaccccgggggaggcaagagcagatcacaggtgcatgagggttacacccgttcacctgggtctgccgggatgggttgggggggcaggtgccaggcctcactgctgtgaatctgccacgcctgggggtcctagaggctgccccaccccagtgattgggtagcagctcacatcccacccagctttcacaagtgagggaacccagggtgcattcggggagaccctcgggggcttctgtggcctctgtgcccgatgacctgcgtggcttcagacaaggccccagcgttactgggctcagcttgttgttctgtgtggagcgtgaggtgagaaaacccctctgaaaagatgtggtcggggccacgcttcccactggttctgcagtgaggagttggggcgggtgagccaaagcggccccccatggtgtctacctgaggggcagggaaccgcctgcctgtgcactcacgccaccccccagcccacaaagagcccatctgagagaaggacgtggtggagccaggacgggaaagcgtcctgtcggctggccatgctgttgcttgcgtctcgaatcttcggttctcgaggaagtgttgacagtgtgatgctaatgtctgcttttcttggcgttgggtagaagcaggacatctgtgtgtatgtgcgtatttaaattagattatttataataaccagagccagccctcgcgctggccaggatcctcctgccgagctgatgtcgctcctgccctctgccggggtccggaagcgacatctcaggaggtagctctcagcagagtgaggattcctgcctttcgtagagttttgtgtgactttttaaattattcatgtgtcccttaaaagtttcactacgtgggagaaaattccagcaccaagtgttgtggcaacaagctgagaagangtgcaggcaccactgtgttgtgggcttgttgaccgggaaatggtgtcaacccttgccaagggaacttcttctcctcgcgggggaacttgggaatggcccatcaagacctttctagggtctgggctggggtccatccctaaggtaatgggtgaccgtcccctgaagacataagcgagggtaagattcaagccatcctcaccctaaagacttgaggtccccacccaaggccaagccggccccccgtaccccttgccctgggaagcaaaccgcccaggacgcagcctcccacgcccgcaccctgccacattcaagccctgcccaaggaaggaacacatgacccttctgtctgtgactgttgcttgagtctctgtctcatgtcgtagaattgtggataattgtctagtgaccctctcatcactgtaaccatcgcgcctggcctagaatgtcgtgttttggatgctgtggtttcaataaatgcctct

SEQ ID NO: 1239 - DNA, 1551 bp, Homo sapiens
  SIMILAR (871)..(1224): 971254mologous to Homo sapiens nuclear protein,accession number X83703,Smith-Waterman Score=585.
  misc_feature (1)...(1551): n = a,t,c or g
aaaaaacagcagggttagcttgtccctcccctccctcttcagcttcccagacactgattctggaatgaaaattcacctgcctctgagttggctcctaatgggggtgggagtgttacttcggttcccaggttggaagattatctcacccggccccagctatataagctgaccggtgtggaggggcccagcagggccaactccagggattccttccacgacagaaaaacatacaagacttccttcagccaacatgatggtactgaaagtaggaggaactggtcactggaaagaagaatggcaattggggaggcaggggaattccttcctgaggatttcagagatggagagtattaagctgctgttactttaggagaggcaggaggatctgaagacacttctagcccaccctgttacccttggggagccacagttgagaaagcgagaaacacacgagagagcagagctcaaaaagaaaaaactagaacaaagatcaaagcttgaaaatttagaagaccttgaaataatcattcaactgtaggaaaagggaaaaaatccagggaaactaaagttccagttttaaaggacccagaaccctgaattcattacgggacctgctgggagtgccctacgttcctgaaggcctcctctgggagaataacctgccagtagtagaaaaattcttgtcagacaagaacaatccagatgtttgtgatgagtataaacggacagctcttcatagagcatgcttggaaggacatttggcaattgtggagaagttaatggaagctggagcccagatcgaattccgtgatatgcttgaatccacagccatccactgggcaagccgtggaggaaacctggatgttttaaaaattgttgctgaataaaggagcaaaaattagcgcccgagataagttgctcagcacagcgctgcatgtggcggtgaggactggccacttatgaagntgcgcggagcatcttatcgcctgtgaggcagacctcaacgccaaagacagagaaggagataccccgttgcatgatgcggtgagactgaaccgctataagatgatccgactcctgattatgtatggcgcggatctcaacatcaagaactgtgctgggaagacgccgatggatctggtgctacactggcagaatggaaccaaagcaatattcgacagcctcagagagaactcctacaagacctctcgcatagctacattctgaggcaaacgtcagacttctttaatcagtaaatgttcactggcattttgaaggcatggcccaagagaagagacactagccataaaatctagtttctatttatcaacgtgttgtgaagatgtacctaatgaagttttgagaaagcacagggttataggggtttaaatttcctttagggaaactcttatttatttttatggattcctgtttatttatttactgccacgctactgatattcaaaccttcatgatcatccatctggtgagcagagcttcatttgtatataacactttcagagccttcccacccataggtagttcttaaag

SEQ ID NO: 1240 - DNA, 602 bp, Homo sapiens
  SIMILAR (9)..(227): 801254mologous to Homo sapiens PRO2550,accession number AF130089,Smith-Waterman Score=311.
tgacacggagtttcactcttgttccctaggctggaatgcaatggcaccatctcggctcaccacaacctccgcctcctgagttaaagtgattctcctgcctcagcctcccaagtagctgggattacaggcatgcaccaccacgcccggctaattttgtatttttagtagagatggggtttctccatgttggtcaggctggtcttgaactcccgacctcaggtgatcccaccctgccttggccctccccaaagtgctgggattataggcgtgagcccacctcgcccggcccccagacctacattattacccaatctaaatcttccccatgaaagtaggtgataatctcacctttccgcagatgagacaaaaacttttagcctaataattttagcaataagtttagtagtcaagacccaattctaaaatttatattacctacacatttctatcaaaggccaaaagctaattagttaacaaatacattaatcatagttttaaatttgtttaattaccaagtagctgtaaaaggctcagctttaattaaagctactagtaaactgaactattccacagctatgtctgaatggtgttacattttacat

SEQ ID NO: 1241 - DNA, 458 bp, Homo sapiens
  SIMILAR (280)..(456): 941254mologous to Homo sapiens vesicle trafficking protein,accession number AF039568,Smith-Waterman Score=293.
cctcccggtcggctaagattgctgaggaggcggcgggtagctggcaggcgccgacttccgaaggccgccgtccgggcgaggtgtcctcatgacttctcttgtggaccatgtccgtgatcttttttgcctgtgtggtacgggtaagggatggactgcccctctcagcctctactgatttttaccacacccaagattttttggaatggaggagacggctcaagagtttagccttgcgactggcccagtatccaggtcgaggttctgcagaaggctgtgactttagtatacaacagcatcattcagaaagtgaagtggcattttaactatgtaagttcctctcagatggagtgcagcttggaaaaaattcaggaggagctcaagttgcagcctccagcggttctcactctggaggacacagatgtggcaaatggggtgatgaatggtcacacaccgatgca

SEQ ID NO: 1242 - DNA, 1839 bp, Homo sapiens
  SIMILAR (1092)..(1220): 1001254mologous to Homo sapiens vesicle trafficking protein,accession number AF039568,Smith-Waterman Score=222.
ctgaaattctgtacctattaagcactaactttccatttccccctttctgggtttcttttcatccctcaaaggagctctgctgccttccacagagttcttatatacatgctaatctctccatctgaaacacacttcctctcccctttgcctagttagcctcctgtgattcccaacaccagcctagaagcttctgtaaattctcccaaaacccctgctcctccctgaagagcagtttgtatttatacaggtgtttgattgtttgaagggtgctctcaccctgcctcctctcttaacatagtttttcgtgtcaggaattcctcgctttgtccacaacccctggcacatagcaggtgctcaatacttgctaaatgaataaatggacggactctgctacctacctaatctccttccagccagtcatccatctgtgggtgcctcggtccccagcttggggtgtgtccccctgggtcggactttggcgccccatccaggctggcagtaggttgtgctctttggtttgcctatctcgggcctcccgcccagccgcgcggaccgcagaacatacgccccgggcgttatcactctgtcacgcggagcctccccgcctccagacgtcagtccggttgctaccccggcaggaatcgagcttagatcacgaaggcctctctctcacctccggacgtgagaattacaggcttggatctcaaaccgccgcggtgagagccgggaggtgggaagaaagttgggaggcgcgcgcccccgtcacactccctctccgtttgggtcgcagccctttaagaaccactacgttcgcgccttcgccgggacgggggctgtggaggcgcgccgggattggtcggtttgggtgcgggtgtcgcttagcagcagcgaatgcggggtagcggggaggtggggtggctcaagactcgcgcacgcgcaccacggcctacctgcgcctgggctgccggtgacctgggccgagccctcccggtcggctaagattgctgaggaggcggcgggtagctggcaggcgccgacttccgaaggccgccgtccgggcgagagtgtcctcatgacttctcttgtggaccatgtccgtgatcttttttgcctgcgtggtacgggtaagggatggactgcccctctcagcctctactgatttttaccacacccaagattttttggaatggaggagacggctcaagagtttagccttgcgaactggcccagtatccaggtcgaggttctgcagaaggttgtgactttagtatacatttttccttctttcggggacgtggcctgcatggctatctgctcctgccagtgtccagcagccatggcctttctgcttcctgggagaccctgtggtgggaattccacagcttcctatgacactacctgcattggcctagcctccaggccatacgcttttcttgagtttgacagcatcattcagaaagtgaagtggcattttaactatgtaagttcctctcagatggagtgcagcttggaaaaaattcaggaggagctcaagttgcagcctccagcggttctcactctggaggacacagatgtggcaaatggggtgatgaatggtcacacaccgatgcacttggagcctgctcctaatttccgaatggaaccagtgacagccctgggtatcctctccctcattctcaacatcatgtgtgctgccctgaatctccagccagttcagcacgtttacctaggacagctggatctgggggctcatccagaaagagctttattggaagagagaaaggaaatattttggtcttttaagttgatatgatacagtaaaccacttgattcaataaa

SEQ ID NO: 1243 - DNA, 1002 bp, Homo sapiens
  SIMILAR (1)..(504): 991254mologous to Homo sapiens Similar to endonuclease G,accession number BC004922,Smith-Waterman Score=884.
  misc_feature (1)...(1002): n = a,t,c or g
atgcgggcgctgcgggccggcctgaccctggcgttgggcgcggggctgggtgcggtcgtcgagggctggcggcggcggcgggaggacgcgcgggcggcgccgggactgctgggccggctgcccgtgctgcccgtggcggcggcagccgagttgccccctgtgcccgggggaccccgcggcccgggcgagctggccaagtacgggctgccggggctggcgcagctcaagagccgcgagtcgtacgtgctgtgctacgacccgcgcacccgcggcgcgctctgggtggtggagcagctgcgacccgagcgtctccgcggcgacggcgaccggcgcgagtgcgacttccgcgaggacgactcggtgcacgcgtaccaccgtgccaccaacgccgactaccgcggcagtggcttcgaccgcggtcacntggccgccgccgccaaccaccgctggagccagaaggccatggacgacacgttctacctgagcaacgtcgcgccccaggtagcgcccgcgccccgggccggtcgcggaatgaggggccggcgcctggcctcgcggggcctcggtttgttcttctgcagaacggggcagctgcccaacgcgcccccggtgccccacctcaaccagaatgcctggaacaacctggagaaatatagccgcagcttgacccgcagctaccaaaacgtctatgtctgcacagggccactcttcctgcccaggacagaggctgatgggaaatcctacgtaaagtaccaggtcatcggcaagaaccacgtggcagtgcccacacacttcttcaaggtgctgatcctggaggcagcaggtgggcaaattgagctccgcacctacgtgatgcccaacgcacctgtggatgaggccatcccactggagcgcttcctggtgcccatcgagagcattgagcgggcttcggggctgctctttgtgccaaacatcctggcgcgggcaggcagcctcaaggccatcacggcgggcagtaagtga

SEQ ID NO: 1244 - DNA, 2393 bp, Homo sapiens
  SIMILAR (2316)..(2047): 1001254mologous to Homo sapiens HSPC109,accession number AF161459,Smith-Waterman Score=487.
aatttccgccgagggtccacacgatctacctgagcaacgtcgcgccccaggtgccccacctcatccagaatgcctggaacaacctggagaaatatagccgcagcttgacccgcagctaccaaaacgtctatgtctgcacagggccactcttcctgcccaggtaaggtggaaaccaggggggcggcagaacctcccactcacccgaggcccctactgccactcacagggccaggcttgccccaggctctgggtcaataccagttccctactcatctggtttcttggcaagcctgtcagcttccctgcctcgagtcccctcattccacctccacagccaaagacctgtcgggtacccctgaccatctctcctctgcccatgggcagcagcaggccctgaatctgcccccgcttctccctgctgtcacctcttggcatgcccacccaatcttgttctgccaatatggaaccccccgcaggtctgcagtgcaccaagctctcccaccttccccccgcaggtctgcagtgcaccaagctctcccgccttccccctgcaggtctgcggtgcaccaagctctcccaccttccctctgcaggtccgaggtgcaccgagctctcccgccttccccatgcaggtccccagtgcaccgagctctcacgccttccccatgcaggtccccagtgcaccgagctctcccgccttccccatgcaggtccccagtgcaccgagctctcacgccttccccctgcaggtccgcggtgcaccaggctctcccgccttcagtctctgctctgcttggagcacttccctccacccttctcgggagtttgaatctagatctgcctgacccagggcctccactcttgctcctgtgcagccctgcctctcaggtggaagcaactgagcacctctgggtgtgctccgtggtttttctggcctgcagagggctggggctgagaggcaacaggtccaggctgagcagctcactctggaatccacaggctcgggatggagtccaggcctcatcacctagttccttggtgctgtgggcaaatgacctgtgtccccctctgcaaaacctgtgacctcttggttgatgtcacatgcttccccagggcctggtccatggtaagggctcggcataggctggccaaggcggtggttggggcactgatcaaatttcattagcaggtgcctcctagggcctggtggaagggaggagactctgctgagggggagcccccgtccggtgtcctggcacctgtgctggtgctgggatatcacctgtcatggtccttgcccacttgttgctcacctctgtggggagagatggacagtcgttaagtctcccctcagacgaatgtgaatattcagaaggctcgattctcctagcagcgtttattgtcgcccactctgcctgacccagtgttgggcataaggaaaacagagggaaagagttaaccaccctggagagagttccagcctcaaggaggagccaggcaggctacagaagtctcacagtgagggcgtggtcctgcaggttgacagaaagttagaggacagatcagggaaggctgcctggaagaggtggctttgggttcatccaggccccctgcccacgtgtgcctgggtctgcccacaggacagacggctgatgggaaatcctacgtaaagtaccaggtcatcggcaagaaccacgtggcagtgcccacacacttcttcaaggtgctgatcctggaggcagcaggtgggcaaattggagctccgcaccttacgtgatgcccaaccgcacctgtggatgaggccatcccactggaggcgttcctgggtgcccatcgagagcattgaacgggcttccggggctgctctttgtgcaaaacatcctggcgcgggcaggcagcctcaaggccatcacggcgggcagtaagtgagggtggagcccagtgagactgtgggtgtgtgcaggccggggagtattaaaggtggtgatttttggagacaagtctggtggcgtccgtcccaagtgacctgcagagcccctggtttcactgctgcttcactgatgtcctcggccccttagaactttcaggtgtgccgggcacccgcctgggtgaggccaggctgcagggcggccagggagatgaggatggcttcctccgtgcggatggtacggctaccctggccaggacaggtattgacgtacaggtcaaagaggacactgggttcagccacctccaggttggggtcagcatccgctccagcttccagaccctggaggcccccgaacaccacaagagcatgcctgaagttgggaagctgggcagaggccacatctgagccgcgctctgacgtcccgatggtcaggtcatacccatcttggaagggggcctcagca

SEQ ID NO: 1245 - DNA, 1149 bp, Homo sapiens
  SIMILAR (167)..(796): 901254mologous to Homo sapiens endonuclease,accession number X79444,Smith-Waterman Score=966.
ggcacgaggctgggttccgaggcccaagcccttggcagtgtttgtgagtggaagggaggtcacgctatcgtccgcggccccagcagccctgtgccctcgttggatcccgcgacgcggctcctttaagagcctcgcgggtcgcccgccgctaggtcgctccccggccatgcgggcgctgcgggccggcctgaccctggcgtcgggcgcggggctgggtgcggtcgtcgagggctggcggcggcggcgggaggacgcgcgggcggcgctgggactgctgggccggctgcccgtgctgcccgtggcggcggcagccgagttgccccctgtgcccgggggaccccgcggcccgggcgagttggccaagtacgggctgccggggctggcgcagctcaagagccgcgagtcgtacgtgctgtgctacgacccgcgcacccgcggcgcgctctgggtggtggagcagctgcgacccgagcgtctccgcggcgacggcgaccggcgcgagtgcgacttccgcgaggacgactcggtgcacgcgtaccaccgtgccaccaacgccgactaccgcggcagtggcttcgaccgcggtcacctggccgccgccgccaaccaccgctggagccagaaggccatggacgacacgttctacctgagcaaagtcgcgccccaggtgccccaactcaaaccagattgcctggaacaacctgggagaaatatagccgcgagcttgacccgcagctaccaaaacgtctattgtctgcactagggccacttcttcctgcccaggacagaggctgatagggaaatcctacgtaaagtaccaggtcatcggcaagaaccacgtggcagtgcccacacacttcttcaaggtgctgatcctggaggcagcaggtgggcaaattgagctccgcacctacgtgatgcccaacgcacctgtggtatgaggccatcccactggagcgcttcctgggtgcccatcgagagcattgagcgggcttcggggctgctctttgtgccaaacatcctggcgcgggcaggcagcctccaaggccatccacggcgggcagtaagtgagggtggagcccagtgagactgtgggtgtgtgcaggaccggggagtattaaaggtggtgatttttggaaaaaaaaaaaa

SEQ ID NO: 1246 - DNA, 4038 bp, Homo sapiens
  SIMILAR (1840)..(2298): 941254mologous to Mus musculus putative,accession number AK017812,Smith-Waterman Score=802.
tggcgtgtgagtgcggggtggggtggtggccgttacgttctgggcaacggctacggcagtggagaagtaagaagagaaacaacgtccggcgcttccgccttcgcttaggaggaggaagagctggtagggaaaggaaagtgcttcgccctgggcctggactggaccgagtcgggttggtgggggtctgggctatgagcttttgagggtcgcctgggacgcggagcgagacacgagagccaggagctatgtctcagccgccggcgccgccgcctccgttgccgccgccacctcctccccctgaggctccacagactccgtcgtccttggcgtcggcggctgcttcgggggggcttttgaagcggagagaccggagaatcctttccgggagctgcccggatccgaagtgtcaggcgcgtctatttttcccggcctccggttctgtcagcatcgagtgtaccgagtgcggccagcggcacaagcagcaacagctgctgggggttgaggaggtgaccgacccggacgtagtgctacacaacctgctgcggaacgcgctgctcggggttacgggggcacccaagaagaacacggaactggtaaaggtgatgggcctttccaactatcactgcaaattgttgtcgcccatattagctcgctatggaatggacaaacagacaggccgggccaagcttctccgggacatgaaccagggcgaactgttcgattgcgccttactgggtgaccgcgcctttctcatagaaccagagcatgttaacactgtgggctatggcaaggaccgctccggaagcctcctgtatttgcatgacactctggaggacattaagcgggccaataaaagccaggaatgtctcattccagtgcatgtggacggggatggacactgcttggtgcatgctgtgtctcgggctctagtaggccgagagctcttctggcatgccttaagagagaatcttaaacagcactttcagcagcacctggcccgatatcaagctctgttccatgacttcattgatgctgctgagtgggaggacattatcaatgagtgtgaccctctgtttgtaccacctgagggtgttcccttgggcctgaggaatatccacatatttggtcttgccaatgtgctacatcgtcctattattctgttagattccctcagtggcatgagaagctctggtgattattcagccacctttctacctgggctcatccctgcagagaagtgcactgggaaagatggtcatttgaacaaaccaatctgtattgcatggagcagctccggtagaaaccattatatccccttggtaggcataaaaggggctgctttgcccaaactgcctatgaatttgcttcctaaagcatggggtgtgcctcaggaccttattaaaaagtacataaaacttgaagaggatggtggttgtgttattggaggtgacagaagtttgcaagataaatacttacttaggcttgttgctgctatggaagaagtctttatggacaaacatggtatccatcctagtttggttgctgatgtccatcagtatttctacagaaggactggagtgataggagttcagcctgaggaagtcacagcagctgctaaaaaaagcagtaatggataatcgccttcacaaatgtttgctctgtggtgccctttctgaacttcatgttcctccagagtggttggctcctggagggaaattgtataacctggcaaaaagtactcatggacagctgaggactgacaaaaattacagctttcccttgaacaatttggtttgctcatatgattcagtgaaagatgttctggtaccagactatggagtgagtaacctaacagcttgtaattggtgccatggcacatctgtgcgaaaggtcagaggagatgggtctattgtgtatttggatggagacagaaaaaattctaggtccactggtggcaaatgtggttgtggattcaaacacttttgggatggtaaggagtatgacaatctaccagaagctttccctattactttagaatggggtggaagagtggtcagagaaacagtatattggttccagtatgaaagtgattcatctttgaatagtaatgtttacgatgttgcaatgaaacttgttaccaagcactttccaggtgaatttgggagtgaaatcctagttcagaaagttgtccacactatattgcatcagactgccaaaaagaatcccgatgattatactcctgtaaatatagatggtgctcacgcccaaagagttggagatgttcaagggacaagaatcagagtctcagcttccaactaaaattattcttactggacagaaaacaaaaactttgcacaaggaggagttaaacatgagtaaaactgaaagaactattcaacagaatattacggaacaggcttctgtaatgcagaaacggaaaacagagaagttaaaacaagaacaaaaagggcaacccaggactgtttctcccagtaccattcgtgatggtccatcctctgcacctgctacacctaccaaggctccctattcaccgacaacttctaaggagaagaagatccgaatcacaactaatgatggacgacagtccatggttacccttaagtcttcaacaacctttttttgaacttcaggaaagtatagccagagaattcaacattcctccatatttacagtgtattcgatacgggtttcctcctaaagagttaatgccaccacaggcaggaatggaaaaggaaccagttcctttacagcatggcgacagaattacaatagaaattctaaaaagtaaagctgaaggtggtcagtctgctgcagcacactcagcccacactgtgaaacaagaagatattgctgttactggtaaactgtcatctaaggaacttcaggagcaagctgaaaaagaaatgtactccttgtgtcttttagcaacattaatgggtatggctgatggcaagcattgtacttttccacatttgcctggcaaaacctttgtctataatgcttctgaagatagactggaattgtgtgtggatgctgcaggacatttccccattggtcctgatgttgaagatttagttaaagaggctgtaagtcaggttcgagcagaggctactacaagaagtagggaatcaagtccctcacatgggctattaaaactaggtagtggtggagtagtgaaaaagaaatctgagcaacttcataacgtaactgcctttcagggaaaagggcattctttaggaactgcatctggtaacccacaccttgatccaagagctagggaaacttcagttgtaagaaagcataatacagggacagactttagtaatagttccactaaaacagagccttctgtattcacagcttcttctagtaatagtgagcttattcgaatagctcctggagtagtaacaatgagagacggcaggcagcttgatcctgatttggttgaggcccagcgaaaaaaattgcaggaaatggtttcttctattcaggcttcaatggacaggcaccttcgggatcaaagtacagagcagtcaccatctgatcttcctcaaaggaaaacagaagttgtgagttcttctgcaaagtctgggagtctgtcagactggtttgcctgaatcttttcctttaactggcggtactgaaaatttgaatacagaaacaactgatggctgtgtagcaaatgcactgggagcagcctttgccacaaggtcaaaagcacaaaggggaaattccgtggaggagcttgaagagatggatagtcaagatgctgagatgactaacacaactgagccaatggatcactcttgatttaattagaggctaataaaggcagaatgtttattgtgaatatgtaatatttgttggctgggccacgtaacttgattagtcattaaaaatcttgtacgtatataattcacagattatatcttgttattcagtgcatgatagcaagtgtgtgattggccatagcttttaatatactgctgcccaggctggctctgaatttctataaat

SEQ ID NO: 1247 - DNA, 480 bp, Homo sapiens
  SIMILAR (1)..(387): 521254mologous to Homo sapiens supported by ESTs T61992 (NID:g665235) and W26450 (NID:g1307167) and Genscan,accession number AC004955,Smith-Waterman Score=262.
gaatttaaacaactcattcatatagagcaccagcctaatggaggtgcatcggttatccatgcctacagtaacgaactctcccacctgtctcctatggagatggagaggtttgccagaaagagtttggtggggtcctagtgttccagtgaaaatgaaaactctggcagctttcctacgtgatggggtattgttccatggggcagctacttatttaccctgactttttagactatttttcatttaattttccccaattcacccagtgaaaatggagatattgggaaagaaagatatagagacaacgactatgtccaattttcatgctcagagtctcactgtactccagcctggacgacagagtgagactccatctcaaaaaaaaagaaagaaattcatgataatgctatcctctaggtgggaaggagaaaccaaaaacaaatatagaagacttacaaattaaaaaggtaaacaaaaaaataa

SEQ ID NO: 1248 - DNA, 769 bp, Homo sapiens
  SIMILAR (94)..(693): 771254mologous to Homo sapiens supported by EST AA160484 (NID:g1735912) and Genscan,accession number AC004955,Smith-Waterman Score=720.
  misc_feature (1)...(769): n = a,t,c or g
atatatccnggtcaaattgcagacagaccaaatggaacncgacccgtcaatttgttncgggcccaacgcactttggaaagacctttgcagctcaatctctcccgggnctcggtttcttttcgcnagaagttcggantgagagagaagcacncgaaaatnaacganaagggncagcggcgggaacagcaggcagctncagcgccggcacaacttcgcctcagagctatgcagccccgcgttcttggagctttgcccctctgtctgctgcttccttccccgtcctcttctcggagcagtttctctttctccgctggcacggccgttccctcctcagcctccgcttccttgtctcagccggtgccgcgcaaactgctggtccctcctacgctgctgcacgctcagcctcaccatctcctcctgcccgccgccgccgccgctgcctcggctaacgcaaagtcgcgcagacctaaggagaagcgggagaaggagaggaggaggcacggtctcggtggggcccgagaggccggcggggcctcccgggaggagaacggggaggtgaagccgctgccccgagataaaatcaaagacaaaattaaagagagagacaaagaaaaagaaagagaaaaaaagaaacataaagtaatgaatgagatcaagaaagagaatggagaagtaaagattttgctgaaaagtgggaaggagaaaccaaaaacaaatatagaagacttacaaattaaaaaggtaaagaagaaaaagaaaaagaaacaca

SEQ ID NO: 1249 - DNA, 3391 bp, Homo sapiens
  SIMILAR (1971)..(2465): 831254mologous to Homo sapiens Human signal peptide containing protein HSPP-107 SEQ ID NO:107,accession number AAY87330,Smith-Waterman Score=746.
aggagcgcaaaatggcggaaccgccgagccccgtgcactgtgtcgctgccgcggcccccaccgccaccgtctcggagaaagaaccgtttggcaagctgcaactctcctcccgggaccctccgggttctctgtccgccaagaaggtccggactgaggagaagaaggcaccgcggagtagtgaacggagaagggggcagcggcgggaacagcaggcagctgcagccgccggcagcacgcttcgcctcagagctatggcagccccgcgtcttggagctttgcccctctgtctgctgctccctccccgtcctcttctcggagcagtttctctttctccgctggcacggccgttccctcctcagcctccgcttccttgtctcagccggagccgcgcaaactgctggtccctcctacgctgctgcacgctcagcctcaccatcttctcctgcccgccgccgccgccgctgcctcggctaacgccaagtcgcgcagacctaaggagaagcgggagaaggagaggaggaggcacggtctcggtggggcccgagaggccggcggggcctcccgggaggagaacggggaggtgaagccgctgccccgagcaaatgataaaaccaggagctttgacgatttttcgccagatcaagcggctgcagaatgtttgagcattagaaaaaggcgaattcttaagggttcttgtcagacaggttacctccgaaaagccttattttcagatacagtcacattgggcattaaggcttcaacatatggattttggggaggcatgattcagtccatagtgaagggcttggcagagaccttcaacttctggatacatatttgggaactgaatgacttgcagtatatttcagccctttttgcctgctcagaagagatgcccgattatcatttagaaaaacaattggctgataaaatcaaagacaaaattaaagagagagacaaagaaaaagaaagagaaaaaaagaaacataaagtaatgaatgagatcaagaaagagaatggagaagtaaagattttgctgaaaagtgggaaggagaaaccaaaaacaaatatagaagacttacaaattaaaaaggtaaagaagaaaaagaaaaagaaacacaaagagaatgaaaaacggaagcgtccgaaaatgtatagcaaatctattcagaccatctgctcaggattgctaactgatgttgaagatcaagcagccaaaggattccataaatgataacataaaagattacgttgggaagaatttggataccaagaactatgattccaaaattccagagaacagtgagtttccatttgtctcattaaaggagccacgagttcagaataacctcaaaaggttggacacttttggaatttaaacaactcattcatatagagcaccagcctaatggaggtgcatcggttatccattgcctacagtaacgaactctcccacctgtctcctatgggggatgggagaggtttgcagaagagtttgtggggtctaggtgttcagtgaaaatgaaaactctgcagctttctacgtgatgggtattgttcatggggcagctacttatttacctgactttttagactatttttcatttaattttcccaattcaccagtgaaaatggagatattgggaaagaaagatatagagacaacgactatgtccaattttcatgctcaggtaaaaagaacgtattctcatggtacttacagagctggcccaatgagacaaataagcttggtgggagcagttgatgaagaagtaggagattatttccctgagttccttgacatgttggaagagtcaccatttttaaaatgtacactgccatgggggacgctatctagtctaaaattacagagtcgaaaagatagtgatgatggtcccatcatgtgggttcgtccaggagaacaaatgatccctgtggctgatatgccaaagtcacctttcaaaaggaaaagaactaccaatgaaataaaaaatcttcagtacctacctcgaacaagtgagccccgtgagatgctctttgaagacaggacaagagctcatgcagatcatataggacaaggttttgaacgacagactacagctgctgttggagtgctgaaggctgtgcactgtggagagtggcctgatcaaccccgtataaccaaagatgtaatttgttttcatgctgaagatttcttagaagtagttcaacgaatgcagttagatttacatgaacctccactgtcccagtgtgtccaatgggttgatgatgcaaaactgaatcaactgaggagggaaggcattcgctatgccaggattcagctatatgataatgacatttattttattccaaggaatgttgttcatcagttcaagacagtttcagctgtatgcagtttagcatggcatattcggctcaaattatatcactcagaggaggacacttctcagaatacagctactcatgaaacaggcacatcatcagattccacatcatctgttcttggacctcacactgacaacatgatttgtgctgtaagcaaagcctccttggattctgttttttcagataaacttcattctaaatatgaattacagcagattaaacatgaacctattgcatctgtaagaatcaaggaagaacctgtgaatgttaatattcctgaaaagactacagcactgaataatatggatggcaagaatgttaaagcaaaattggatcatgttcaatttgcagaatttaagattgacatggattctaaatttgaaaatagcaacaaagatttaaaggaagaattgtgccctggaaatctaagtctagttgatacaaggcaacacagttcagcacattcaaatcaagataaaaaagacgatgacattttgtgctaaatttgcatataccatctaaaatccttttttaaaaaaatttaatgtaataaagattcatgaattctgaaagcaagccaaggacttgctcctaagtctgttacaaaacatagtttatgtagctttgtaacattcctcagtgcctggccataactgtgaagtattaagcacttagggccagatgcactgtaaacattgcaggtttaaacataaaggggtctttaaaaaaaaatcatttacgttggaattttaggttttagaatagagctgacattaacatatatatatatatataaatatatatatatattttgtaatatgagccagaattctttttgcaacaatttaaagcttttccatagagcttatttatatcctttttttttcattttaaatgtgtcagcactgtagtgtaaatagcttttaaatatctttttagtgtgatttatactgaaatgtgagccacttaataaaggttcatatgttcatattaaaaaaaaaaaaaa

SEQ ID NO: 1250 - DNA, 391 bp, Homo sapiens
  misc_feature (1)...(391): n = a,t,c or g
actggaatattgcctgtgttggatcctatttgctggattcatgtcattctctggtttgtgtactccttcattttgctggagtattttctccaacagcttccctaaaaagggcacatggaggtaacccctgagtctttgcttgtctaaaaatgtattattctaccttcacccttgattatttgggtgaatatagatttatcagttgaaaataactttctagaattatgaaggcatggttccattgttttcagannnnnnnnnnnnnnnnnnnnnnnnnnnnnnnnnnnnnnnnnnnnnnnnnnnnnnnnnnnnnnnnnnnnnnnnnnnnnnnnnnnnnnnnnnnnnnnnnnnnnnnnnnnnnnataaagaatagaaggnaatacaggtgtgc

SEQ ID NO: 1251 - DNA, 476 bp, Homo sapiens
  SIMILAR (37)..(252): 981254mologous to Homo sapiens ribosomal protein L5,accession number U14966,Smith-Waterman Score=377.
  misc_feature (1)...(476): n = a,t,c or g
cgcggnngttttaaactgattgcgtggcattcgcacgagaagatctatgaaggccaagtggaggtgactggtgatgaatacaatgtggaaagcattgatggtcagccaggtgccttcacctgctatttggatgcaggccttgccagaactaccactggcaataaagtttttggtgccctgaagggagctgtggatggaggcttgtctatccctcacagtaccaaacgattccctggttatgattctgaaagctcatgctgctatacgagagaatccagtctatgaaaagaagcccaagaaagaagttaaaaagaagaggtggaaccgtcccaaaatgtcccttgctcagaagaaggatcgggtagctcaaaagaaggcaagcttcctcagagctcangagcgggctgctgagagctaaacccagcaattttctatgattttttcagatatagataataaacttatgaacagcaaaa

SEQ ID NO: 1252 - DNA, 826 bp, Homo sapiens
  misc_feature (1)...(826): n = a,t,c or g
aatgtatttgattttgtacacatannnnnnnnnnnnnnnnnnnnnnnnnnnnnnnnnnnncgtcatacttaggggtgcttatatataagtggaatgacagcaatgatacatgggataggaaagagaaattaggattattttgttactataaggtacactgcccaagaagcagtatattattatttgaaagaggggttgcattatttgtaaatctatactgcaaacacaagggcaaccacaagaaaaccacgctagaagagagaataataaaatgccaaattaacaccatcaaaggcacaagacgaatggaagacaaaaataggaataaagaacaaggttaacaaatagaaaacagtaacattatggtagatgtttatccaaatatataaatactttgaatgtcaagggtgtaaatgtacccaatttaaaagatagatttattcatatggaaaaactgggccagtttaaaaaagaaaaaattgtcaaagcaggatcaaagaacaaaacccaattatatgttggttacaagcaacccacttgaaatgtaaagagacatacaaattaaagagagaaaaatatgccaggctaacactaaccaaaatgaagaaataggtatattatagaatagcagactatacagcaagaattactatcagggataatgatgaaaggggtccattctccaagaagacatgactatccttaacatgtatgcacccaagaacagaggatcaggatacatgaggcaaaaactgatagaactgcagggagaatgatatagtttggaagttgacccctctaactctcttgttgaattgtaatttcc

SEQ ID NO: 1253 - DNA, 1959 bp, Homo sapiens
  SIMILAR (1471)..(1388): 571254mologous to Homo sapiens HSPC093,accession number AF161356,Smith-Waterman Score=88.
tttttttttttttttacttattaacaagtgtaactctttattaagatggaattgttcttattaaagaaatagatgaaaatggttaagtacaattaaatggctccaaaagtcttacaatgaaaacaacagtcctgccagttgttctttccagaggcaaatacttttcattctcttagtttttccttccgttagttaccttcatgggtttttccaaattattgtttttttttttagtttttcaagtgaatgcatatattaatacataaaattttaaaaaggcttttcagtttataatgcatcctaacagtcccctgccccatccctcctaattctccagagcaatgacttttaactcttttagcaatgtcttctcgtttttttcctcacataacttagtcatttcattattatatattatatagtgatttctggatatgacagatgaggaattaggctctacacccatcacaatcttcacttttcctcccatattgtcccagagtaagttaccatatttaggggctaagcagtcacatcattatgactggtgtacatactggctccttggtggagaaaaacagtggtattatgctcttcccatccggtacttctttttgccctaaaaagattgcctaaccaaccctttccccttgttttttttttttttttttttacttttgctttatcttcaatgaacttctttccaaatgccccaaatctggcaataaagttattatttttaagagaagggatctcactaaggtggccaggctggtctggaactcttgggctcaagtcgtcctgctgctgagcctcctgagtagctgggactaccaggcatgggccattccacccagctaaccgattaatatttttactgttcctttttaaaagctagctccatagctggaatattgcctgtgttgggatcctatttgctgggattcatgtcattctctgggtttgtgtactccttcatttttgctggaagtattttctccaacagcttcccctaaaaaggggcacatgggagggtaacccctgagtctttgcctggtctaaaaatgtattattttaccttcacccttgattatttgggtgaaatataagatttatcagttgaaaataactttctagaattatgaaggcatggttcccattgtttttcaagatcccttttcgagacaaggtcttctttctgtcacccccggcttggagtgcagtggcacaatcacgacttcactgcagccttgaactcgtgggctcaattaattcttccatctcagcttcctgactaggatgggaatacacggtgtgcgccacaatgcccaggctaattcctgtgttttttgtagagatggggctttgccatgttgcccaagctggtctcaagtgatctgcctgccttagcctcccaaagcgctgggattacaggcgtgagccactgtgcctggctggtttttcttttattttctctctacttcattcatttctcaaaggcatctgaaactccctgggcccaaaaccaaagtcaaactccatcagaatatcgtgggtacttccacctttagaatatatcttaaatcacaatttctttccacatgcaatcctttggttcaaactaccatcatccctcacttgaacctagaattggttttcctgcttctgtacttttttaaattataaaatatttcaaataaaccatgtgtggctttatactttttactacataaaaagaatgaaagatgtgccgggtggtggtggcttcaagccgggtaatcccaggcactttggggagggctgaggtggggtgaatcgcttgcggtcacgagttcgagactagcctggaccaacatggcggaaaccccatctctaccaaaaacacaaaatacaaaaattagccgggcgtggtggcgcgcacctgggtcctagctacttgggagcctgaggcaggagaat

SEQ ID NO: 1254 - DNA, 548 bp, Homo sapiens
  SIMILAR (548)..(384): 981254mologous to Homo sapiens putative glycolipid transfer protein,accession number AF103731,Smith-Waterman Score=283.
  misc_feature (1)...(548): n = a,t,c or g
tttttttggcaagcaattgagctttattttcttgtaatataatttaatttctcttttgagacctcattctatctgatggcagaaaaacaatcaaataagttccagatagactcagtcatttcagggttttctcaggcattttagatctcacttaactcaggatactctcacatacttccttctctccaggaggcatctcggggcttgctgggcatcctggcccaggagaggcatttagtccaggctgatcccctggagagaggcgtcacccagatgtgatgcatcctgtctcatgctgggtcatcatgtcctgcaggccactctgcacccgcctgattctgagtgacagccctcctgggccaccatcagacatttgtgtgtcccgcaaaaacccctcgaactacccagccatggtgttgccgcaatgttttaccatatgcattatttagggctgtctggatatccttctccccatttttcacttctgtcaaaaatcccttcaaaaatntgagacctctcttcagccacaagagggcttcagtcgctga

SEQ ID NO: 1255 - DNA, 1509 bp, Homo sapiens
  SIMILAR (1)..(1173): 1001254mologous to Homo sapiens putative glycolipid transfer protein,accession number AF103731,Smith-Waterman Score=2005.
atgtcagaactaagactctgctgtgacctccttgttcagcaagtagataaaacaaaagaagtgaccacaactggtgtgtccaattctgaggagggaattgatgtgggaactttgctgaaatcaacctgtaatacttttctgaagaccttggaagaatgcatgcagattgcaaatgcagccttcacctctgagctgctctaccacactccaccaggatcaccacagctggccatgctcaagtccagcaagatgaaacatcctattataccaattcataattcattggaaaggcaaacggagttgagcacttgtgaaaatggatctttaaatatggaaataaatggtgaggaagaaatcctaatgaaaaataagaattccttatatttgaaatctgcagagatagactgcagcatatcaagtgaggaaaatacagatgataatataaccgtccaaggtgaaataatgaaggaagatagaatggaaaacctgaaaaatcatgacaataacttgtctcagtctggatcagactcaagttgctctccagaatgcctctgggaggaaggcaaagaagttatcccaactttctttagtaccatgaacacaagctttagtgacattgaacttctggaagacagtggcattcccacagaagcattcttggcatcatgttgtgctgtggttccagtattagacaaacttggccctacagtgtttgctcctgttaagatggatcttgttgaaaatattaagaaagtaaatcagaagtatataaccaacaaagaagagtttaccactctccagaagatagtgctgcacgaagtggaggcggatgtagcccaggttaggaactcagcgactgaagccctcttgtggctgaagagaggtctcaaatttttgaagggatttttgacagaagtgaaaaatggggaaaaggatatccagacagccctgaataacgcatatggtaaaacattgcggcaacaccatggctgggtagttcgaggggtttttgcgttagctttaagggcaactccatcctatgaagattttgtggccgcgttaaccgtaaaggaaggtgaccaccggaaagaagctttcagtattgggatgcagagggacctcagcctttacctccctgccatgaagaagcagatggccatactggacgctttataagaggtccatgggctggaatctgatgaggttgtatgatggctgctgggcagcacctcctaacttcagggaataaagtgctaaagtgttttgttgccctacttaatttccagcaacagcctcaaccctctccaaccccttcacctggggggatggacaggaggtggcaaaacccagtgcttttataatttttaaaatgcatatgtgttttgtttaaagatcaaggtgctatatatttcagttcagcaggcctactggaaaccaaatgataagctgctgtagacttgaacagcaagttataagagcagatttaacaaacaaaaaaaaaaaaaaaaa

SEQ ID NO: 1256 - DNA, 2115 bp, Homo sapiens
  SIMILAR (133)..(690): 981254mologous to Homo sapiens Similar to putative glycolipid transfer protein,accession number BC002838,Smith-Waterman Score= 957.
atgggagttgagctgttcacaccagccagcgtcatgggagtgaaaagatgctgttgttctataccaggacagctttctgggaatggggagccaaggttctcagaaattgactcttctgtttcagtgaggggaggttggcagcctcgatggttccttctctgtgggggaatattgtcctattatgattctcctgaagatgcctggaaaggttgcaaagggagcatacaaatggcagtctgtgaaattcaagttcattctgtagataatacacgcatggacctgataatccctggggaacagtatttctacctgaaggccagaagtgtggctgaaagacagcggtggctggtggccctgggatcagccaaggcttgcctgactgacagtaggacccagaaggataaagagtttgctgaaaacactgaaaacttgaaaaccaaaatgtcagaactaagactctgctgtgacctccttgttcagcaagtaaataaaacaaaagaagtgaccacaactggtgtgtccaattctgaggagggaattgatgtgggaactttgctgaaatcaacctgtaatacttttctgaagaccttggaagaatgcatgcagattgcaaatgcagccttcacctctgagctgctctaccgcactccaccaggatcacctcagctggccatgctcaagtccagcaagaaagtaaatcagaagtatataaccaacaaagaagagtttaccactctccagaagatagtgctgcacgaagtggaggcggatgtagcccaggttaggaactcagcgactgaagccctcttgtggctgaagagaggtctcaaatttttgaagggatttttgacagaagtgaaaaatggggagaaggatatccagacagccctaagtttctcatcaaatgttgtacttgatttggagactgggcccaggggatgtattgactttgtgaagaaagaggagactttgaagggcaaatgctgctttgtgactgcaataatcacagccagtctcagctttttcttccctctcttctccttcggcacaattttcaatggaaaagagaagggaggctgtaaatttgacatttttgtcctgatgttcaggcttatttcaaagaagacacagacacaacaagctctgcgtaaacggttttttgagaaatgtttacacaatagttactcagaacctgtaggctccttgatgcatatttcttctgggataatggttcctttttctcattttgaagtcccagccttcataagtagaactgataccttgtttgaaatgagggaggataatgcatatggtaaaacattgcggcaacaccatggctgggtagttcgaggggtttttgcgttagctttaagggcagctccatcctatgaagattttgtggccgcgttaaccgtaaaggaaggtgaccaccagaaagaagctttcagtattgggatgcagagggacctcagcctttacctccctgccatggagaagcagctggccatactggacactttatatgaggtccacgggctggaatctgatgaggtgctgtaccctttggggtgcttggactgctgtccagagggtgaacagagctggtttcagaaaaagaatgtgtttggatgtctgtcccaacttccagtgggtagaggagtacagctgccttgtggtcatgagggtccagcaaaggagaacagagtgtggctgtgcatgccacttgctattactccagaatctgcagaggcacaaaatagagataaccacctttggagcagtgtggttcgggttgatggagaattgatgaacgatgatggtctgacatcagcactgaggacacagatcacgtttgggatgatttgctgtgtgaatgcattgtcctcagagaacaaagttgtcgcatctttgctgacacttgtaagattcactgctgcccctagtctccccactttgcactgtgtgtcacggcaccttcaagtagaagaccctcatctagtcatgtctgtatgtgaatgtggcactaccatttccttgcctgagccccggagccagctgcagtgctccacagctgtatcccagttggaggattccagaagaatggctgagcattag

SEQ ID NO: 1257 - DNA, 1042 bp, Homo sapiens
caggcctctggggacgggacacagggaagcccgaaggggcgccttggccaggtctgccatctcctccagcgaggctctggccagcactgggtgagagtggggagggggcactggcctttgcagcacagtaaaacatggtccagacaacctgtggccccggcctcatgagcaccccctgcacaggcccggcccaagccaggcgctagaagggctggttgtggagtgcttatccttgacaggtatggggccaggtgagggcaggggacaaggtgcagctgaggccgagcccaactaggtcctgggcacccctgcaggtgggagtggtccttgtcctcctggtatccagcagacacccccctctccccaccagccccattctcaggtcctttcctctttgtcaccaacaccaagaatctgtccagggttcttggcttatcttttatctcttttcactcctagagaggaattgcaattgactcagaatgacacatttttggcaccacgtgtgtagaaagcccccactgttagatgatagcctcgtgaaattcatgtctctgtattctcctatttcttttcaaaaactaatttttttctctagtgtaataaatcctaaagagggaactgatttaagaaacaaggccgccaaacaaaggcaaagcagttccgactccagcagctgggaaaggaaggaaagtgaccccactttcactcctgcacagcccacttggttaccaaaaccaccgtgcaagtcgggatgacagcagggacttcttgccaggtgggaaaaggtgcctggaagcggtatgcgcctgtgcgattcttggccatgatgttcttggaggcaatgttatttcttggtgctgcctggggtgttgctgagcggacaggctctccagctggagtccatggagaggccagaggctcgagcgccctgcctgggcctttcggagcctcctgcctgcaccctccacctcttctaaaccatgatgtggcacatctttggtgttaataaaacccaacacccaaagtaaaaaaaaaaaaa

SEQ ID NO: 1258 - DNA, 337 bp, Homo sapiens
  misc_feature (1)...(337): n = a,t,c or g
gnnnnnnnnnnnnnnnnnnnnnnnnnnnnnnnnnnnnnnnnnnnnnnnnnnnnnnnnnnnnnnnnnnnnnnnnnnnnnnnnnnnnnnnnnnnnnnnnnnnnnnnnnnnnnnnnnnnnnnnnnnnnnnnnnnnnnnnnnnnnnnnnnnnnnnnnnnnnnnnnnnnnnnnnnnnnnnnnnnnnnnnnnnnnnnnnnnnnnnnnnnnnnnnnnctttttaatattgaactgtaatagtttttaaaaaatatatcctaaatacaagtctcttatcagataatatgatttgcagatattttctgtcattctatgtactggcttttcacattcttgatgatag

SEQ ID NO: 1259 - DNA, 812 bp, Homo sapiens
  SIMILAR (620)..(811): 1001254mologous to Homo sapiens profilin,accession number J03191,Smith-Waterman Score=326.
agacagtccgatgtaattccacggctcgagcggcctgccggatctggcccctgtccaccttcaaaagttttccaactttcccggaaagcccccaggggtctgcttcctcatctcagagcagagatacctggagctaaactctaggttacttggagacccaggcgtgcgggccctaacagctcctgcagaacctttgaccaaatacgggcaaagttgcttctcttggctcgcccgcccccctcccttcccctctccgcttctgcttttcctgaaggagagtactgagcatgcaaaggctcctcacttacctcactgactccctttatttactgggtttactttccccattaacactgacatctaaatgtctagaggagtatggcatcccttcctccctgggtccatattctaaagtttagaatcatgatctttttctgcactaacgtcccacagtcctcagagtttctcacagttcattgatgtgtactgagtatataatttatacttagcccccacggcggggtggttctcagaagtggaagacaggtgggtctttggagaacacggtgggaatcttggtgcactgactaacttgatgggcgcttggttcctcttccagccagctgaggtgggtgtcctggttggcaaagaccggtcaagtttttacgtgaatgggctgacacttgggggccagaaatgttcggtgatccgggactcactgctgcaggatggggaatttagcatggatcttcgtaccaagagcaccggtggggcccccaccttcaatgtcactgtcaccaagactgacaaga

SEQ ID NO: 1260 - DNA, 979 bp, Homo sapiens
  SIMILAR (243)..(680): 441254mologous to Homo sapiens profilin,accession number J03191,Smith-Waterman Score=162.
gatttttaaaattgcatttgcaaagttcggtgtctgggctggcgagtgggggagggagggaatggggagcaggaagtggagtgcgagggctgctgcacagcgagcggagccgcggtccggacggcagcgcgtgccccgagctctccgcctccccccggcccgccagccgaggcagctcgagcccagtccgcggccgccagcagcagcgcccgagagcagccccagtagcagcgccatggccgggtggaacggcctacatcgacaacctcatggcggacgggaccctgcgtgacaggcgccatagtgcgctatcaagactctgaacctccgttttggcacgccgtccccgggaaaaacgtttcgtcaacatcacgccagctgaggtgggttgtccttggttggcaaagacccggtcaagttttttacggtgaatgggcttgacactttgggggggccagaaaatgttcggtgaatcggggacttcactgcctgcaggaatggggaattatagcatgtgatcttcgttaccaagagccacccggtggggccccccacctttcaattgtcacttgtcacccaagactgaacaaagacgctaagtcctggctgatggggcaaaggaaggtgtcccacggtgggttgaccaaacaagaaatgttatggaaatggcctcccacctttcggggtttcccagtactgaccttcgtcttgttccctttcccctttcaccgttccccacagcttttgcacccctttccctccccatacacacacaaaccaatttttattttttggggccattaccccataccccttattgctgccaaaaccacatggggctggggggccagggcttgatgggacagacaccttcccctacccatattccctcccgtgtgtggttggaaaaacttttgttttttggggttttttttttttctgaataaaaaagattctactaacaaaaaaaaaaaaaaaa

SEQ ID NO: 1261 - DNA, 1573 bp, Homo sapiens
  SIMILAR (49)..(285): 581254mologous to Homo sapiens PRO2550,accession number AF130089,Smith-Waterman Score=212.
tttttgagacagggtcttgttctgtcacccaggctggagtgcagtggtgattatagatcactgcaaccttgaactcctaggctcaagcgatcctcttgcctcagctttccaagtagttggaactctaggcacacatcaccatttctggctaattttttatttttcatggagacaaggtcttgctatgttgctcaggctggttttgaacttctggcctcaagtgatcctcccacctaggcctccaaaagtgctgggattacaagagtaaaccactgagcctggccctgaaatgctttttttttttttttttttttttttaatgaaaatacaaggcatggagatgtggaaggacacctggctttattactgttattattagttccatagtataattcatatatcacaaaaatcaccatttttaagcatatttttcaaggggcttttaccatattccaaaagttctgcaaccatcaccactacctaattccagaatattttcataatgccaaaaagcatgcctgtacctatgggcagtcactctccaattccccacttcttacagtctctgacaaccactagtctactttctcctatatataggatgtacttgttctggggcacttaattcaacaaatgggtccggggggacaacttaaatatccacatggtaaaagggattcaaggttaggactcccctccctcgcacataaaaatttaactccaaaatgggatcagagaccctaaagggtagggtgggtaaacttagtaaaatcacttagaaatagtaaatctttgtaatgtggggataagccaaagttttccacaaatatgactgaaagcacaagcaacaaaagaaaaaataaattgtattcccatcaagttaaaaacatttgggctgaaaagtatatcatcaagaatgtgaaaagacagtacatagaatgacagaaaatatctgcaaatcatattatctgataagagacttgtatttaggatatattttttaaaaactattacagttcaatattaaaaagataaaccaattataaagtaggtaaaggatctgaacagacattctccaaagaagatacataatgactaataagtatatgaaaagatgttgaaaatcatcaaccatcagggaaatgtaaatcaaaaccacaatgagataaacacttccacattacagatggaatataataaaaaagacagacaataacaactgttgatgaggatgtggataaactggaattcctcatacactgcctggttggaatgtaaaataatgtaccccacttcagaacagtctgacagttccctgaaaaggttaaacagcattacccatctgacgcagcaattctgctcctaggtatatatccaagaaatatgaagataaatgtctaccaaaaaattatacaagaatgttcataacagaattattgataatactcaaaaagtagaagcaactcaaatgtcaatcaactgatgatggataaataaaatgataaaatgtggtaaatccatatgataaaatattattcagccataaaaaggcacagagtactgataaatgctc

SEQ ID NO: 1262 - DNA, 1259 bp, Homo sapiens
  SIMILAR (871)..(966): 781254mologous to Homo sapiens Human myelin oligodendrocyte glycoprotein gene,accession number AAZ29204,Smith-Waterman Score= 133.
gccctttatattttttttaaaaattcaaaaaattagtttattagcttaatataattaggtccaatggaatcctgttttgatctcaatacttcccatattgcaatatataaatgtgacaaattcagctgttttgtggcatagataagtgtctaagctgggcagttagtctaccccgtttcatagttcatgttcttcatggctttgcagcatttgtcactttctatgatgtgttcaaagaccagaaaaggccacacttgacctgtcagctggtccttgaacagctgtaggtttttttttttttttttgagaccagagtctcccttctgttgtccagctgggagtgggcagtagcgcaacctcgactcactggcaacctctggcctccaggttcaagtgattctcctcctccagactcctggagtagctggggattacaggcacatggccaccatggcccggctgatttttatatttttagtagagatggggttccaccatgttggccaggctggtcttgaacttcctgacctcaagtgatccacccacctcggccttcccaaagtggctgggattacagggcgtgaaacccaacacccgggccgtaggttttaactaataattagggtattactctatcattctctatcattcaaattctccaggtactgacctggtttttattttatttatttatttatttacttatttatttttgagacaggaacaaaactctgctgcccaggctagagtacagtagtggcacaatcttggctcactgcagtctccacctcctggggttctattgattcctgtgcctcagcctcccaagtagctgggactacaggtgtgcaccaccacaccaggctaatttttgtattttttagtagagatggggtttttccatgttggccaggctggtctcgaactcctgacctcaggtgatccacccaccttgggcctcccaaagtgctaggattacaggcgtgacaccgagtttgacaacacattttcatagtgttcctcatgtaatgtcctctgtgtctactggaatgaaggatttgcacataccaaggaatagaataatgaaatactatgagttagcaaaccagcatgatttgtctgtgtgtgtgtaaaaggcatgagtaaaattatttacatgatcatctattattgcacatacatatttgagtgttaaaaagttaaaccgttgtcttaataggaatttcacagccttgtgatctttctttttcttttctcct

SEQ ID NO: 1263 - DNA, 612 bp, Homo sapiens
  SIMILAR (409)..(588): 631254mologous to Homo sapiens Neural thread protein,accession number AAR95913,Smith-Waterman Score=193.
aggtaatatatcttcttagaactttctgatgatatgcaatacctacttagaacgttcttctccatttgttgctattgttcccttgggagtttagttgggtgcttctctttcatgctgttaattttcgtcagatatttggtggttcttgtctatttacattttaaattacatttaaatcctaggttgatcattattggttactgcagagcattttcttgggacaaatgataatctttggtcctttgttcccctgatcttctctttcacatgtacgcagttagattcttctgttctcatggctttccaatcaatcagataccatttgatttatattttttataaatgtccccactatctcagtttgttgatggcacccttctcaaaatccaatgctattatggatttactgagtttcactctgtcgcccaggctagagtgcattggcatgatctcagctcactgcaacctctgcctcccaggttcaagcaattctcctgcctcagcctcctgaatagctgggattatagcacccgccatcatgccccgctaatttttgtatttttgtagagacagggtttcaccaggatttatttttttaagtaacttttggtc

SEQ ID NO: 1264 - DNA, 583 bp, Homo sapiens
  SIMILAR (238)..(582): 981254mologous to Mus musculus putative,accession number AK011263,Smith-Waterman Score=598.
ggcacgaggctgccgtcgcgtttgcacctcgctgctccagcctctggggcgcattccaaccttccagcctgcgacctgcggagaaaaaaaattacttattttcttgccccatacataccttgaggcgagcaaaaaaattaaattttaaccatgagggaaatcgtgcacatccaggctggtcagtgtggcaaccagatcggtgccaagttctgggaggtgatcagtgatgaacatggcatcgatgagcagatgcttaacgtgcagaacaagaacagcagctactttgtggaatggatccccaacaatgtcaagacagccgtctgtgacatcccacctcgtggcctcaagatggcagtcaccttcattggcaatagcacagccatccaggagctcttcaagcgcatctcggagcagttcactgccatgttccgccggaaggccttcctccactggtacacaggcgagggcatggacgagatggagttcaccgaggctgagagcaacatgaacgacctcgtctctgagtatcagcagtaccaggatgccaccgcaaaagaggaggaggatttcggtgaggaggccg

SEQ ID NO: 1265 - DNA, 1799 bp, Homo sapiens
  SIMILAR (163)..(993): 401254mologous to Octopus dofleini beta-tubulin,accession number L10111,Smith-Waterman Score=369.
  misc_feature (1)...(1799): n = a,t,c or g
gcgtttgcacctcgctgctccagccatctggggcgcaattccaaccttccagcctgcgaccctgcggagaaaaaaaattacttattttcttgccccatacataccttgaggggcgagcaaaaaaaattaaattttaacccatgagggggaaatcgtgccnacatccaggctggtcagtgtggcaaccagatcggtgccaagttctgggaggtgatccagtgatgaacatggcatcgaccccaccggcaccctacccacggggacagcgacctgcaagctggaccgcatctcctgtgtactacaatgaagccacaggttggaaaatatgttcctccgtgccatcctgggtggatctagaacctgggaccatggactctgttccgctcaggtccttttggccagatctttagaccagacaactttgtatttggtcaagtctgggggcaggtaacaacttgggccaaaaggccactacacagaagggcgccgagctggttgattcctgtcctggatgtggtacggaaggaggcagagaagctgtgactgcctgcagggcttccagctgacccacttcactgggccgggggcacaggctctggaatgggcactctcctttatcagcaaggattcgagaaagaataccctgatcgcatcatgaatacccttcagtgtggtgcccttcccccaaatgtctggacaccgtggtcgagccctacaatgccaccctctccgtccatcagttggtagagaatactgatgagacctattgcattgacaacgaggccctctatgataatctgcttccgcactctgaagctgaccacaccaacctacggggatctgaaccaccttgtctcagccaccattgagtggttgtcaccacctgcctccgtttcccttggccagctcaattgctgacctccgcaagtttggcagtcaacatggtccccttcccacgtcttccatttctttatgcctggctttgcccctctccaccagccgtggaaagccagcaagtatcgagctctcacagttgccggaactcaccccagcaaggtctttcgatgccaagaacattgatggctgcctgtgaacccccgccaagggccgattaacttcaaccgtggcttgctgtcttcccgtgggtcgggatgtcccatgaaggaaggtcgaatgaagcagatgctttaacgctgcaagaacaagaaacagcagctacttttgtggaaatgaatccccaaacaatgtcaaagacagccgtctgtgacatccccacctcgtgggcctcaaagatggcagtcaccttccattggccaatagcacagcccatcccaggagctcttcaaagcgcatcttcggagcagttcactgcccatgttcccgccggaaggcttttcctccactgggtacacaggcgagggcatgggacgagatggagttcaccgaggctggagagcaacatgaacgacctccgtctctgaagtatcaagcaattaccaaggatgccaacgcaagaagaggaggaggatttcggtgaggaggcccgaaagaggaggcctaaaggaagagcccccaatcaactcaaggcttctcagttcccttagccgtcttactcaactagcccctttcctcttccctcagaatattgtgtttgctcgcctcatatcattgttttttgatttatttcctttctgggaggggcgttatagaaacaagtggccctggcgacaataagtaggccgcctccaataaaatacttggttttgttgaaaaaaaaaaaaacaaaaaaaagggcggcc

SEQ ID NO: 1266 - DNA, 2264 bp, Homo sapiens
  SIMILAR (309)..(422): 1001254mologous to Homo sapiens Human secreted protein SEQ ID NO: 26,accession number AAB23613,Smith-Waterman Score=191.
tttcgtgcgagaggagcccctgctctgttaacgctcttaatgtgctgcggctgccggcagaagctagcaggctcctctgctgaggagctggtgcctgtccagacgcagaagaaaactgacacctcccacgtgggggacagaaaggtcctctcattggtgccacctgcagagatagacaaggagcgcctggccatcagaggacgctcctgacagtgacacagtgaccactataaaagtcaggcgggctgaggaggagacaaaggccaggacgctccgcagctgttggggaagaggagctgcctcctgggatggagaaatttaaggctgcgatgttgctggggagcgtcggcgatgctcttggctacagaaatgtctgcaaggagaacagcactgtaggcatgaagatccaggaggagctgcaaccggtccgggggcctgggccacctcgtactctcgccaggagaatggcccgtgagtgacaacaccatcatgcacatcgcaaccgccgaggccctcaccacagactactggtgcctggatgatctgtaccgggagatggtgagatgctatgtggaaatcgttgagaagcttccagaacgccggccagacccagctaccattgaaggctgtgctcagctaaagcccaataactaccttctcgcctggcacacaccgttcaatgaaaaaggctcagggtttggagcggccaccaaggccatgtgcatcggcctgcggtactggaagcctgagcggctggagaccctcatcgaggtcagcgtggagtgcggccggatgacccacaaccatcccacaggcttcctgggctccctgtgcacggccctgtttgtgtcgttcgccgcacaaggaaagcccctggtccagtgggggagagacatgctgcgggcggtgcctctggcagaaaagtactgcaggaagaccatccggcacacggcagaataccaggagcactggttttactttgaagctaaatggcaattttatttggaggagaggaagatcagtaaagactcaaaaaataaagccatcttccccgacaattatgatgcagaagagagggaatagacctacaggaagtggagctcggaaggtcgagggggaagacgaggccacgatgcccccatgatagcctatgacgccctccttgcagcaggaaacagctggactgagctgtgtcaccgggccatgtttcatggaggggagagcgcggccacggggcaccattgcagcctgcctgttcgggttgctgtacggcttggacctcgttcccaaaggcttgtcccaggacctggaggacaaggagaagctggaggacctgggcgcggctctctaccgcctgtccacagaaaagaagtaaagccatttctgccactttccccctagagagccgattccaccccggggcccgtagggccctctcgcagcccctgggtgagggtgtctctgtgaggctccactgcggtctgtgcctgactggccacatctaactctctgtttccaatttcagaatcctaacgtgttgcataaaatacattgtttgtcctgcgagaatattttccgtcctccaccatcagcattgacactgcgtagatttgccgcacttggacctccatgcgtggcactcacccgcagtctcctggacaggcgctgtattttattctgtcgcagagctaatgctgtttactcactcacttcaacaacactaactgcggtggtggcctccagcaggcccccccgctgcagaccctctgtcctgcctctgcctccaggcatggcgtttccccgtgagggccaatgcacctccccccaccagccaccctcccatgtccacagtgggtcgtgtgttcctggacagagaaacagtccacactggggcctgcgggacacatatagcagcatattttgctcttaaccccacccacctttttaatcacactagattttaagatcaatccctttttgaaacaactcacggagaaaaccagaacataaatggcctcctgccagctccggcgtctctctgtggtctgccttagtgggccaagtccaaatgcagagaaggcctttcccttccgcgcctgccccatcgggctcgctgacgaggaagcgctgtccctgtgatgaggttctctctcagagagtcttggaaaagagaccacttgctcttgtttaaaataaatttggacgtgatttttccatgcagcatctggtgtgaataaaacagcagttgactgatgtttaaaaaa

SEQ ID NO: 1267 - DNA, 443 bp, Homo sapiens
  SIMILAR (163)..(348): 751254mologous to Rattus norvegicus TFIIA small subunit,accession number AF000944,Smith-Waterman Score=244.
  misc_feature (1)...(443): n = a,t,c or g
agcggctggagaggtggtcggagaagtaggaacctcctgccgggctcgtggcggcttctgtccgtccgnagcggcaagcgccttccccacaggacatcaatgcaagcttgaataagaaaaacaaattcttcctcctaagccatggcatatcagttatacagaaatactactttgggaaacagtcttcaggagagcctagatgagctcatacagggctctctaaatacgtacagattctgcgataatgtgtggacttttgtactgaatgatgttgaattcagagaggtgacagaacttattaaagtggataaagtgaaaattgtagcctgtgatggtaaaaatactgggctccaatactacagaatgaataagaaaaaatatgacttttttacaccatcttctgttattcattgcttttgaagaggagcatagaagagactttt

SEQ ID NO: 1268 - DNA, 937 bp, Homo sapiens
ctcagttctgcggtttctgcggcggctggagaggtggtcggagaagtaggaacctcctgccgggctcgtggcggcttctgtccgctccgcggcgggaagcgccttccccacaggacatcaatgcaagcttgaataagaaaaacaaattcttcctcctaagccatggcatatcagttattcagaatacttcctttggagacaagtttccaggagagcctagaattagcttattcagtctcaacagatcacccccccaacttgccctttcaagttctacctccagttggatagggcctataaatgcagcactggcctcagagggtcaggaacagaggtcaatttcaggggctctcctaaatacggtaccagattctgcggataatgtgggggacttttggtaccggaatgatggttgaattccagagagggtgaccagaacctattaaaaggggataaaagtgaaaattggtagccctgtgatgggtaaaaataccgggctcccaatacctacagaatggaatagaaaaaaatatgactttttttacacccatcttctgttattcattgcttttgagagagaagcataggaagagactttttattttattctagaattgcaggaaatggactacactggtggctatacccagagaattccagtagaaagaaacttgtaactctgtagcctcttacatcacctttattatacagcatgaaaaaccataacttttttttaaggacaaaagttgttgccttcctaagaaccttctttaataaactcattttaaaactctgagtaataactggtgaagctattaaggtagcaatatgaagatattagataatgcattttcccatttcctttgcaaggaacatgatgccctttcagaatgcttatttcaataaagtcatgttttgtcagttgtaaaaaaaaaaa

SEQ ID NO: 1269 - DNA, 1534 bp, Homo sapiens
tccctataggatagagctggcagctgagaaattttaaaggtaattgataattagtatttataactttttaaagggctctttgtatagcagaggatctcatttgactttgttttgatgagggtgatgccctctcttatgtggtacaataccattaaccaaaggtaggtgtccatgcagattttattggcagctgttttattgccattcaactagggaaatgaagaaatcacgcagccttttggttaaatggcagtcaaaattttcctcagtgtatttagtgtgttcagtgatgatatcactggttcccaactagatgcttgttggccacgggaagggaaatgacttgttctaattctaggttcacagaggtatgagaagcctgaactgaagaccattttcaagagggacggtatttatgaatcagggttaggctccatatttaaagatagagccagtttttttttttaaatagaacccaaattgtgtaaaaatgttaattgggttttttaaacattgttttatcaagtcactgttaagtagaagaaagccatggtaaactgatacataacctaaattataaaagcagaaacctaactcactcgtcaagggaagttaccttttgaggaaagttaaagtacttttttccctatctgtatctatagcaacaacccagaacttacaaacttctccaaagattttattggattgttatatcaaatcagaatgtaaacatgaactcttgcatatatttaaaattgtgttggaacatttgaacatgaatgctgtttgtggtacttaagaaattaattcagttggattatcattatgtgatactggccagattgcagtgcaaccctttatgcccaataaaatgtaatttaaccagcccccagatattgttgaatattcaacaataacaagaaaagcttttcatctaagttttatgctttaattttttttctttttttttctttttcttttgtttccttgggactaattttaatttttatttggaaagggagcagtataaaccttatttgtatttagtagtgcatctcatagatacagacaaggcaagacacgataagctgtttaaatagtgtttaatcttgattgggggtggggacaaagaaaacctgtattacttaaacatactacatacgttctgcacaccattcctcctctccaaagaaatgaaataaatttattgtttacagatgtttagtgagtttaatcattctgaaaaattatctgacattttcagggtgtcaatttgagtatcagtttttttaaatgaaccatttgtatacctgtgcttttgatctcctgtcctgtacaatgtttaaattaatactgatttcttactgtcttcttagaaatctgttttttgttaggccaaaaaagggcaatatgggctgtctgttgatttttaattttatattgattattttcacaggattataatagtagctatactttttttctcccctcttttgagacggagtctcgctctgtagaaagggctggagtgcag

SEQ ID NO: 1270 - DNA, 440 bp, Homo sapiens
  SIMILAR (166)..(363): 1001254mologous to Homo sapiens ATP synthase, oligomycin sensitivity conferring protein,accession number X83218,Smith- Waterman Score=316.
cagcgtgaacaaggagtgaatgctgcagagcagctccatgatgggcccaggtagcaaagggaggagctcacaaggcctgtcttggtgatgtgggcctggggtattttaactctggaagtttctgttttgctttatctaaattgaaaggatggttttgcctttcagcctttagaagaagccacactctctgaattaaaaactgtcctcaagagcttcctaagtcaaggccaagtattgaaattggaggctaagactgatccgtcaatcttgggtggaatgattgtgcgcattggcgagaaatatgttgacatgtctgtcaagaccaagattcagaagctgggcagggctatgcgggagattgtctaaaagtgttggttttctgccatcagtgaaaattcttaaacttggagcaacaatacaaagcttccagaacagatcaa

SEQ ID NO: 1271 - DNA, 427 bp, Homo sapiens
  SIMILAR (100)..(264): 421254mologous to Homo sapiens line-1 reverse transcriptase,accession number U83303,Smith-Waterman Score=91.
  misc_feature (1)...(427): n = a,t,c or g
naaaannnnnnnnnnnnnnnnnnnnnnnnnnnnnnnnnnnnnnnnnnnnnnnnnnnnnnnnnnnnnnnnnnnnnnnnnnnnnnnnagccctcagatcagaaagcaagaaataagcatcctctattgacagatggcacaattttgtatatagaaaatcctaaagaatctcctcccccaaaattattaaaagtaatcaagttcaacaaggctacaagattcaagattaatatgcaaaaatcagttgtatttctacaccctagaaataatttgaaaatgaatttaagaaaatactttcatttggaacagaatnnnnnnnnnngaatacttaggaataaatataacaaaagaagtgtgaaacctgaacactaaaaacgacattgttgaaaaaatgaaagaactgctaagtaaatggaaagactccccatgc

SEQ ID NO: 1272 - DNA, 838 bp, Homo sapiens
  SIMILAR (37)..(453): 421254mologous to Homo sapiens ATP synthase, oligomycin sensitivity conferring protein,accession number X83218,Smith- Waterman Score=168.
  misc_feature (1)...(838): n = a,t,c or g
aattctcgggtttgacctacagccgcccgggagaagatgggctgccccagcagtcgtccgggctctccccgcaaggtgcgatgctttagtaccgggtgaggtcagaccatttgcccaagcttgtggggccctcttgttcaggtatacggcattgaaggtcgctatgccacaggctctttattctgctgcatcaaaacagaataagcctggagccaattagaaaaggagttgttgagagtagcacaaaatcctcgaaggaacccaaaagtggcctgcttcctgtttttgaatcccctatgtgaaagccgttccattaaaagtgaaaaagccctaaattgacatcaccagcaaaaagagaaggttctctcccccttcaactacccaaccctgaatcaattttgcttggctggaaaaatgggtccgatttaagccaataacnccaagggagtcgttttctggcctttttcttaccatggatggagtgttccattcgcgggagagggtacctttgcacagtggacctctggcatcttcctttaggaaggaaagccacactcttttgaatttaaaaactgttcctcaaggagtttcctaaggtcaagggccaagtattggaattgggggctaaggactgatccgtcaatctttgggtggaatgattgtggcgcattggcgaagaaatatgttgacatgtctgtcaagaccaaagattcagaagctggggcagggctatgcgggagattgtctaaaaagtgttggttttctgcccatcagtgaaaattcttaaacttggaagccaacaataaaaagcttccagaccagaaaaaaaaaaaaaaaa

SEQ ID NO: 1273 - DNA, 468 bp, Homo sapiens
  SIMILAR (96)..(467): 921254mologous to Homo sapiens heat shock protein,accession number AJ243191,Smith-Waterman Score=562.
gacccacgcgtgcgcccacgcgtccggaggcctgcgcccacaccctctcctgtttattcttcgcccgcctgggcagggcccggcgccggccgtggatgagccacagaacctcttgcaccttccgagcggagagaagtttccattcctcttcttgttcctgctcctcttccacctcctcctcggcctcccgtgccctcccggaccaggacccgcccatggagaaggccctgagcatgttttccgatgactttggcagcttcatgcggccccactcggagcccctggccttcccagcagcccatcccacagcccgccccggtggggcaggcaacatcaagaccctaggagacgcctatgagtttgcggtggacgtgagagacttctcacctgaagacatcattgtcaccacctccaacaaccacatcgaggtgcgggctgagaagctggcggctgacggcaccgtcatga

SEQ ID NO: 1274 - DNA, 934 bp, Homo sapiens
  SIMILAR (453)..(578): 1001254mologous to Homo sapiens heat shock protein,accession number AJ243191,Smith-Waterman Score=211.
cgcccagaggcctttgcccacaccctctcctgtccagccttcgcccgcctgggcagggcccggcgccgtccgtggatgagccacagaacctcttccaccttccgagcggagagaagtttccattcctcttcttcttcctcctcctcttccacctcctcctcggcctcccgtgccctcccggcccaggacccgcccatggagaaggccctgagcatgttttccgatgactttggcagcttcatgcggccccactcggagcccctggccttcccaggcaagtgatccgggccctgaggggaggggaggtgcacagggaggggacgtctgctccagggcgccaccgaaggcgctgtggctgcccggtcggcctggaacaggtgctgcacagcctgcagccatgtgtggccaccaagacagatgtggccacagggacagatgtggccatgaaaacaggcaacatcaagaccctaggagacgcctatgagtttgcggtggacgtgagagacttctcacctgaagacatcattgtcaccacctccaacaaccacatcgaggtgcgggctgagaagctggcggcctgacggcactgtcatgaacaccttcgctcacaagtgccagctgccggaggacgtggacccgacgtcggtgacctcggctctgcgggaggacggcagcctcactatccgggcatggcgtcacccgcatacagaacacgtccagtagtaccttccggacggagatcaaaatctgagtgcctctcccttccctttccctgtccccccgccccacgcctgccagcaaagcctcgctaaccccattacaacagctccaggacatctcagcccaggttctagcccccacgcaccccagaccccaggtggaccatcctcccaaactaagggccctccactctatccagggcaggccagggact

SEQ ID NO: 1275 - DNA, 631 bp, Homo sapiens
  SIMILAR (127)..(201): 881254mologous to Homo sapiens heat shock protein,accession number AJ243191,Smith-Waterman Score=102.
  misc_feature (1)...(631): n = a,t,c or g
agaaaaaattgacgcccgtggttcgatcgcgtgtggagcgcgacccacgcgtgcgcagaggcctgcgcccacaccctgtcctgtccagccttcgcccgcctgggcagggcccggcgccgtccgtggatgagccacagaacctcttccaccttccgagcggagagaagattccattcctctttctcttactcctcctcttcacacctcctcctcggcctcccgtgctctcccggcccaggacccgtccatggagaaggccctgagcatgttttccgatgactttggcagctatatgcggccccactcggagcccctggccttcccagcccgccccggtggggcaggcaacatcaagaccctatgagacgcctatgagtttgtggtggacgtgagagacttctcacctgaagacatcattgtcaccacctccaacaaccacatcgaggtgcggcctgagaagttggcggctgacggcactgtcatgaacaccttcgctcacaagtgccagctgccggaggacgtggacccgacgtcggagacctcggctcttggggaggacgggaggcttactatccgggcacggggtcacccgcatacagaacacgtncagcagacctttcggacggagata

SEQ ID NO: 1276 - DNA, 553 bp, Homo sapiens
ttttgaagcgttcaagctattatatattttcataatatagaactttaaagtatagtaatcaacagtggcaaaatatttctgtctctgacaaggccagtagaattcttatgagaacagcttttaagcacttcaatggagtgtcatttttttggtagcttccagaaggtgccaaacaggtttcaacatcatattaattagaaatacccataataattataacaataataaaaaggtataatatggtacataaatatggaagagcagtttgtaatatgaatacattttctctagacgagatcacagttttattttgtaaatattacatttaagtatatatatacacacatatatgtacaactatatatacatgtgcatatatatgtaaatttatatttatatataatatctttatatagatagatatctgcagacaggttattgattatagagacccaagaaagcaactcaataattgttcaaagttttcctcactgactgctggtgtgtagtttaagaagcccccatttgtttgcactcagaatgccttatcttc

SEQ ID NO: 1277 - DNA, 489 bp, Homo sapiens
  misc_feature (1)...(489): n = a,t,c or g
acaataggccagtagaattcttatgagaacagcttttaagcacttcaatggagtgtcattttttttggtagcttccagaaggtgccaaacaggtttcaacatcatattaattagaaatacccataataattataacaataaaaaaaaggtataatatggnacataaatatggaagagcagtttgtaatatgaatacatttnctctagacgagatcacagttttattttgtaaatattacatttaagtatatatatacacacatatatgtacaactatatatacatgtgcatatatatgtatcagagaaaacagtatgggaaaacaaatccatgagaacaggataaaaatatcatgaacagcaaaatatgtctgagtatttaaaactgtatagaaaaaataaattagatgaacaattgtgtaaatataaattaaaaaagatgacattcttaataaataangtttactatttacatttttatatattgcca

SEQ ID NO: 1278 - DNA, 1470 bp, Homo sapiens
  misc_feature (1)...(1470): n = a,t,c or g
gggcaggagattttgaggccctgaggttttaggtgggctgtgagggccaacgcttgacacaaagtccatgggttattattcaagaatgcacaggcccatcggccttttagaaagacaagacagggagtgcttgtttgatatttcaaggaataaagccggagctccggaattgtagtccaccttaaaagagagacctgtattggagaatattttatttttttggcaaatttgatcttaccctttaccagttctataatttggttaaaagctgattacggccctacaatggtcaaagtcagctaactgtcgtcctacttaaagacttccgggtccatttccccaacttataggagggaaggggagtctcttaaaatcttctttctttcaggaagggcaccctncactttctcagacttaaaattcccacatcaagtgttcccattaaaaggaaggataagggcattctggaggtgcaaaccaaatggggggcttctttaaactacacaccaggcagtcagtgagggggaaactttggaaccaattatttgagttggctttccttggggtctcctataatccaataaccctgtctggcaggatatcctatcctatataaagatattatatataaatataaatttaccatataatatgccacatgtatataatagttgtaccatatatgtggtgtatatatatcccttaaatgtaatcatttacaaaataaaactgtgatcctcgtcctaggggaaaatgtattcatatttaccaaactgctccttcccatattttatggtacccatattatacctttttattattgttataattattatggggtatttctaattaatatgatgttgaaacctgtttgggcaccttctgggaaggctaccaaaaaaatgacactcccttggaggtgcttaaaagctgttctcataaggaattctactgggcctattgtaaaaaagggaaaaaaaaaaggaaaaaggaaggaaaggacacaaaggaaaataatctaaacaccaaaaactaaacacaattccaatcctttttctgtacctcacgcgcataaatttgcctgctcctatttttttttctgtttatgtgtttttatgggatctaagttaaatcttttggcaatatataaaaatgtaaatagtaaactttatttattaagaaatgtcatctttttttaatttatatttacacaattgttcatcttaatttattttttctatacagttttaaatactcagacatattttgctgttcatgatatttttatcctgttctcatgggatttgttttcccatactgttttctctgatctcaattacaggttgggatctcacaaataataatgtcagaggcaggaaatattttgccactgttgattactatactttaaagttctatattatgaaaatatataatagcttgtacgcttcaaaaaaaaaaaaaaaagcg

SEQ ID NO: 1279 - DNA, 450 bp, Homo sapiens
  SIMILAR (27)..(356): 1001254mologous to Homo sapiens NADH-ubiquinone oxidoreductase subunit CI-SGDH,accession number AF047181,Smith- Waterman Score=578.
  misc_feature (1)...(450): n = a,t,c or g
gaattcccgggtcgacgatttcgtcgaaggctgctgctcctgttcgacacagcggagaccatgggaaaagactatttgtcatcagaccttctagattctatgacaggcgttttttgaagttattgagattctacattgcattgactgggattccagtagcaattttcataactctggtgaatgtattcattggtcaagctgaactagcagaaattccagaaggctatgtcccagaacactgggaatattataagcatcccatatcaagatggattgcccgtaatttctatgatagtcctgaaaagatatatgaaagaacaatggccgtccttcagattgaagctgaaaaggctgaattnnnnnnnnnnnnnnnnnnnnnnnnnnnnnnnnnnnnnnnnnnnnnnnnnnnnnnnnnnnnnnnnnnnnnnnnnnnnnnnnnnnnnnnnnnng

SEQ ID NO: 1280 - DNA, 512 bp, Homo sapiens
  SIMILAR (3)..(104): 1001254mologous to Homo sapiens NADH-ubiquinone oxidoreductase subunit CI-SGDH,accession number AF047181,Smith- Waterman Score=169.
gtttgttgcggcgggtttcggttactgcggtggcagctctgtctggccggccccttggcactcgcctcggatttgggggcttcctcactcgtggctttccgaagctgctgctcctgttcgacacagtggagaccatgggaaaagactatttgtcatcagaccttctagattctatgacaggcgttttttgaagttattgagattctacattgcattgactgggattccagtagcaattttcataactctggtgaatgtattcattggtcaagctgaactagcagaaattccagaaggctatgtcccagaacactgggaatattataagggtaaaggagctggaagtgcgaaaattgatgcatgtgagaggagatggaccctggtattactatggagacaattgacaaggaacttattgatcattctccgaaagcaactcctgacaattaagcatttttttctccaaatacaaagtatattctctttattgggaaataaattaataaatatat

SEQ ID NO: 1281 - DNA, 1163 bp, Homo sapiens
  SIMILAR (73)..(624): 431254mologous to Homo sapiens NADH-ubiquinone oxidoreductase subunit CI-SGDH,accession number AF047181,Smith-Waterman Score= 241.
cccacgcgtccgcccacgcgtccgccatgagtttgttgcggcgggtttcggttactgcggtggcagctctgtctggccggccccttggcactcgcctcggatttgggggcttcctcactcagtggctttccgaaggctgctgctcctgttcgacacagtggagaccatgggaaaagactatttgtcatcagaccttctagattctatgacaggcgtttttttgaagttattgagaatccaccatggcattgactggattgccagtaacaattttcatagctctggtgaaatgtattcattggtcaagctgaactagcagaatttccagaagggctatgtccccagaacactggggaatattattaaggcatcccatatccaagatgggatttgcccggtaatttcttatgataggtcctgaaaaggatattatggaaaggaacaatgggccgtccttccagattggaagcctgaaaaaggctggaatttacggggtaaaagggagctgggaagtgcggaaaatttgatggcatgtggaggagggagatgggaccctgggtattactatggagaccatttgaccaaggaactttattggatcattcctcccgaaagccaactccctggacaaattaaagccattttttttcctcccaaataccaaaggtataatcccccctttaattgggaaaattaaattaataaatataatcccgggaatttttgccccccccggtggaaaaaccaaaagagccctctgacattactgtctcctcagtgttgggttccagattggaggccttttggtttggagggagtttgggcctccccagtccccccaaagaagggtttaaaatggtacctaataaaaactgggaggaaatagggaatttggtgaacctcctaaaattgtaggcaactttggaaagggtaagtggtttaattacctggaccaatgggaagttataggaagtctaataatgttaagcgaccgagtaattatagtaatttggtaccaatggcctgtactgtagatgtctgtattattgaggggcaactcaggattttaagttccataaagtattgaaccaactctaaaatgttaactccttcactcaacagattctcagtaaacaaattttaaagttaaaaaaaaaaaaaaa

SEQ ID NO: 1282 - DNA, 420 bp, Homo sapiens
  SIMILAR (299)..(385): 541254mologous to Homo sapiens reverse transcriptase,accession number L27428,Smith-Waterman Score=74.
  misc_feature (1)...(420): n = a,t,c or g
natttaaataactcttacatatatgttcagttgatttttgacagggacacagtggggaaaagcagtccttttaacacatggtgctaagaccactgaatatccataggaatttagatctttacctcataccatatataaaaattaatttaaaacagctcacaggcccaaatttaagagctaaaactataaaacttccagaacaaaacataggagaaaatctttgtgacctttagttaagcagagagagatacagtactaaaagcataactcgtataaggaaactaatacattaggcttcattaaaattaaaaacaagtgcatttcaaaagacaccattaggaaaagataagccacagactgggagaaaatatttgcaaatcatgtcttaaaaggacnnnnnnnnnnnnnnnnnnnnnnnnn

SEQ ID NO: 1283 - DNA, 1564 bp, Homo sapiens
ttttttttttgttaaaatatcttttaattttaccggcaaaatacatcaatgactaatatattcccgtatggaatatattcttattggaatatattcttatatagaatatatagactatgtatatatacatatgtgtatatacctatatacatatatatatcttggagatataaaactaattgggaataatgtcatatatatagatagtaagcaaacattttttaaaacattttaaagactccaaactattcatttctatccacctataaaaaactagcaattaaacctgtcaaatcacagccatcttgctttacgcagattcagaaacatgagatccttttacctttgaaactctagtttcaaagctgttctaaagtgacttggttttaatttatatacttgcagggataataagtagctgtagggccataaaaatgtaaagaatacagtatcgtgcccatacgcaactgcaatcagttatttttaagtgttcgtaaaagatagtggtcttcacaatcctcccttttcagatgggcacactttcatatttcaaaagtgcatgtattcactttttatccccaacaaaggtagtagctaccctctaaagcagaggataacattttctttttgcccaccccagaatggattatgatcccatgtgcatactcccatggttcccttcccctagtctgtatgaaaaaataaagcacaataattctgaggttttaggggtagtggtatagggatagtattcacacacaaaaaaactgaagtacaaggatatgagacttttgttaaaatatcttttaaagtaattttactggcaaaatacataaatgattaaccagttttaaaatagtaaacttatttatttatttatttttgagacggggtttcactctctcaccaggctggagtgcagtggcatgatcttggctcactgcaacctccgatttccagagtcaaggaaactttttttttttggagctattgacagcttttaacaattaagcaaagtatactcctataaacaaaatttggagcataattgtttctctctacctgatttctccagaacttgaaaattattagtgagtatcttaacttacggcaatagttatttgcataagtacaataagaatctgttttcatttgtaacaggacacaattggagaaactggttattttaccaaggctttgactggaatggtgtgctttcctttaaggaatcaaacttgacttatggagccaatataagccccttggaaaaactggccttatatctttgtctacacagtccgtgcccagggttcctgacctgtacgggctctgtgctaaggggcgcagggtaaccaagagcgaccaggaggccgccatcttgaactccgtacgaggagaggaagaggaaaactttattggaacccagaagagagacggtggcaaagtcaaaccccgccgtgcacgctgaaggctccacccgagagaaccaagggatcagttagggaacgtgacctccagtagccacatgggcgggctgcactcccgtgccctcccgtccacgaaa

SEQ ID NO: 1284 - DNA, 730 bp, Homo sapiens
  SIMILAR (178)..(537): 921254mologous to Homo sapiens dJ1013A10.3 (related to DBI (diazepam binding inhibitor (GABA receptor modulator, acyl-Coenzyme A binding protein))),accession number AL033383,Smith-Waterman Score=580.
  misc_feature (1)...(730): n = a,t,c or g
gaacagacaggaaatcaactgggtttgaaactctggtggtgacctccgaagatggcatcacaaagatcatgttcaaccggcccaaaaagaaaaatgccataaacactgagatgtatcatgaaattatgcgtgcacttaaagctgccagcaaggatgactcaatcatcactgttttaacaggcaacatttcatacaccatttagtcacctaggccaaagtccggaaggatgctcctcttacacttttccgaagataatgagcccagccaaggcaacagagatgcttatttttggaaagaagttaacagcgggagaggcatgtgctcaaggacttgttactgaagttttccctgatagcacttttcagaaagaagtctggaccaggctgaaggcattttgcaagctctccccaaattgcctggagattttcaaagaagtantcaggaaaagagagagaganaaactacncgctgttaatgctgaagaatgcaatgtccttcagggaagatggctatcagatgaatgcacaaatgctgtgtgaacttcttatccagaaaatcanaactgtgatgaccactacagcagagtanagcatgtccaagggaaggatgtngctgtaccnntctgatttccagactaggaactaaaataagcttcattgtgcctttttgagtgctagaatatcannntacatgatatattcactacagctctgagaaaataaaagttga

SEQ ID NO: 1285 - DNA, 2192 bp, Homo sapiens
  SIMILAR (728)..(1180): 591254mologous to Homo sapiens peroxisomal D3,D2-enoyl-CoA isomerase,accession number BC002668,Smith-Waterman Score=345.
atggtgctgggcgccaaaaccatcaagacgttcacagctctcagacaccagcgatcaaatcagaatcacgctgtcagtgctttggtagaagcacccaaagggactttgagagcagaggagagagaattctcagtcaggctggggcatctggaatcttccagaagctgcattgtggagggtgagagcacagaatctggctctgacgaactcaggcaagatggaaccacatttgaaagaatctatgaagacagacttggcaaaggcaggagtcacggcaaatcaagggatctggctagcaaggactcacaggcaagcccacagcaggctcggtgcagcagcaaaagaggccagcaacaggaatctgcaggagctacagctctgagggagagaaaccttgctctcagttcagaagaaccgcagctccaagaagatgtaatacataaacgagaaaggaaacctactgaaccattacaccctgaagatatatctggagtccaggatttcactgagaactggatagctgggcatgccaattgtatcttcaatggctctctgcttgctctcagcacggaatccaaactccttagcacagatacaatgatcttcaagctcagggctggccctcgggatgcagcgacccctcctcgccaggctccgcgggactccgggcagggcgctcagtgctccggcagccacagggttcgcagagctgagagccgcccaagggatggcgatggcgtacttggcttggagactggcgcggcgttcgtgtccgagttctctgcaggtcactagtttcccggtagttcagctgcacatgaatagaacagcaatgagagccagtcagaaggactttgaaaattcaatgaatcaagtgaaactctttgaaaaaggatccaggaaacgaagtgaagctaaaactctacgcgctatataagcaggccactgaaggaacttgtaaaatgccccaaaccagggtgtatttgacttgatcaacaaggccaaattgggacgcatggaatgcccttggcagcctgccccaaggaagctgcccagggtagaactatgtggatttggtgtccagttttgagtccttccattgggaatcctcctagtccaggtggagcctggaacagaaagggataaccaactgggctttgaaactctggtggtgacctcccgaagatggcatcacaaagatcatgttcaaccggcctcaaaaagaaaaatgccataaacactgagatgtatcatgaaattatgcgtgcacttaaagctgccagcaaggatgactcaatcatcactgttttaacaggaaatggtgactattacagtagtgggaatgatctgactaacttcactgatattccccctgggtgggagtagaggagaaagctaacactaatgcccgttttactgaggggaatttgtggggctgttttataggattttcctaagcctcttgattgcagtgggtcaatgggtcccagctgtggggcatctccagtcaccctccttggggcttattcgatgcccgtgttattgcatcttgacaggggcacattttcatacaccattttagtcaccttaggcccaaagtccggaagggatgctcctcttacacttttccgaagataatgagcccagcccaaggcaacagagatgccttttatttttggaaaagaagttaaccagcgggaagaggcatgtgcctcaagggacttgtttactgaaggttttccctggatagcacttttcagaaagaaagtctgggaccagggctgaagggcattttgcaaaagcttccccccccaaatggccttggaggaattttcaaaagaggtaatcaggaaaagagagagagaaaaactacacgctgttaaaggctgaagaatgccaatgtcccttccagggaaaatggctatccagatgaatgccacaaatgcctgtggtgaacttcttatcccagaaaatcaaaaactgtgatgaccacttacagcagcaccaaagcatgtcccaaggaaggatgtgctgttccctctgtctttccagtactggaactaaataacgcttcattgtgccttcttgtaggtgctagagatatcaattacacaatgatgagtatttccactcacaagctctgaatgaaataaaaaggttttggtaaaacaagcttaagaattcacacaaaa

SEQ ID NO: 1286 - DNA, 2714 bp, Homo sapiens
  SIMILAR (1645)..(1782): 581254mologous to Homo sapiens Human myelin oligodendrocyte glycoprotein gene,accession number AAZ29204,Smith-Waterman Score= 134.
tttttttttttttcaaattttataaaaggcattttattataaatacattgtagttgtagcagtaaaatacattttgttaccatgaatctttgaaaacaaaagaacttcactgagacaatgagcacactgtaggaactgtagaccccaagttgaaaacttgttctatggaaccaaagtagctaacgtaattccaaaactaagttagaaaaggataaagacaaagaaagaagaaaataaaaaccctaggagagtgggctttgggcgttattttatgggaccaaggcccccttttacttttaaggataaactctttaggtattagagcctcttagatgaggtatccgtttactggcaaagaaaaaaaattggttataattttggccaaaaggttatggcccatttagatgggctgtataactgggtactttggaagagatgaacctgacccacctccagttttgtacagcttccctcaggaagacttcccaaaataagactcagtatgaatttgctaagtaactgatctatgaagttagctgaacaagtttagataagaactatatgtatgaagcattaaaaaaaaaatcctgtgtctctaacaacaggaccctttaataaaatgcaaaactcattatctttataatttagaagagaagtattttaatcgccatatttacgtaggatggtcctactacatatagccagtacctttatggggtttaaagaatcaggtcagatgactggcacagaaatcagatacagtacaatgtcatatacatggatttataggaagcaggcatggtctggatttatgaaaatccaggacccttcctctgtaaagggggaggctgagaaacattctcagctgcactgacactttgggacttcaaccaggacaaagagccctctgacctactgaaagatataaagaggtcttcgcatacaagttatcgtgcaaagcaaagtgtaaataaaccgaagctcccctctaaggttgggactgcataaaggaacccaggctgaaaatataaacaaaccctctccaaaggtgagcaagccttttcagtaggaaggactgtgtcttaagaaaactccaaagctgtatattctacgatggtcttcacgtgtacttttacacctaagtcattctgtattctattaccataaaaatagcttttttttgtctttctagtagctcagtaaattcaaaggcaaactaaaaaccagaagcagagcccagtaccccccaagatgcagtccagataaaacagcaacaacacacaaattaaacaatacccaaagacctgacaggtttattatattataggcagtttctttctcaaaaataacttgctcatacatgtgcacctatgacttatgaataattcatgctgtgtaggtggtagatccccctaggctgttttgcaaacacatatagatttttttaaaggtagcaaagtaatcagagacatttattttctgccatatgtaacacttcaggctctctctaacacctgctggcatggcagagaatctaaaataactttgttaaccctgagaaaccacataatttgaaaaacaaatcctttgccctcaccaccctccccccaccaaaaaaaaaaataataataaccataaaaactaaaacatttgccaggcgcagtggctcatgcctgtaatcccaacactttgggagcccgaggcgggcagatcatgaggtcaagagatggagaccatcctggccaacacggtgaaaccccggtctctactaaaaaatacaaaaattagctgggcgtggtggcgcatgcctgtagtcccaactacttgggaggctgaggcaggagaatcacttgaagccgggaggcggaggttgcagtgagccgagatcatgccactgtactccagccagggcaacagagcgagactctgccccgaagaaaaaaaaacaaaactagtattttattatttaaggattatctgtggttttcgatgctccatgtcactgccatcttaggacagggactcctgcacttagtgcctcgatacatgctaggtgcactctcatggcattctgatggcttctttccaggattctcacttccatgcatgtggatcaagattgaccctaagcacaccaaacaaatgcacagcttcccagactgatgtcccaggcagcagcgtcacacaaaagcaaactcacccctaaaaaccaaagagctcccttcaccctactgcggaagagccagtgccaagaccccagcaggggtgagagtgaggaggggtggtggccaatccaaagggcctgtcgctccatggagacctttctcccacaaatgttccagtcatggcaccagatttataaaaatgtctccagagatcagttttttacactgagtaaataaatacatggttgaaaagacgttcagactctgaaggtctctgagactttcaaactgcgagaatcagacccagtgattttcaaagtgtggttcctggactggcagcatcagcatcgcctggaaacttgttggaaatgcaaatcatcaggctccagaccaaaatcagaaatgctgggggtgggtccagctatctgaattttaacaagacctcgaggcaattctgatactggctgaagtttgagaaccattgctccatcctgttcacaattctcaaatcttaaaacaggacagatctgtaaatagtaccggacgcgt

SEQ ID NO: 1287 - DNA, 1830 bp, Homo sapiens
  SIMILAR (211)..(573): 881254mologous to Homo sapiens Human secreted protein clone yb186_1 protein sequence SEQ ID NO:84,accession number AAY73431,Smith-Waterman Score=557.
atggcgctgcctccaggcccagccgccctccggcacacactgctgctcctgccagcccttctgagctcaggtccaaccagccagtccctggtgagaggactcaggtgccctttcctttggcctgctgctcttctcactgggccaattcctggtcacagcacagtaccaaccgtgcctgagcccttcccagaggcctcctgctgtgttccaggttggggggagttggagccacaaatagatggtcagacctgggctgagcgggcacttcgggagaatgaacgccacgccttcacctgccgggtggcaggggggcctggcacccccagattggcctggtatctggatggacagctgcaggaggccagcacctcaagactgctgagcgtgggaggggaggccttctctggaggcaccagcaccttcactgtcactgcccatcgggcccagcatgagctcaactgctctctgcaggaccccagaagtggccgatcagccaacgcctctgtcatccttaatgtgcaatacccagccatcctgttcctcagcatcccctctgaggagaggcccaggcccctggctcccatctgggtttgggaagaaagggctagaagtatgaggggctgtgtcaagccagagattgcccaagtcggcgccaagtaccaggaagctcagggcccaggcctcctggttgtcctgtttgccctggtgcgtgccaacccgccggccaatgtcacctggatcgaccaggatgggccagtgactgtcaacacctctgacttcctggtgctggatgcgcagaactacccctggctcaccaaccacacggtgcagctgcagctccgcagcctggcacacaacctctcggtggtggccaccaatgacgtgggtgtcaccagtgcgtcgcttccagccccaggtgagcatggccagcaagcggccctgcaaagcttcagtgactccaacaacctaaaactcaacaacgtgcgcctgccacgggagaacatgtccctcccgtccaaccttcagctcaatgacctcactccagattccagagcagtgaaaccagcagaccggcagatggctcagaacaacagccggccagagcttctggacccggagcccggcggcctcctcaccagccaagacaagtcatcaattgctggctcagaagatgctgaacctcttgctccacccatcaaaccaattaaacctgtcactagaaacaaggcaccccaggaacctccagtaaagaaaggacgtcgatcgaggcggtgtgggcagtgtcccggctgccaggtgcctgaggactgtggtgtttgtactaattgcttagataagcccaagtttggtggtcgcaatataaagaagcagtgctgcaagatgagaaaatgtcagaatctacaatggatgccttccaaagcctacctgcagaagcaagctaaagctgtgaaaaagaaagagaaaaagtctaagaccagtgaaaagaaagacagcaaagagagcagtgttgtgaagaacgtggtggactctagtcagaaacctaccccatcagcaagagaggatcctgccccaaagaaaagcagtagtgagcctcctccacgaaagcccgtcgaggaaaagagtgaagaagggaatgtctcggcccctgggcctgaatccaaacaggccaccactccagcttccaggaagtcaagcaagcaggtctcccagccagcactggtcatcccgcctcagccacctactacaggaccgccaagaaaagaagttcccaaaaccactcctagtgagcccaagaaaaagcagcctccaccaccagaatcaggtgagtga

SEQ ID NO: 1288 - DNA, 1051 bp, Homo sapiens
gtcaggcacagtaaatgaaggggagaggaaccatcagctaccatatgaatactaaggtttaggaaaacgttttaaatgttatctatactcatttctccccagcacacaaatccaaggtttatttttggagtgacagtaagaaaagaagaacctcccaaacagtcctgtcctgacctcaggttcactgctgcgcttctgtctgttaacattttcacaggtatttgttagccaatgtagaaagctgtgcccaatggcccctaaagcatcaagaaggcaggtctaaattaccagggacagaatgaataacaactatacagactgaaactcctagctgccataagcaaaatgatgagactgcggtttaggtataacaaagctacaaaaatgggaaaactgccctgaatgtggttagcccacaaaacccctgctggcatccagcccaacactgatgagaaaaggaaaaccagcccttgcaagatgccctcaaatggctcagacacctgagccacgtggtccctgtgcaatcacagtaaatccatccaggcaaaacatcagagatcttacaatgtgaacaggaatgaaatgtaaagtttccacaagacattctgggaagagaattaaactttaaatgtggtattgcactactaggtaagatcagaaaagaaaaccaacaaaaaccccaaccctatctgtggacttgacaaattgaacagtgtcatatagggctggcctgagaccggcacttgtgggtgctgagctgcatggcagtggtttcccaaagacataccctggatggacctacccactctgtgccacaaacatcagccttgacttttatggtggtttagactgagaagctctccatgtggtacccagcagggcccatggcacctggtatgtgtttacgggtacgctggatgggtgggcagggccaccttggcacacctgcccctgggacccttcccattgtcctgggacagaatgatgcccatggtgtgtctggttctgctttttttgcaacacgtatcttctagttcccaattaagctgaa

SEQ ID NO: 1289 - DNA, 1637 bp, Homo sapiens
  SIMILAR (1)..(315): 1001254mologous to Homo sapiens Human secreted protein clone yb186_1 protein sequence SEQ ID NO:84,accession number AAY73431,Smith-Waterman Score=538.
  misc_feature (1)...(1637): n = a,t,c or g
agaaaagagaagaaaaccaaaggcccctcccggcacccatctctgatatcaagtgactccaacaacctaaaactcaacaacgtgcgcctgccacgggagaacatgtccctcccatccaaccttcagctcaatgacctcactccagattccagagcagtgaaaccagcagaccggcagatggctcagaacaacagccggccagagcttctggacccggagcccggcggcctcctcaccagccaaggtttcatccgcctcccagtgctgggctatatctatcgagtgtccagcgtgagcagtgatgagatctggctctgagccgagggcgagacaggagtattctcttggcctctggacaccctcccagttcctccaaggcatcctctacctagctaggtcaccaacgtgaagaagttatgccactgccacttttgcttgccctcctggctggggtgccctccatgtcatgcacgtgatgcatttcactgggctgaaacccgcaggggcacaggtatctttgggcaaggctaccagttgggacgtaagcccctcatgctgactcagggtggggccctgcatgtgatgacttgggcccttccagagggagctctttgggccagggggtgttcagatgtcatccagcatccaagtgtgggcatgggcttgcttgtataaccccaccccagtaattccacagcaccttgtacagtagggcatgggggcgtgcctgtgtgggggacagggagggccctgcatggattttcctccttcctatgctatgtagccttgttccctcaggtaaaatttaggaccctgctagctgtgcagaacccaattgccctttgcacagaaaccaacccctgacccagcggtaccggccaagcacaaacgtcctttttgctgcacacgtctctgcccttcacttcttctcttctgtccccacctcctcttgggaattctaggttacacgttggaccttctctactacttcactgggcactagacttttctattggcctgtgccatcgcccagtattagcacaagtragggaggaagaggcaggcgatgagtcttantagcaccccaggacggcttgtagcctatgccatcattttcctacgggcgttagccacctttaagcaccatcccctaggggaagggggtgaagtgagggccccagagcccctctttgtggcntccccccacgtttgggccttctgggattcactgtgagtgtccctgagctctcggggttgatggtttttctctcagcatgtctcctccaccacgggaccccagcccctgaccaaccccatggttgccctcatcagcaggaaggtggcccttcctggaggatggttcgccacaggcacataattcaacagtgtggaagctttaggggaacatggagaaagaaggagaccacataccccaaagtgacctaagaacactttaaaaagcaacatgtaaatgattggaaattgaatatagtacagaatatatttttcccttgttgagatcttcttttgtaatgtttttcatgttactgcctagggcggtgctgagacacacagcaagtttaataagctcgactgaattcattgacataaaaacggacacgtgggtcgccccttca

SEQ ID NO: 1290 - DNA, 1083 bp, Homo sapiens
  SIMILAR (123)..(272): 621254mologous to Homo sapiens reverse transcriptase,accession number L27428,Smith-Waterman Score=150.
aggctgggaactaaagggatgtatgaagttcagactaagaaagatttgcctcccggatggttctgaaaaggcaagggatgatggattattatattatttattttttaaggaggggtggctaaacaacaaataacatttttaaatgggcaaagtatttcaaaagacatttctccagagatatatagatggccaacgagcacatgaaaagatgcttaacatcgttaaccatcatggaaatgcaaatcaaaaccacaataagatgccacttgacactaggatgcctataatcaaaaagataataaagtgttaatgaggatggagggaaactggaaccctcatattgcttggtgggaatgcaaaatagtgcaactgctttccgtaagtctggcagttcctcaaaaggttatcacagcacccaacaattccattccctgtatgtgcccaagagaaacaaaaacacatattcactcaaaaacttatcacaaatgtttatggcagcattattcatagaagccaggaagtggaagcaattcaaatgtctgtcaactaatgaatggacaaatgtggtacgtccataagatggaacattcatcataaaaacaaactcctgatacatcctacaacagtaagaaccttaaaaacatcctaagtaaaagaagccagtcacaaaagactacataaattatgattcaatttatatgaaatgtccagaataggcaaatccacagagacaggttaagttgttgccaggagctagggagaatggggagtgactgccaagtgagtatgcagcttcttttgggggccagtccttgtcaactgagttgatatgcagtgacaaaaaaagctcttaaggagagtgggattatgtgacgtgagccactgtgctggcctgattccattatttataatagaattattaaaaactctacagctgggatagaaataccctttcttggtttaagatacccaaaacactatagcccagcttttctgaggaaggccactgtttatttctaactgattttatctttggatgtaccatttctccaaactattccacaggggatataagaattatat

SEQ ID NO: 1291 - DNA, 531 bp, Homo sapiens
  SIMILAR (251)..(529): 1001254mologous to Homo sapiens phosphoribosypyrophosphate synthetase-associated protein 39,accession number D61391,Smith- Waterman Score=458.
gcaatcctcagctccagccgtaatgtcacaggtgcttgactgcgcccgcctctgacagacacacaaggtactgtcaggtgcttctgttgccatttctggatgctcgttctttgacccaggcacacagctctgattttcccatcagaaatcctctgaaactgagtgcagaagagagtagagtggtgtgtgcattgacagtatgggctagagggtgtttctttcctaccaactcactctgttctcctcccaggatgacattattgacgatgtggagagttttgttgctgccgcggagatcctgaaagagagaggcgcctataagatctatgttatggccacccacggcatcctgtctgcagaggcccctcgcctgattgaggagtcctccgtagacgaggtggtggtgacgaatactgtccctcatgaggttcagaagctgcaatgtcccaagataaagactgtggatatcagtttgattctttctgaagccattcggagaatccacaatggagagtccatggcctacctttt

SEQ ID NO: 1292 - DNA, 433 bp, Homo sapiens
  SIMILAR (116)..(226): 1001254mologous to Mus musculus putative,accession number AK011290,Smith-Waterman Score=186.
gcaaagagggcccagtcctatgcggagagactgcgtctgggtttggccgtcattcacggggaagctcagtgcacggaactggacatggacgatggtcgtcactccccgcctatgtgtcaaaaatgctactgtgcacccaggcctggagttgccattgatgatggccaaagagaagccaccgataactgtagttggagatgttggaggccgcatcgcaatcatcgtggtatggttatatgtcatccatgtgcagaggtggcactcctggctcttggtcagtaggttgtccactctgggactgtatttctaggaacgatgatccgaatggatccatgtatcctttctcacccaaactcccttgtgccaagtggcagaaacctgtatccaggtgaacatacattaaagtataacctacagataggaaatgagaaaa

SEQ ID NO: 1293 - DNA, 1955 bp, Homo sapiens
  SIMILAR (1100)..(1159): 1001254mologous to Homo sapiens phosphoribosypyrophosphate synthetase-associated protein 39,accession number D61391,Smith- Waterman Score=105.
ggtgcgcaagggcacggacctcggagctctccccgttcccccgccggccatgaacgccgctcgcaccggctaccgagtcttcctcggccaactccacggccgttttgctcggagctggccaagcgcatcacagagcgccttggtgctgaattggggaagtctgttgtatatcaagagaccaatggagaaacaagagttgaaataaaagaatctgttcgcggccaagatattttcattatacagacaatacccagagatgtgaatacagctgtgatggagttgctcatcatggcttacgcactgaagactgcctgtgccaggaacattattgggggtcatcccttacatccccctacagcaagcagagcaagatgaggaagaggggttccattgtgtgcaagctgctagcatccatgctggcgacagcaggtttaactcacattatcactatgggatcttcatcaaaaggaaatacaaggctttttcagctttcctgtgggacaaccttaggagccttcaccttttcctggctttcagtattatccaggggaggaaattcccaaatttacaggaaatgcaggtcattgtaggctaagtcttcctggatgctggcaaaggaggggcccagtcctatgcgggagagactgtcgtctggggttttgggccgtccattcacggggggaaggcttcagttgcacgaaactggaacatggacgatggtcgtcactccccgcctatggtcaaaaatgctactgtggcacccaggcctggagttgccattgatgatggccaaagaggaagccaccgataactgtagttggagatgttggaaggccgcatcgcaatcatcgtggatgacattattgaccgatgttgagagttttgttgctgccgcggagatcctgaaagagagaggcgcctataagatctatgttatggccacccacggcatcctgtctgcagaggcccttcgcctgattgaggagtcctccgtagacgaggtggtggtgacgaatactgtcccttcatgaggttcagaagctgcaatgtcccaagataaagactgtggatatcagtttgattctttctgaagccattcaggagaatccacaatggagagtccatggcctaccttttccgaaacatcactgtggatgactagctttcacgagggtctcgaccctggacctctggaggggaaacatggaaaaagcagtgccatgagtggatacagtgtttcctttgcaagggaggactcgaaacagcctgggagttagatatcttcttttgcccggatttgatggggaggagggattaaaagagttcaggaaggaggacagagcttaattggataaaatatccataaacatgggccttaacatgtcctgctgtccatcagcccctgttcccttaaaaagttcctagctgcctttccttaaaaataatcctgaaaatccttattgatacttaaagaggagttaaaggcacataaagtcttaactctatcaattgttccatttagttgtttcagctcccagggaaatggaggtaatgatggttgaaccctggttagggaaggctgaagcccctgtggccctattacctatcccagttggccctctcccaaatcaacttcaagtcttttatagagaatcgtatttttctttcaggaaattgttatgcctacagcccattgaaaaatgaagcattcatgttgttacatcttccaaggatgtcagattagaaaatagcatcccacctctgggtatctgagtggctctgaagttgcaaataaaataatttgttgtcttgctagtcttttcattagacagcagaagaccatggatacagaacagcagtcaggtctgtggctggacacaaacactttcccaggttccaccctcttcctaagtgttgaagctaaatccttgttgaatactgtattttaaatcttt

SEQ ID NO: 1294 - DNA, 746 bp, Homo sapiens
  SIMILAR (489)..(572): 891254mologous to Homo sapiens nephropontin,accession number M83248,Smith-Waterman Score=128.
  misc_feature (1)...(746): n = a,t,c or g
tctcaccattctgatgaatctgatgaactggtcactgattttcccacggacctgccagcaaccgaagttttcactccaggtgtccccacagtagacacatatgatggccgaggtgatagtgtggtttatggactgaggtcaaaatctaagaagtttcgcagacctgacatccagtaccctgatgctacagacgaggacatcacctcacacatggaaagcgaggagttgaatggtgcatacaaggccatccccgttgcccaggacctgaacgcgccttctgattgggacagccgtgggaaggacagttatgaaacgagtcagctggatgaccagagtgctgaaacccacagccacaagcagtccagattatataagcggaaagcttatgatgagagccattgagctttccgaggtgattgatagtcagagacttttcaaagtcagccgtgaattccacagcctgaatttcacagccatgaagatatgctgttgtagacccccaaagtagggaagaagataaacacctgaaatttcgtatttctcatgaantagatagtgcatcttctgaggtcanttannaggagaanaaatacaatttctcactttgcatttagtcaaaagaaaaaatgcttatagcannnatgaagagaacatgaaggctctttctcagntnatggntgatgtgtatctattgagctggaataactgagtgttgataatagtagtgnggctcatgcaactcccct

SEQ ID NO: 1295 - DNA, 409 bp, Homo sapiens
  misc_feature (1)...(409): n = a,t,c or g
tttagtttgtggcttcatggaaactccctgtaaactaaaagcttcagggttatgtctatgttcattctatagaagaaatgcaaactatcactgtattttaatatttgttattctctcatgaatagaaatttatgtagacgcaaacaaaatacttttacccacttaaaaagagaatataacattttatgtcactataatcttttgttttttaagttagtgtatattttgttgtgattatctttttgtggtgtgaataaatcttttatcttgaatgtnnnnnnnnnnnnnnnnnnnnnnnnnnnnnnnnnnnnnnnnnnnnnnnnnnnnnnnnnnnnnnnnnnnnnnnntaaaaaaaaannnnnnnaaaaaaaannnnnnacaaaaannnnnnnnnnnnggcccctttttt

SEQ ID NO: 1296 - DNA, 1016 bp, Homo sapiens
  SIMILAR (1014)..(772): 541254mologous to Homo sapiens Human secreted protein sequence encoded by gene 112 SEQ ID NO:282,accession number AAB56188,Smith-Waterman Score=201.
gctgatacccctgcggtaccggcctgatttccctgggagacccacgcgtccgcccacgcgtccgagacactttaacaacctaccagcagcacagagtattcccagttttaccattttccatttagctatagtgtccttttaaggattctaggcaacagtgaaccttatttaaaaagcaaaattgtgctataacaagtgcaaaaggaaagtttgtgttcctaccgtgctttaaagtattgatggtagcaagagaaagcgcaggggtgtttttgctcatagaaattctggaaattaggtgcctgaagtcttacactcattttttaaaagtatagcatctgcttccagttttcagtgactccattgatgatgcatgcggtttggccgtatcatactgagctttaaacacaagatttataaacatggtatgtagtgcatcttttgcaaacaggttggcagcggtactgtgtgacttggtcttttgtggcttttttgagaaaaatgaaccactttgccatgtatagtttttttctccccaactacttgtgagtagttcctggtttataaaacgtttatgaaaggtagcacataacccttttcctagaatgaaagaggcttttgagctacccagtgtaaggggataggtagcaaatagagatgaaaggcactaaagatgtcctactctttaagagcattgaacgccagttgtgccaatttattcaaagtcatctttgaacttatgttaaaatggggtaaaaacaggtaactacttcaggccggggctcatgcttgtaatcccagtggctttggggaggccaaggcaggtggttccactgacctgaggtcaggagaccagcctgggcaacatggcgaaaccccatctctactaaaagtacaaaaagtagcctagcgtggtggcgcacccctgtaatcccagctactcggggaggtggaggttgcagtgagccgagatcacatgactgaattccagcctggatgacagagggagactctgtctc

SEQ ID NO: 1297 - DNA, 872 bp, Homo sapiens
  SIMILAR (86)..(322): 911254mologous to Homo sapiens OPN-b,accession number D28760,Smith-Waterman Score=368.
agagcacagcatcgtcgggaccagactcgtctcaggccagttgcagccttctcagccaaacgccgaccaaggaaaactcactaccatgagaattgcagtgatttgcttttgcctcctaggcatcacctgtgccataccagttaaacaggctgattctggaagttctgaggaaaagcagctttacaacaaatacccagatgctgtggccacatggctaaaccctgacccatctcagaagcagaatctcctagccccacagacccttccaagtaagtccaacgaaagccatggaccacatgggatgatatgggatgatgaagatggatgatggaccatgtggggacagccaggactccattgactcgaacgactctgatgatgtagatgacactgatgattctcaccagtctgatgagtctcaccattctgatgaatctgatgaactggtcactgattttcccacggacctgccagcaaccgaagttttcactccagttgtccccacagtagacacatatgatggccgaggtgatagtgtggtttatggactgaggtcaaaatctaagaagtttcgcagacctgacatccaggtaaatcctttaacagacacacctgatggttctgactagcgctcaagtctaggaaaccacagtttgcatattcattcattcattcatccattcattcatccattcagcaagaattcattcatattctactttatgaccattgaatacaaatctttttctgcttggcggtttttgtaagtctacataatttctctctagatttgattctcaaacacaattctactttttgaaatcctggatcagttattttcagattaaaataaatggaaaacaccaattatt

SEQ ID NO: 1298 - DNA, 1699 bp, Homo sapiens
  SIMILAR (354)..(1109): 501254mologous to Homo sapiens nephropontin,accession number M83248,Smith-Waterman Score=433.
ttttggaccctgtacgtaccggccgaattcttgatcgccgtcgcaccggcccaaatttccgggtagagccacgcgtccgggaggaggcagagcacagcatcgtcgggaccagactctgtctcaggccagttgcagccttctcagccaaacgccgaccaaggaaaactcactaccatgagaattgcagtgatttgcttttgcctcctaggcatcacctgtgccataccagttaaacaggctgattctggaagttctgaggaaaagcattttttacaacaaatacccagatgctgtggccacatggctaaaccctgacccatctcataagcagaatctcctagccccacagaatggctgtgtcctctgaagaaaccaatgactttaaacaagagacccttccaagtaagtccaacgaaagccatgaccacatggatgatatggatgatgaagatgatgacgaccatgtggacagccaggactccattgactccgaacgactctgatgatgtagatgacactggatgattctcaccagtctgatgagttctcaccattctggatgaatctgatgaactggtcactcgattttccccacggccttgccagcaaccgaagttttcactcccagttgtccccacagtagacacatatgatggccgaggtgatatgtgtggtttatggactgaggtcaaaatctaaggaagtttcgcagacctgacatcaagtaccctgatgctacagacgaggacatcaccttacacatggaaagcgaggagttgaatggtgcatacaaggccatcccccgttgcccaggacctgaacgcgccttctgattgggacagccgtggggaaggacagttatgaaacgagtcagctggatgacccagagtgctgaaacccacaggcaaccaacaggtccagattatataagcggaaagccaatgatgagagcaatgagcattccgattgtgattggtaggcaaggacttttccaaaagtcagccgtgaattccacagcccatgaattttccagcccatggagattttgcctgtttgtagcccccaaaagtagggaagaagataacacacccctggaattccggtattccccaggaattagatagtgcatcttctggaggtcaattaaaaggaggaaaaaatacaatttccccactttgccatttagtccaaaagaaaaatggctttatagccaaaatgaaagagaaccatgaaatgcttctttctccagtttattggttgaaatgtgtatctatttgagtctggaaataacctaatgtgtttgataaagagttgagtgtgggggcttcatggacaccccctgtaaacgtaaaagcttcaggggttatgtttatgttcattctatagaagaaatgcaaactatccctgtattttaatatttgttattctctcgatgaataggaaatttatgtagaaccaaacaaaatacttttacccacttaaaaagagaatataacattttatgtcactataatcttttgtttttttaagttagtgtatattattgttgtgattatctttttgtggtgtgaataaatcctttatcttgaatgtaataagaatttggtggtgtcaattgcttatttgttttcccacggttgtccagcaattaataaaacataaccttttttactgcctataaaaaaaaaaaaaaaaaaaa

SEQ ID NO: 1299 - DNA, 654 bp, Homo sapiens
  SIMILAR (208)..(489): 841254mologous to Homo sapiens glyceraldehyde 3-phosphate dehydrogenase (EC 1.2.1.12),accession number J02642,Smith-Waterman Score=394.
atgactgcttttaactctggtaaagtggatattgttgccatcaatgaccccttcattgacctcaactacatggtctacatgttcctgtatgattctacacatggcaaattccatggcaccgtcaaggctgagaacgggacgcttgtcatcaatggaaaccccatcacccattttccaggaccaagatccctccaaaatcaaatgggcgccccagccaaggtcatccatgacaactttggtatcatagaaggattcatgaccacagttcacaccatcactgccacccagactataaatggcccctccgggaaactgtcacgtgatggctgcagggctctccaggacatcatccctgtctctactggcgctgccaagcctgtgggtaaggtcatccctgagctgaacgggaagctcactggcatggccttccatgtccccactgccaatgtgtcagtggcggacctgacctgtcgtctggaaaaacctgccaatatgatgacatcaagaagcaacacccactcttctaccttcgatgctggggcagccattgtcctcaaggaccactctgtcaagctaatttcctggtatgacaatgaatttggctacagcaacagggtggtgcacctcatggcccacaatgcctccaaggagtaa

SEQ ID NO: 1300 - DNA, 5266 bp, Homo sapiens
  SIMILAR (2)..(5263): 1001254mologous to Homo sapiens complement component C4A,accession number K02403,Smith-Waterman Score=9075.
gaccagatcagcccccagagcagcctcatggctggaggatccaagagaggttagatccgtctgtctgtctgctaccttcttcaccttatctctgcagaagcccaggttgctcttgttctctccttctgtggttcatctgggggtccccctatcggtgggggtgcagctccaggatgtgccccgaggacaggtagtgaaaggatcagtgttcctgagaaacccatctcgtaataatgtcccctgctccccaaaggtggacttcacccttagctcagaaagagacttcgcactcctcagtctccaggtgcccttgaaagatgcgaagagctgtggcctccatcaactcctcagaggccctgaggtccagctggtggcccattcgccatggctaaaggactctctgtccagaacgacaaacatccagggtatcaacctgctcttctcctctcgccgggggcacctctttttgcagacggaccagcccatttacaaccctggccagcgggttcggtaccgggtctttgctctggatcagaagatgcgcccgagcactgacaccatcacagtcatggtggagaactctcacggcctccgcgtgcggaagaaggaggtgtacatgccctcgtccatcttccaggatgactttgtgatcccagacatctcagagccagggacctggaagatctcagcccgattctcagatggcctggaatccaacagcagcacccagtttgaggtgaagaaatatgtccttcccaactttgaggtgaagatcacccctggaaagccctacatcctgacggtgccaggccatcttgatgaaatgcagttagacatccaggccaggtacatctatgggaagccagtgcagggggtggcatatgtgcgctttgggctcctagatgaggatggtaagaagactttctttcgggggctggagagtcagaccaagctggtgaatggacagagccacatttccctctcaaaggcagagttccaggacgccctggagaagctgaatatgggcattactgacctccaggggctgcgcctctacgttgctgcagccatcattgagtctccaggtggggagatggaggaggcagagctcacatcctggtattttgtgtcatctcccttctccttggatcttagcaagaccaagcgacaccttgtgcctggggcccccttcctgctgcaggccttggtccgtgagatgtcaggctccccagcttctggcattcctgtcaaagtttctgccacggtgtcttctcctgggtctgttcctgaagcccaggacattcagcaaaacacagacgggagcggccaagtcagcattccaataattatccctcagaccatctcagagctgcagctctcagtatctgcaggctccccacatccagcgatagccaggctcactgtggcagccccaccttcaggaggccccgggtttctgtctattgagcggccggattctcgacctcctcgtgttggggacactctgaacctgaacttgcgagccgtgggcagtggggccaccttttctcattactactacatgatcctatcccgagggcagatcgtgttcatgaatcgagagcccaagaggaccctgacctcggtctcggtgtttgtggaccatcacctggcaccctccttctactttgtggccttctactaccatggagaccacccagtggccaactccctgcgagtggatgtccaggctggggcctgcgagggcaagctggagctcagcgtggacggtgccaagcagtaccggaacggggagtccgtgaagctccacttagaaaccgactccctagccctggtggcgctgggagccttggacacagctctgtatgctgcaggcagcaagtcccacaagcccctcaacatgggcaaggtctttgaagctatgaacagctatgacctcggctgtggtcctgggggtggggacagtgcccttcaggtgttccaggcagcgggcctggccttttctgatggagaccagtggaccttatccagaaagagactaagctgtcccaaggagaagacaacccggaaaaagagaaacgtgaacttccaaaaggcgattaatgagaaattgggtcagtatgcttccccgacagccaagcgctgctgccaggatggggtgacacgtctgcccatgatgcgttcctgcgagcagcgggcagcccgcgtgcagcagccggactgccgggagcccttcctgtcctgctgccaatttgctgagagtctgcgcaagaagagcagggacaagggccaggcgggcctccaacgagccctggagatcctgcaggaggaggacctgattgatgaggatgacattcccgtgcgcagcttcttcccagagaactggctctggagagtggaaacagtggaccgctttcaaatattgacactgtggctccccgactctctgaccacgtgggagatccatggcctgagcctgtccaaaaccaaaggcctatgtgtggccaccccagtccagctccgggtgttccgcgagttccacctgcacctccgcctgcccatgtctgtccgccgctttgagcagctggagctgcggcctgtcctctataactacctggataaaaacctgactgtgagcgtccacgtgtccccagtggaggggctgtgcctggctgggggcggagggctggcccagcaggtgctggtgcctgcgggctctgcccggcctgttgccttctctgtggtgcccacggcagccgccgctgtgtctctgaaggtggtggctcgagggtccttcgaattccctgtgggagatgcggtgtccaaggttctgcagattgagaaggaaggggccatccatagagaggagctggtctatgaactcaaccccttggaccaccgaggccggaccttggaaatacctggcaactctgatcccaatatgatccctgatggggactttaacagctacgtcagggttacagcctcagatccattggacactttaggctctgagggggccttgtcaccaggaggcgtggcctccctcttgaggcttcctcgaggctgtggggagcaaaccatgatctacttggctccgacactggctgcttcccgctacctggacaagacagagcagtggagcacactgcctcccgagaccaaggaccacgccgtggatctgatccagaaaggctacatgcggatccagcagtttcggaaggcggatggttcctatgcggcttggttgtcacgggacagcagcacctggctcacagcctttgtgttgaaggtcctgagtttggcccaggagcaggtaggaggctcgcctgagaaactgcaggagacatctaactggcttctgtcccagcagcaggctgacggctcgttccaggacccctgtccagtgttagacaggagcatgcaggggggtttggtgggcaatgatgagactgtggcactcacagcctttgtgaccatcgcccttcatcatgggctggccgtcttccaggatgagggtgcagagccattgaagcagagagtggaagcctccatctcaaaggcaaactcatttttgggggagaaagcaagtgctgggctcctgggtgcccacgcagctgccatcacggcctatgccctgtcactgaccaaggcgcctgtggacctgctcggtgttgcccacaacaacctcatggcaatggcccaggagactggagataacctgtactggggctcagtcactggttctcagagcaatgccgtgtcgcccaccccggctcctcgcaacccatccgaccccatgccccaggccccagccctgtggattgaaaccacagcctacgccctgctgcacctcctgcttcacgagggcaaagcagagatggcagaccaggcttcggcctggctcacccgtcagggcagcttccaagggggattccgcagtacccaagacacggtgattgccctggatgccctgtctgcctactggattgcctcccacaccactgaggagaggggtctcaatgtgactctcagctccacaggccggaatgggttcaagtcccacgcgctgcagctgaacaaccgccagattcgcggcctggaggaggagctgcagttttccttgggcagcaagatcaatgtgaaggtgggaggaaacagcaaaggaaccctgaaggtccttcgtacctacaatgtcctggacatgaagaacacgacctgccaggacctacagatagaagtgacagtcaaaggccacgtcgagtacacgatggaagcaaacgaggactatgagtacgatgagcttccagccaaggatgacccagatgcccctctgcagcccgtgacacccctgcagctgtttgagggtcggaggaaccgccgcaggagggaggcgcccaaggtggtggaggagcaggagtccagggtgcactacaccgtgtgcatctggcggaacggcaaggtggggctgtctggcatggccatcgcggacgtcaccctcctgagtggattccacgccctgcgtgctgacctggagaagctgacctccctctctgaccgttacgtgagtcactttgagaccgaggggccccacgtcctgctgtattttgactcggtccccacctcccgggagtgcgtgggctttgaggctgtgcaggaagtgccggtggggctggtgcagccggccagcgcaaccctgtacgactactacaaccccgagcgcagatgttctgtgttttacggggcaccaagtaagagcagactcttggccaccttgtgttctgctgaagtctgccagtgtgctgaggggaagtgccctcgccagcgtcgcgccctggagcggggtctgcaggacgaggatggctacaggatgaagtttgcctgctactacccccgtgtggagtacggcttccaggttaaggttctccgagaagacagcagagctgctttccgcctctttgagaccaagatcacccaagtcctgcacttcaccaaggatgtcaaggccgctgctaatcagatgcgcaacttcctggttcgagcctcctgccgccttcgcttggaacctgggaaagaatatttgatcatgggtctggatggggccacctatgacctcgagggacacccccagtacctgctggactcgaatagctggatcgaggagatgccctctgaacgcctgtgccggagcacccgccagcgggcagcctgtgcccagctcaacgacttcctccaggagtatggcactcaggggtgccaggtgtga

SEQ ID NO: 1301 - DNA, 1465 bp, Homo sapiens
  SIMILAR (727)..(1200): 481254mologous to Homo sapiens uracil DNA glycosylase,accession number X53778,Smith-Waterman Score=197.
tgcccagatcagcccccagagcagcctcatggctggaggatccaagagaggttagatccgtctgtctgtctgctcctcctgttcgacagtcagccgcatcttcttttgcgtcgccagccgagccacatcgctcagaacacctatggggaaggtgaaggtcggagtcaacggatttggtcgtattgggcgcctggtcaccagggctgcttttaactctggtaaagtggatattgttgccatcaatgaccccttcattgacctcaactacatggtttacatgttccaatatgattccacccatggcaaattccatggcaccgtcaaggctgagaacgggaagcttgtcatcaatggaaatcccatcaccattcttccaggagcgagatccctccaaaatcaagtggggcgaatgctgggcgctgagtacgtcgtggaagtccacttggcgtcttcaaccaaccatggaagaaggctggggctcattttgcaggggggagccaaaaggggtcatcatctctgccccctcttgcttgatgccccccatgttcgtcatggggtgtgaaccattgagaagtattgacaacagcctcaagatcatcagcaatgccttcctgcaaccaccaacttgcttagcaacccctggccaaaggttaattccatgacaactttgggtaatcgtgggaaggactcattgaccacagttccatggccatcactggcaacccaagaaagactgtggattggcccctcccggggaaaactgtggccgtggatgggccgcggggctcttccagaacatcatccctgggcctctactgggcgctgcccaaggcctgtgggcaagggtcatccctaaggctgaacgggaaagctcactggcaatggcctttccggtggtccccaactgccaaaacgtgtccagtggtggaccttgacctgccgttctagaaaaaccttgccccaatatgattgacatcaaggaagggtggtgaagcaggccgtcggaggggccccctcaaggggccatcctggggctacactgaggcacccaggtgggtctcctctgactgtaacagcggacccccagtctttccaccttttgacgctggggcatggcattgcccctcaacgacccactttgtcaagctcatttcctggtatgacaacgaatttggctacagcaacagggtggtggacctccatggcccacatggcctccaaggaagtaagacccctgggaccaccgagccccaagcaagaggcacaagaggaagagacgagaccctcactgctggggagtccctgccacactcagacccccaccacactgaatctcccctcctcacagttgccatgtagaccccttgaagaggggaggggcctatgggagccgcaccttgtcatgtatccatctaataaagtatccctgtgctcaaccaaaaaaaaaaaaaaaaaaaaaaaaccc

SEQ ID NO: 1302 - DNA, 677 bp, Homo sapiens
  SIMILAR (103)..(462): 381254mologous to Homo sapiens C57A derivative of antigen non -specific human GIF,accession number AAW12088,Smith-Waterman Score= 138.
accacagtggtgtcgagaaagtcaggcacgtagctcagcggcggcccgcggcgcgctgcgtcatgtgcctctagcgcgggtctcctggtccttttgccattcatgccgatgcttcatcgtaaaacaccaaacttcaccgggcctcccttcccgaaggggttcctctcgaagctcatcccagcaactggcgcaggccaaccggcaagccccccccaattaattcgcgttcaacgtgttcccggaccaagtttaattctttcggcggctccagcgagccgtgcgcgctgctgcagcctgcacagcatcggcaagatcggcggcgcgccagacccggctccctacagcaagctgctagtgcggccctgctggccgaagccgcctgccgattcaagcccggaccagggtctaacatcaactatttacgacatgaaccgcggccaaatgtgggctgggaacaacttccacctttcgccttaagagcctgcagggaacccacgctgtctggcgctgggctccacccgggaaacccggccggaacgcctgtgttgctaggccccgcccaccccaacctttcttgttggggaagaaataaaacggtgtagaggctaaaaaaaaagaaaaaaagacaagagagggggcccaccttacggaaaatttttgtcgcgaggggggaaaat

SEQ ID NO: 1303 - DNA, 470 bp, Homo sapiens
  SIMILAR (6)..(236): 791254mologous to Mus musculus putative,accession number AK010636,Smith-Waterman Score=304.
agaagaggccgcgaccggagagaaaaagcggagtcgccaccggatagaagtcgactccctagcagcagccgccgccagagaggcccgcccaccagttcgcccgtccccctgccccgttcacaatgcagcctgcttctgcaaagtggtacgatcgaagggactatgtcttcattgaattttgtgttgaagacagtaaggatgttaatgtaaattttgaaaaatccaaacttacattcaggtaagttaagctttttatccaatgatgtaaaatagtcattcacacaactgaataactttgactggcttgtcttttcattgaagttattattaatctttgtctctttgaagaggcttaattctttctttattattttatacagctgtctcggaggaagtgataattttaagcatttaaatgaaattgatctttttcactgtattgatccaaatgtaagtagtctttatgcttt

SEQ ID NO: 1304 - DNA, 1746 bp, Homo sapiens
  SIMILAR (33)..(605): 391254mologous to Mus musculus putative,accession number AK010636,Smith-Waterman Score=208.
  misc_feature (1)...(1746): n = a,t,c or g
ccgggcattttgctgcgtcaccagccgccgcccggcctcaccacccctcgtttgcacgcacgcacgttcattctccgtcctcgcgccccttttcctacactttcctcttctccccgaccggaggagccgctctttccgcgcggtgcacttctggggcccgaggtcgagcccgccgcatgccgccgttcgcctgagggaagcgagaagaggccgcgaccggagagaaaaagcggagtcgccaaccggagagaagtcgacctcccctagcagcagccgccgccagagaggcccgcccaccaaggttcgccgtccccctgccccgttcacaatgcagcctgcttctgcaaagtggtacgaatcgaagggactatgtcttnaaatgggaatttgtgtttttgaacacattaagggatgttaaatgtaaatttttgaaaaatccaaaacttacaatttcagttgtctccgggagggaagtgataatttttaaggcatttaaatggaaatttgatctttttcacctgtattgattccaaatgatttccaaggcttaaaaggaacggacagatcaatttttatgtttgttttacggaaaaggagaatctgggccagttcatggccaaagggtttaacaaaaggaaaggggcaaaggtttaatttgggtttagtgtcgacttcaataaattgggaaagactgggaagatgattcagatgaagacatgtctaattttgatcgtttctctgagcatgatgaacaacatgggtggtgatggaagtggtagattacccagaagtagatgggagcagatgatgattcacaagacagtgatgatgaaaaaatgccatatctggagtaaggaatattgtcatcacctggattttgagaaagaaaaataacttctctgcaagatttcataattgagagaattcctgagttgatcctgagttgatagctctaaaggcagatatgctgtatttgcccactttaacccatttttcaaccctgttgtgttttaaaaaggcttcactaaagggttgatatgtaccattgtatggggcaatttttaagtcagcttaaggcaataaaccttatgccatgaacattttcccaggactttcatgaagctgttgaggtcctaggcaatttaatgcagcagttgcgattaaattaaaaacatctccacctaagtctccttttcttcataacatagatactgacatggataggaagctctcagctttaggggaaagagaataaatttttagattataggaacatgggattcaaaagtgactgggaacaaattgggctgacacctttactgggtaacctgctatttcttctgggtgttatccttcaggattggtttccactaaaattttatttttcaaaaaaatttacttcacattaattctatggtaagtgatgacttgtccagtgttccaggtgtaatcttagctaaaaactagagaatggccctaacttaggatggttttttgaggcctataccaattggtaattgtttggaccccttaaggctttttaccatctcttaggcatgggagggacggaggaaaggctgttaccattgtttgctttgaggagtctgtacatttagtcccagatttgtatttgcactgtcagtatggcacatgagcgaaaacacgtttcataccctactggatctcttatttcgctttttttgaatccgactaatacccgccctgggacacactgtcgtttacgtc

SEQ ID NO: 1305 - DNA, 388 bp, Homo sapiens
  SIMILAR (201)..(386): 961254mologous to Homo sapiens putative prenylated protein,accession number Y13374,Smith-Waterman Score=340.
aagcgtggagcagcgatggacggtcgggtgcagctgataaaggccctcctggccttgccgatccggcctgcgacgcgtcgctggaggaacccgattccctttcccgagacgtttgacggcgataccgaccgactcccggagttcatcgagcagacgggctcctacatgttcgtggacgagaacacgttctccagcgacgccctgaagacctgcgctgccacagtcattgccatccatcgcatcccaccgacagactgctgctcctagtgatctggactcacctcggaggtatctgggctggccacagtccctggacagtgattcagacagctggccgccccccaagggatctgtcaccttcagcgagacctatttcctccccaccccc

SEQ ID NO: 1306 - DNA, 511 bp, Homo sapiens
  SIMILAR (105)..(308): 981254mologous to Homo sapiens putative prenylated protein,accession number Y13374,Smith-Waterman Score=380.
ctcacagggcccgccctgcagtgggtgatcccctacatcaagaaggagagccccctcctcaatgattaccggggctttctggccgagatgaagcgagtctttggatgggaggaggacgaggacttctaggccgggagaccctcgggcctgggggcgggtgctctggggagggtccgctgtgttactggccgccgccagggtcgccaccggcgccctccctccgcgcctccctccccctcgagccgccgcgatgtcccctgcgctcctgttccctcccgcgtagtgcttgcctttgttccaggtgttcctggcagccaaatcgagtctctcattttctcttgtggaccagttagttttgcccataacgcagtattctgagtttgcaactgtctctctgatgtgtgccttttgttcaacacagtaacccctgcactctgctctgctctaatacactacctggagaaagtcttttccttattttcaataaatgtcagacattattgaaaagaaa

SEQ ID NO: 1307 - DNA, 1542 bp, Homo sapiens
  misc_feature (1)...(1542): n = a,t,c or g
caagccagagctttcttcagctctcttctaaactgcctttnagacccacggggcaaatgaaccttctttccctccctccacagggacccccctcaagcttttccttctctgccccctaccaggctggccacccccagggaaggcccctgagacctcccagccccatgccccctgcccctcacctggaccagacccagtgggcttgtctgaagttccacttactgctctcctagatactcagtcaaaaacaattggttcagggccagctggatcagtttaaaggaaaatgaacctcccagactctggttttgtgttggggggagggggtacaggtccgggtgcaccatgtagctatgttgcaagctttgacaagtctttacccattctggcctgtttttcaggattagggatgagcaattttgccaataatgtctattccacactgttttttagtagtggaaaagtaggaaataaatgaaccatctgagactcagggattggagagcagtctgtgtggtatgggcccgttcctatagtctatcttcagggtggctgtgagtggggtcagggtcggtctgtggggctgcctacagggtctggtctgagggagccactgaggtgctcacagcagcgatcggggactggcatgtccttcattcttctgtgttttcgattttcttgtaaaggggattcattgcttttacaacatcaaaaaccaataaacacagaaagcaaggaaaaatctagagactcaccaaacgcccggaaaccttccccaggaggcatcccaaattgccaacactcaaaacgccagtggcaggagctactcctctttcacccagtcatcccgactggccagttttcaacccaatccccctgacaaaccgcacgtagccgcctcttcagcttcagctgcggcagccttcccgcagctgtccggagaccacacagggccctgcaatcagctccgaggcagaactgcccgtgcgctcacctcccccaccgtttcgcctcttccccacccctgagctgggctaagcagacagtggccataagaggtggaagggacttcaaggacaccttttttcaaggcggaagggcaaaagggggaaaagttaaggaagggaagacggagggcccttgctccccgtcaagaagaacccgtatccttcccccatactcacgcctggagtcagggccagtgcactggggtgaacaggggccaaacaggaaatcgtggccgcctccaaatctacctgatcagggtttttgacaggagagggaggaggcaatgggccacattccatctccaccagggataaggcagaggcaccggacttcagtccaggagtgaggctccgagattaaacccaaataatgcccggagccggggaaggctttcaaccctaggccctgggggctgggtttgaccagagaccccttcctcttcactcacagaagtctcgccaggacagctagaacacaggctagggcatgaaggggaggagatgttcactccagaccccagcatccccaagattc

SEQ ID NO: 1308 - DNA, 550 bp, Homo sapiens
  SIMILAR (172)..(372): 921254mologous to Homo sapiens Human secreted protein, SEQ ID NO: 6148,accession number AAG02067,Smith-Waterman Score=325.
accacccggctttgtgggcggagtccatgagagggttggagccccgctcgtggcaccgcccacccaagcctaggccggccttcgtggacacgcatttccggcgacgcctcggtactgacctctgcagagccgggtggagcccattgacgtccagcgaagcgaggagcagcgatggacggtcgggtgcagctaataaaggccctcctggccttgccgatccggcctgcgacgcgtcgctggaggaacccgattccctttcccgagacgtttgacggcgataccgaccgactcccggagttcatcgtgcagacggcctcttaccccctcgtgggcgagaacacgttcttcagcgagacctatttcctccccacccccagaaacctcttgtgttcttgcctaggcccaggtgttcctggcagccaaatcgagtctctcattttctcttgtggaccagttagttttgcccataacgcagtattctgagtttgcaactgtctctctgatgtgtgccttttgttcaacacagtaacccctgcattctgctctgctc

SEQ ID NO: 1309 - DNA, 1504 bp, Homo sapiens
  SIMILAR (491)..(1138): 431254mologous to Homo sapiens putative prenylated protein,accession number Y13374,Smith-Waterman Score=279.
  misc_feature (1)...(1504): n = a,t,c or g
tttgtgggcggagtccatgagagggttggagccccgctcgtggccccgcccacccaagcctaggccggccttcgtggacacgcatttccggcgacgcctcggtactgacctctgcagagccgggtggagcccattgacgtccagcgaagcgaggagcagcgatggacggtcgggtgcagctgataaaggccctcctggccttgccgatccggcctgcgacgcgtcgctggaggaacccgattccctttcccgagacgtttgacggcgataccgaccgactcccggagttctatcgtgcagacgtgctcctacatgattcgtggacgagaacacggttctccaagcgacgccctgaaaggtgacgttcctcatcacccgcctcacagggcccgccctgcaagtgggtgatcccctacatcaagaaggagagccccctcctcaattgattaccggggctttctggcccgagatgaagcgagtctttggatggggaggaggacgaggactttttaggccgggagaccctcggggcctggggcgggggtgctctggggagggtccgctgtgttactggccgccgccagggtcgccaccggcgccctcctttccgcgcctctccccccctcgagccgcccgcgatgtcccctgcgctcctgttccctcccgcgtagtgcttgcctttgttccaggaatagcgctccaggctcctgctgccgcccctgggcctcactctggagcgagccgccgccctctccttccagccagccagcccctcccatgtacatttggacgctgtcctgcgctccagttgcacaaagctgagctcctgttacacactggacagaccacccactgccgccgctgccaagccctctcctccccaccagactgccagacgacttacatcattttggcccacagaccctgcgctgccaaaagccatcgcccatccatcgcatccccaccgacaagactgctggctcctaagtgaatctggactcaacctcggaggttatctgggctggccaacagtccctggactagtgatccagatcagctggccgctcccccaagggatctgtcaccttcagcgagacctatttcctccccaatcccagagactttttgtgctcctgccacatggctgccagggctcagttgtgcctggcaagccaaattcgagtctctcattttctctttgtggaccaagttagtttttgcccataaacgcagtatttcttgagtttgcaactgtctctctgatgtgtgccttttgttcaacacagtaacccctgcattctgctctgctctaaatacactacctggagaaaagtattttccatattttcaataaatgtcagagcattattgagnnnnnnnnnnnnnnnnnnnnnnnnnnnnnnnnnnnntttttgggggggggcccggcccccaattcccctttagggggggggataaaaaattccggggccggggtttaaaaaccgcggaaaggggaaaaaag

SEQ ID NO: 1310 - DNA, 288 bp, Homo sapiens
  SIMILAR (2)..(106): 1001254mologous to Homo sapiens glia maturation factor homologous protein,accession number AB001993,Smith-Waterman Score= 173.
agaaaagctgaggaaattccgcttccgaaaagagacagacaatgcagccatcataatgaaggtggacaaagaccggcagatggtggtgctggaggaagaatttcaggtgttcgaaatccgcaccactgatgacctcactgaggcctggctccaagaaaagttgtctttctttcgttgatctctgggctggggactgaattcctgatgtctgagtcctcaaggtgactggggacttggaacccctaggacctgaacaaccaagactttaaataaattttaaaatgcaaa

SEQ ID NO: 1311 - DNA, 381 bp, Homo sapiens
  SIMILAR (1)..(189): 981254mologous to Homo sapiens glia maturation factor homologous protein,accession number AB001993,Smith-Waterman Score= 307.
  misc_feature (1)...(381): n = a,t,c or g
ttggtggtgtncgaggtagacccagagctaacagaaaagctgaggaaattccgcttccgaaaagagacagacaatgcagccatcataatgaaggtggacaaagaccggcagatggtngtgctggaggaagaatttcagaacatttccccagaggagctcaaaatggagttgccggagagacagcccaggctgcaacggnanacaacagatgatgtatgcagggagtaaaaacaggctggtgcagacagcagagctcacaaaggtgttcgaaatccgcaccactgatgacctcactgaggcctggctccaagaaaagttgtctttctttcgttgatctctgggctggggantgaattcctgatgttttgagtcctcaaggtt

SEQ ID NO: 1312 - DNA, 961 bp, Homo sapiens
  SIMILAR (18)..(167): 1001254mologous to Homo sapiens glia maturation factor homologous protein,accession number AB001993,Smith-Waterman Score= 249.
ctgtggacagaacaatcatgtctgactccctggtggtgtgcgaggtagacccagagctaacagaaaagctgaggaaattccgcttccgaaaagagacagacaatgcagccatcataatgaaggtggacaaagaccggcagatggtggtgctggaggaagaatttcaggttcgtggtttacagctacaagtacgtgcatgacgatggccgagtgtcctaccctttgtgtttcatcttctccagccctgtgggctgcaagccggaacaacagatgatgtatgcagggagtaaaaccaggctggtgcagacagcagagctcacaaaggttcagactgggatgtggctccagagtgttagggagaggtggtgtgggtcctgggtctgagggaagagggactagagtcctcactgtctcagtggtttttgtgtttgtatttttttttttaaagaactgggtctcgctctgtcatccaggctggagtgcagtggcacaacctcggctcactgcaacctccttcttcttggggtccagccaattctccggcttcagcctcccaagtagtgggacgacaggcacacgccaccacacctggctactttttgtatttttagtagagtcagggtttcaccatattggccaggctggtctcgaactcctgaccttaagtgatccacccacctcagcctcccaaagtgctctcttacaggtgagccaccgtgcccagccactgtctcagtgtttgagtagatcataatgccgagacctctctctgcccaggtgttcgaaatccgcaccactgatgacctcactgaggcctggctccaagaaaagttgtctttctttcgttgatctctgggctggggactgaattcctgatgtctgagtcctcaaggtgactggggacttggaacccctaggacctgaacaaccaagactttaaataaattttaaaatgcaaaaa

SEQ ID NO: 1313 - DNA, 756 bp, Homo sapiens
  SIMILAR (161)..(598): 581254mologous to Homo sapiens glia maturation factor homologous protein,accession number AB001993,Smith-Waterman Score= 315.
gaaagggcataaacaggatgtggtgttggatgaaaccttgctcctactgcacagcccgcccccctacagccccggtccccacgcctagaagacagcggaactaagaaaagaagaggcctgtggacagaacaatcatgctcttcctgggtccctccggcagtctgactccctggtggtgtgcgaggtagacccagagctaacagaaaagctgaggaaattccgcttccgaaaagagacagacaatgcagccatcataatgaaggtggacaaagacccggccagatggtggtgcctggagggaaagaatttcaagaacatttccccccagagggagcttcaaaatgggatttccccggagagacaagcccagggttcgtggtttacagcttacaagtacgtgcatgacggatggcccgagtgtcctacccttttgtgtttcatctttcctccacgccctgtgggctgcaagccggaaacaacagatgatgtattgcagggagttaaaaacaggctggtggcagacagcagagctcacaaaaggtgttccgaaatcccgcaccacttgattgacctcactgaggccttggcttccaagaaaagttgtccttcctttcgttgatctctggggctggggactgaattcctgatgtctgagtcctcaaggtgactggggacttggaacccctaggacctgaacaaccaagactttaaataaattttaaaatgcgaaaaactcggaaaaaaaaaaaaaaaaaa

SEQ ID NO: 1314 - DNA, 2455 bp, Homo sapiens
  SIMILAR (971)..(1840): 361254mologous to Caenorhabditis elegans contains similarity to TPR domains,accession number U64842,Smith-Waterman Score=467.
tgaaattcttctctgtccatccttacccttcaactgtcagtatattcttgttcttcttggaagcagaataagagctcgggaaccgccaatggcagtacaagctgtaacacagggtccaccaaaatatactaaatctgttctgaaaaagggagataaaaccaactttcccaaaaagggagatgttgttcactgctggtatacaggaacactacaagatgggactgtttttgatactaatattcaaacaagtgcaaagaagaagaaaaatgccaagcctttaagttttaaggtcggagtaggcaaagttatcagaggacatgtagctaggaagtttttagatgatgaagcagaactttctgaagaagatgcagaatatgtttcatcagatgaaaatgatgagtcagaaaatgaacaagattcctcattacttgactttttaaatgatgaaactcaactttcacaggctataaatgcttggtttgcctgtaaatcaccatcaatcatctgtgtagatgatgaagttgtatcttctgtatgtgctttcttttcctctggttcttctgatctatataaaacgtcagaatggaaactttcaaaactcccacagtttcttgcagaacataaattattaggaaacattaaaaatgtggccaagacagctaacaaggaccacttggttacagcctataaccatctttttgaaactaagcgttttaagggtactgaaagtataagtaaagtgtctgagcaagtaaaaaatgtgaagcttaatgaagataaacccaaagaaaccaagtctgaagagaccctggatgagtttattcagttgcgaagggaattagcttctgtaaatggtcatagtggtgatgatggtcctcctggtgatgatctaccatcgggaattgaagacataaccgatcctgcaaaggtaaccagtcttattctaaagttcgtcagtggccagctaattacagaaatagaaaacatgagacatagaatcattgagattcatcaagaaatgtttaattataatgagcatgaagttagtaaaaggtggacatttgaagaaggtattaaaagaccttactttcatgtgaaacctttggaaaaggcacaactaaaaaactggaaagaatacttagaatttgaaattgaaaatgggactcatgaacgagttgtggttctctttgaaagatgtgtcatatcatgtgccctctatgaggagttttggattaagtatgccaagtacatggaaaaccatagcattgaaggagtgaggcatgtcttcagcagagcttgtactatacatctcccaaagaaacccatggtgcatatgctttgggcagcttttgaggaacagcagggtaatattaatgaagccaggaatatcttgaaaacatttgaagaatgtgttctaggattggcaatggttcgtttacgaagagtaagtttagaacgacggcatggaaatctggaagaagctgaacatttgcttcaggatgccattaagaatgccaaatcaaataatgaatcttcattttatgctgtcaaactagcccggcatcttttcaaaatacagaaaaaccttccaaaatcaagaaaggtgcttttggaagcaatcgaaagagacaaagagaacacaaagttatacctcaatttacttgaaatggaatatagtggtgacctcaaacaaaatgaagaaaatatcctaaattgttttgacaaagctgtacatggttcattacctattaaaatgagaattacattttctcagagaaaagtggaatttcttgaagattttggttccgatgttaataaagctgtaactgaagttcgtgaagtcaccagaaaatcagtccctcgtaattccttagaaagtgctgagtaccttaaactcataactggcttattaaatgcaaaagactttcgtgatcgtattaatgggattaagcagcttttatcagatacagaaaataatcaagaccttgttgttggaaacattgtgaagatttttgatgcttttaaatctcgacttcatgattctaatagtaaagtaaatctggtggctctggaaacaatgcacaaaatgattcctctacttagagaccacttatctcctataatcaacatgctaattccagcaatagtggataacaatctgaattccaagaatccaggcatctatgcggctgctacaaatgttgttcaggcactgagtcagcatgtaggagacacatcaaggatgtttaggagaacaaagagctatgacagcctgctgactaccttaattggcgctggaatccgaattcttttcagttcctgccaagaagaaaccgcagatttgctaaaggaactgtctttagtggaacaaagaaagaatgttggtattcatgttccaacagtggtgaatagtaataaaactcacttcaagaaatctccatgtatgcacaagtaa

SEQ ID NO: 1315 - DNA, 1011 bp, Homo sapiens
  SIMILAR (169)..(363): 611254mologous to Homo sapiens rapamycin binding protein,accession number M96256,Smith-Waterman Score=190.
atggttgataaatgtcgctaccatcagaggtcgcttcacaaggtgtctaattcagaatcgaagatctctagcggtcttctactcagtcgactgcagagacgaccgcgggggcggggcgatgccgaactgcggcgggctggctcagtaaagcggaggcagcgggggaagatggcggcggccgttccacagcgggcgtggaccgtggagcagctgcgcagtgagcagctgcccaagaaggacattatcaagtttctgcaggaacacggttcagattcggctgtgcaacaagttattactaacctgctaattgggcagatagagcttcgttctgaagattctccagatattttgacatattctcatgaaagaaaagttgaaaagcttattgttccgcttggtgaagaacttgcagccatccaaaagacctatatccagattcctgaacaagatgaaacctatttagaggatagtttttgtgttgatgaagaggagtcttgcaaaggccaatcaagtgaagaagaagtttgtgttgattttaacttaataactgatgattgctttgcaaatagtaaaaagtataaaactcgacgtgcagtaatgctaaaagaaatgatggaacaaaattgtgcacattcaaaaaagaaattatccagaattattttaccagatgattcaagtgaggaggagaacaatgtaaatgataaaagagaatctaatattgcggttaacccaagcactgttaagaagaacaaacaacaggaccattgtttaaattcagtgccttctggatcttctgcgcagtccaaggtgcgttctactccaagagttaatccattagcaaagcagagcaaacagacatcgctgaatttaaaggatacaatttccgaagtctcagacttcaaacctcagaatcataatgaagtccagtctaccacaccacccttcactactgttgattcacagaaagactgtagaaaatttccagttccacagaaggttctctcagaatga

SEQ ID NO: 1316 - DNA, 2044 bp, Homo sapiens
  SIMILAR (169)..(249): 961254mologous to Mus musculus 25 kDa FK506 binding protein FKBP25,accession number AF135595,Smith-Waterman Score=131.
atggttgataaatgtcgctaccatcagaggtcgcttcacaaggtgtctaattcagaatcgaagatctctagcggtcttctactcagtcgactgcagagacgaccgcgggggcggggcgatgccgaactgcggcgggctggctcagtaaagcggaggcagcgggggaagatggcggcggccgttccacagcgggcgtggaccgtggagcagctgcgcagtgagcagctgcccaagaaggacattattcaagtttctgcaggaacacggttcagattcgttacttgcagaacataaattattagggaaacattaaaaatgtgggcaagacagctaacaaggaccacttgggttacagccgtataaccatctttttgaaactaagccgttttaagggtacctgaaagtatgaagtaaagtgtctgagcaagtaaaaaaatgtgvasgcttaatgaagataaacccaaaagaaaccaagtctgaaagagacccctggaatgaggggtccaccaaagatatactaaatcctgttcctgaaaaaggggagataaaacccaacttttcccaaaaaggggagatgtttgttcacttgctggtattacagggaacactaccaagatggggactgttttttgatacctaatattccaaacaagtgcaaagaagaaggaaaaatgcccaagcctttaaggttttaaggtccggagtaggccaaagttatccagaggatggggatgaagctctcttgactatgagtaaaggagaaaaggctcgtactggagattgaacccggaatgggccttccggaaagaaaggactgcctgatgccaaaattcccaccaaatgcaaaactcacttttgatagtggaaattagtggatattgattgaaataggcagtgcttcagcctctaagggttattagcaaaccaaatgggataaaactttgggccccttgaagaaaatttacaccaactagttagaacttgttactattgtaaaggaagagtcaactggaaaattcaaggagttaataaaatttgtttacttggtcccagcttttgagagataaatcccttatgaatccctggtctaaaatactttcctacagctgtgtaaaatactggatcaaggagaactttttccttttacctcatgttgtaaacttaagaagctcaataaaaattgatccaactgtcttgatctgactgtgatttgtttggtgttaatatattattgttctgattagggaattggaactaaggacctcatcaaaccagggagtaactcccagtaaaattatctggacagattgcctgtataatgagaaggcaaaagcataaggcttgaggggaaacaaaatgctaaaagcagaaaaatcttggcaggaagatcaagacctgaatttagaaaaggtgtacttcaaaaccaatgagccactaataaaggtgaacataaggttaatattactaattgatccccctcaaaataaattcataaacaattactggatgagtcttccgttttattacaaaaatgaagatcagtttgatcaaaatgaaagcttgttcacaagttttacatgaatattctaaatacaaagtctcctgaaacaacatacttttgatatgattttcatttttaaagggatgcaaacattccattttctcatttataatctattccaaggcaaagtattttaataatgtatcctttctgcagttagatcacaattcacaagtataactgaaacagacaaaaccttgtcagcaaaggttaaaagtccttttttctttaaaaaaaaaaaaaaaaaaaaaagggggtaaatatccagcccttatgtgttttcagaattttgtactacactgacatgatttgcagtcaggtttttcttcctaccccttaaggctacaaaaattctgttgcaaatgcattgcaaaagaattctagaccacttaatgcaaaaatcaaaaaatagtttttcaataaaaagtaaattttataaatggtaggaaacagtatctgtggtaagctactaattgacatttt

SEQ ID NO: 1317 - DNA, 627 bp, Homo sapiens
  SIMILAR (466)..(510): 931254mologous to Homo sapiens ribosomal protein L29,accession number U10248,Smith-Waterman Score=69.
gcgctatacgagccgtggcttattgtgcagacatggcccagtccatgaaccacaccacactccaccagtcccgaatatggcacagaattggtatcaagaaaccccgatcacaaacagaccaatctcttacgggggtggaccccatgttcctgaagaacatgcgctttgccaagaagcacaacaacatgggcctaaagaggatgcaggccaacaatgccaaggccatgagtgcacgtgccgaggctatcaaggccctcgtaaagcccaaagaggcttatctctagattccaaacggtgtcagccgcaagctcgatccacttgcctacattgcccaccccaagcttgcgaagagggctctggcccgcattgccaaggggctcaagctgtgccggccagaggccttggccgaggccagggccaaggatcaaaccaaggtccagggtgtagccccagcttgagctctcagctcatgctcccaaacgtacccaggcccctacaaaggcttcagagtagacatctctgccaacatgatgacagaatgactggtgcgaccccccacccccgcccctgggctaccatctgcatggggctggggtcctcctgtgctatttgtacaaataaacctga

SEQ ID NO: 1318 - DNA, 640 bp, Homo sapiens
  SIMILAR (34)..(282): 481254mologous to Homo sapiens transformation-related protein,accession number L24521,Smith-Waterman Score=157.
  misc_feature (1)...(640): n = a,t,c or g
cttcttcttttttttttgagacagagtccgnctctgtcacccaggctggagtgcagtggagcgatctaggctcactgcaacctccggccacccgggttcaagcagttctcctgcctcagcctctcggagtagctggggattacaggcatgcgccacccacgccccagctaatttggttttggtattttaagtagagaccggggtttcaacttgtattggtccaggctggtcttgaacttcctgaccttgtgaatcccgcctgcctcggcctcccaaaagtgcctgggattaccaggtgtgagncccccacggccggccctatacaaagtttcttattgagaaaagtggttcccaatcatgttttttgccccctttagctggctatctcttggaacagaaaagtttgttaggaaggtaaaagttgctggactagggaccttacccacagggtgggcactctgttccttgtggaaatattaaatggcaagttaaaacaggttttgaacttcttaacttccagaagataggaggatgggacctgtgatactgtgcttgctggtgggaggaccctttccacatcaacatttgtgtgtatccttgcaataaacttccattgtgaatttaaaaaaaaaaaaaaaaa

SEQ ID NO: 1319 - DNA, 832 bp, Homo sapiens
  SIMILAR (126)..(632): 351254mologous to Homo sapiens ribosomal protein L29,accession number Z49148,Smith-Waterman Score=153.
  misc_feature (1)...(832): n = a,t,c or g
gcggtgcnattgaacgcctgcaggttcggatcgcgtgttcgtgccgcgacgcaattcctgggtcgagccacgcgtccgcccacgcgtccgaggcgcttcgggagccgcggcttaatggtgcagacatggccaagtccaagaaccacaccacaaacaaccagttcccgaaaatggcccaagaaatggtatcaagaaacccccgatcaccaaagatacgaattctcttaaagggggtggcccccccaagtttccttgaggaacattgcgctttgcccaaagaagcaccaacaaaaaagggccctaaagaagattgcaggccaacaaattgccaagggccatgagtgccacgtgcccaaggcttatcaaggcccctccgttaaaagccccaaggaggtttaagccccaagatcccccaaagggttgtcagccgcaagctcgatcggacttgccctacattgcccaaccccaaggtttgggaagcgttgctcgttgcccgtaattgccaaggggcccaaggctgatgcccgccaaaagcaaagggccaaggccaaggccaagccaaggccaaggatcaaaccaaggggttcaaaccaaggcccagggttcaagccccagtttcagtttcagttccaggctcccaaacgtacccaggccccttacaaaggcttcagagtagatatctctgccaacattgaggacagaaggactggtgcgaccccccaccccccgcccctgggctaccatctgcatggggctggggtcctcctgtgctatttgtacaaataaacctgaggcaggaataaaaaaaaaaaaaaaaaaaaaaaaaaagggc

SEQ ID NO: 1320 - DNA, 1064 bp, Homo sapiens
atagtaagaacccaattttatttagaaaccagcaagcagcgtatgcagttaagaacccaattttattacaatttgtacataaatgcccaggaaaagttggaaggtgctacattaaggtgttaagagtcgccatgggggtggctgatgtgagaatttaaggtgttttctctttaggataaaatatcctaccgcccccaggagtgaccacgtgaggctgcataatggccgtctctgtgtctgcaagtgatgtctgcagtgacgaacgcccggggtggtgagctctaatggccttctctgtgtctgcagtgatgtctgcagtgacgaacgcccggggtggtgagctctaatggccgtctctgtgtctgcagtgatgtctgcagtgacgaacgcccggggtggtgagctctcgactttagagagagaattgcatcctcctgagtacaagggcgcagtctgtgtttaatgcacagggcactgctctctggagttttcaggaccctgccactggtgaagggggtgccgggcatgggggtcggctgatgaggccctccttgctgccgagtcagggagcctctgcatgctgacgaggtttggagaatcgaaactggctccggtgggcaagtttcctaaaatgtgcctcctcgagttgcccttcctctcccaccatctgtcccgaggttgctccggtgcgagtgaaggacagctgtgccttcttgaggtgccagccacggccagggtgggggtgcacaagccgtcccagagccggggccttgaattctcctgggtcctcatgtccgacctttgctcagggccacccctgtgaacgtggtcagccacagacttgccatcagtgatgaacctgccctggcgctgcccgtggccccagctctggaggcgacatccttccgtctcccttgatctctgcagcatttggctcctttcatctcccttcatctctgcagcatttggctccttccgtctcccttcatctctgcagcatttggctctgtggctcttctgccctgaagctacagcagtgagaggggtggggacatgcaacgaaa

SEQ ID NO: 1321 - DNA, 452 bp, Homo sapiens
ctttcctgagctgtggcccggcagggaagatcgcctggacgtggagccagcatcgccccgtgccctcggcgtttgcatttgtaaacttgtggtcttcctatgtgtcagaaacaaactgtgtcttggggggggaagaccccttcgctgcgccgcttcccgccgcagcgcccgcgccctccgaggggacagccgccctctggagctcgctgggagcatcaccgcctggaacgaccgcgccgcggaggagccggcgcccatctccacccgcacggctcgccggtccagagccatgagccaagagccctcttcacgctgctaactccaggggacagacgaagggacatctttggaaaacgctggttttggtttttaaaaagcccaacttttttttttttaatttccataactaaagtgttcagactggagtgctctccttcaggcctcttcatagc

SEQ ID NO: 1322 - DNA, 2077 bp, Homo sapiens
aattcggcacgatgaggaaatggttactcattctgtataaaagttttgcaagagaatgaattttttattctgtaatcaaaaagcaataacttgaaattcactctgtaatattataggtcagaattatacaagttttaccaaattgttacacttattctccaagctgccagaacctggtatctgtatctgtaaaaccaaattaacttttgcttaaatgggaagtatacatatatctgtatagatacattacccctttacatgtttaacatacacacacttaaacacataaatactagtgtgattatatctttggagtttgcaatatagcataaaggacaagtagaactgcacattaagattacctaccgaagcaactagatgtggctgggacacaatcaaaggaggaattttgtccacaggaaggtgaggaaattccaaatgaagcctagatcttcagtatcataaaaaggcagagctggccaggcacagtggctcatgcctgtaatcttatcactttgggaggctgagatgggaggatctcttgagaccaggtgttcaagaccagcctcatcaacatagttgagaccccatctctattaaaaaaataaataggcagagctaaactaaccccagtgtcacaaaactcaactggtcatataaatgagtgaaacaggcctctcacacaagcgatgtaaaaccagctgggagcagtgggagctgtggcaaactaaagtgcccaagccgcatttaaaaagggcatctgttcagctccatctgcttgctgcggtgcaagaatgctaaaccaggattaccagttcttcacattttttgaaatccaaattttcatgagaaacattctcatttttaaatatcaagaagtgattttaaaatgtttaaatggtgctggttaaacaaacacgtctgcagctggatttagcttgcaagctgccaagttgcaacctcttttcattctaggaacttctgtcatttttcatcatagcaagtctatgcggacaaaaagcctccaaactttccaactggtgtaggcccagtacagctggcaagggtcattaggaatataatgggctatcccccctctgccaaataagactatccacaaccccagctcagacacagtggttatatgattttgtgtccatacaggagaggccttggtgtcttcacatacattctctgagccaacatctatccagcagccctgacctcctgctataatttaagtctatttccttttaatctaataaggagttgatagtaaaaagggcaggtgatgggaaatcagtgtattaatcacaatgggagtatattggggcaactccacagcttatagtttgataaaggcaaatacatgaaaaataaaaatgctactaatgccccaaggtgtctatcaaaatgatgtagggggtatcttaaactgtccaaggcaatcatgcattgaactttattcctatgcagagccaaaacgaatagtgttgataaaatagctaaactttctaaacctggagaggaggctaccagtgcccagagagttatggtctcttttggctttaaatggtaatcttaaaagtggccattgggctcttcctttgttttgggatagatatatatagagagagatactataaggaagtttatttcttaggaaagtgccactgaataaatgtatttcttttaccagtgtaatatgggggtggggatatgcggaaagaaatgtgtatttttgctagttgcctacccttctgagataaataagcacaatcttgccaatggatcccaataaccccagttagggtattcatagattagtatttcaagtttgcctgtagattgtgtgtgcgtgtgcctaagtaaaagttcccatgattcacaattttagtattaacccatgttgcaaaagctgttactggccaacagattgtaatgatgtgtaccatataacacaagcattaactaggcattaacgtttggtaaagccaaatatacccatgcagaagtcttcatttttaatagccagactgccttaaaacaagttaaatcttaaaaaaaaaaaaaaaaa

SEQ ID NO: 1323 - DNA, 433 bp, Homo sapiens
cgcagttagactcccagagccaggaagtaagttcccaaggtcacatcagaagccaactgcatggctgtgtgaggacccatgcctcctgccttccagggtaggggtctattccctaaaaccaccccttcaagcttaggaacccaggaggaccaggagtggttccagtggccatgataccagggatgaggggccacaaacccttctggttaactctcccattgggtagggctcaactctctctggacacattaatttctctacaatccttccttggctcgcggggctcatacagctcaaacaggaggaaaagcatctctgggagcaggcagcctcatgtgtctgattcgctgctcaattccaggcaaaactacaagaattactccatggagtcaaggacacactttcgaatccaggcagccacactccaagccaa

SEQ ID NO: 1324 - DNA, 6038 bp, Homo sapiens
  SIMILAR (656)..(1129): 341254mologous to Mus musculus putative,accession number AK016184,Smith-Waterman Score=298.
ggtggagacaccgcctcagggctcggtgcacagtggacatttggggagcgttgtgggtgacccccacacaggcactgggaatgcaggggagagggggccaagggggaaaggggccagagtgttggctttggattcaggagggatggattccagtcctagcttgccacttattaggactcctgagagcagcctccatgaggccctggaccagtgcatgaccgccctggacctcttcctcaccaaccagttctcagaagcactcagctacctcaagcccagaaccaaggaaagcatgtaccactcactgacatatgccaccatcctggagatgcaggccatgatgacctttgaccctcaggacatcctgcttgccggcaacatgatgaaggaggcacagatgctgtgtcagaggcaccggaggaagtcttctgtaacagattccttcagcagcctggtgaaccgccccacgctgggccaattcactgaagaggaaatccacgctgaggtctgctatgcagagtgcctgctgcagcgagcagccctgaccttcctgcagggttcctcacacggaggggcagtcaggcccagagccttgcatgatccctctcacgcctgcagctgcccacctgggccaggccgtcagcatcttttcctcctgcaggacgagaacatggtgagcttcatcaaaggcggcatcaaagttcgaaacagctaccagacctacaaggagctggacagccttgttcagtcctcacaatactgcaagggtgagaaccacccgcactttgaaggaggagtgaagcttggtgtaggggccttcaacctgacactgtccatgcttcctactaggatcctgaggctgttggagtttgtggggttttcaggaaacaaggactatgggctgctgcagctggaggagggagcgtcagggcacagcttccgctctgtgctctgtgtcatgctcctgctgtgctaccacaccttcctcaccttcgtgctcggtactgggaacgtcaacatcgaggaggccgagaagctcttgaagccctacctgaaccggtaccctaagggtgccatcttcctgttctttgcagggaggattgaagtcattaaaggcaacattgatgcagtgagtgatgggggtccgggccggggctggggatccctcggggtctcccagaccagcaggaagtcaggcacatgtgacatactcagggacaggatagactgggggcgggggggggggccaagagagaaccaaccagagagcaggggcaggagaggcccttctggcagagcagcctgggaagacaagggaggaggaggcatttgtggtgcctgggattttgactgggagatataggactgcagcattgcagtggagggaggtggagggaggtgcttgagggaggcagaggttaggaaagcccatctgtttagggcatgacgattaggctggagtctggtacctcccctccattatagctctctcctgctctttcattttgttactaaaaaccagagtcctaggcgggggctgtatttgagcccaacgtcatgtaagacttaggaggtaaaaccaggactggaggccagatctcctggctcctggggccccacctgagcctagcacagggctggaccactatgccctggaggagtcccggtctgctgtggtgttgggaggttcggaggatgcagaggggttggggctgggtgggcacccgtcaggctgaccagaaggtgcctgcaggccatccggcgtttcgaggagtgctgtgaggcccagcagcactggaagcagttccaccacatgtgctactgggagctgatgtggtgcttcacctacaagggccagtggaagatgtcctacttctacgccgacctgctcagcaaggagaactgctggtccaaggtgggctgatgccacgtgttaggggcattgggtgaccagggctgactgtgtgcctccagaccacgggccaaatccctaactgaacacagatgtctcagctggaatctaaacataaccttaaattctaataggactcaggcttggaaggaactaaagaccacaagagaaacttctgaaccacaatgtgtcacaaagagatttctagtcacaaaggacagaaacatggctccctctgtccagtagaactgtttctgtggtagaaatgttctacttatgcactgcccaaatatggtagtcaccagccacatgtgcacactgagcacatgaaatgtgcctagtgcaactgggaaactgattgttttcagttttatttaattttaattaactaaatgttaaatttaaatagccatgtagggcttgtggccactatattggactatgcaggtccaaaacacaaaaggctcatataactgaacattcttggcacatccgacttcaggtagggctggatccaggaattcaaatgatgtcgtctggcttggtctttccatttgtggctgtgctctctcctatgacatctttgtttctgctgcatctttgcaggaaggttctctccatgtgacaggcaaggtggccacgggctgcttctactcatatcctccccttggtttcaaccagagtcccacagtttgagcctcactggtctgacttgtcacctgccaatgcctggaacagaggggtgggaagattcctcatgggctgagagtaggagaggggtggttccacagaagaaaatgatgcacccagaaatagtggagggattaacaagatgccatacaggcaaaacaaagccaaacagatgcccgcctaccaaagatgaaatttatcatggtaagtattgaaataagtgttagcttgtaccatcatagtaatgatagtgcagaaattggaaccaagagtcttacaaccacctagctcagcaaacgtctaatctgttatttgtaaatacacaggacatgtgtcttcatggcttcatcccctgcccatggcagacattgctaatcaatcctctgccatgagcctagctgtgaccttagataccttccctgcaaagctccaggcagccgttagaactgacccacattggcacctgttaggagacctgtcatctgcatctggtccctccccctcctctgcatggaggtctcttccgtagccctgcctggggaccaagctgaaggggaattctctgggtctggggcaggtggggctggggaagggagcaggcttctactgagctctcaacatgtctggcacctgtcatgtcctccacaccacacccagtgaggagaagttattatctccattgggcacatgagggccactgatgctaagcgaggactgtgactttcccacccacatggctgttggtgacagacaccggatttgaggacagtcctgtgtgactcagaggcctctgcttctctcttgctcctagagtcctcctgaggagtcggggcttgccctgagcccaccctgctgttgaaggtgcttcctcaggcccagctcccatggcccccacaccccctcctcatcacctcctactcccaaaaaggacaaagcctcagggaaccttttttctttttttagagacggggtcttgctatgttggtcaggctggtcttgaactcctgggcccaggcaatcttcccgcctctgcctcctaaagtgctgggattctgggccttagggaacctttttgaactgaaagtgacgctcgaagccttcctgtagagtgaggtgggtggctggggctaaccatatggggaaggagagacctggtgggggcacacagctgctatatagaggaacagaaggtgggccaggcctcccagctgtcaggaaatctggctcagtccccagaccgctgtgtggctttggggtggccagtccctctctctctgcaacactctcctcatgaggacttctgtgaaaaatgggggttgtaaccctctgagttctggggccccacccatttctaatctccagaacttggccaccacagactccaccaacttctagtcctggggcctgggcctctggccattgccataggcaccacctgctctgtgcaggcagcgcccccctctgccaggatcctccgaggtcagctgctgggtctgacccgcagaccctggctgagcgacggatgaacggagtatgcagacacaggcttgcttgtcagcagatgggggacccctgccagagtcagcagcggcccccataagcctgccacgcttgcatttatttagtacagatgtaatgacaaaggcctaaagcaaactccatttgtgggtaattaacattgtcgcccccccagaaagagcagtcctccgcatgatgattaaaggccaggttccgaggcctaagtaaaccaacttatctagatcaattcccttacttcttgttatctactctgagagaattcagctgccttcagccaaatcctttcccgaagcttttgcaaaacctccgagccttccaaggtttgcttctttctgtaatttttctcaccaccctgacctatctcctgcagtcagccctgtggaggcctttgtgtttcccccagtgctggcagcctagaggctgagatggccagaaacaaggtggtgacagtggcgtgctcagggcttgggaaacccaaggagctaaaggcatgcccaggcaaccaaagaggacaggaaggcttctgaggagagacctctgaggtgggtcttggagaggaaggacttagggaggcagagtggaggaagtgagaggacaccccaagccaagagggcggcaggaccaaaggctcagaagccagggcgctgcagaggggctgtgtgccacagggtgaagagtttgtgtggcagaagggcagggggcttgcatcaggggtgacagctgctcttttgtcccagcatagcccctgtacatccctggagagctggggcgtccacaactctaagtcacagcccccatcctaaccctggtggtgcagtgagggtgagctgtctgtgggcaggagggaagactcttggagatgagcctggtgaagggataatggcatcccgggccgaggagcagcacaggcagaggcctggggagagtttaaggagtgtaggggaggaaatggcagaagatgagccagaaaaagaaaggttagggcaggtcctggaggacatgagtggctgtttgggctttatccagcagtgggggagccttggcaggcttgtggcttagataggtgctttagaaagcccaccagcagttgctgggccaccccgctggctgggtcctgttctaaggcaggaaatacaagaatgagcaggaaaagaccccctcaaggctcacgtcctagtggggagacaagaaacacagatgggcaatataacacgatgtctggttccagtaagtgcagtgaagaacaagcgaggctggatgcagggagtgatgggaggggctttgtaaggggaggtcgggggaagcctgtctcagaggacaccagaatggagcgcaggagcagcacgtggcagtcacatggcaggccgttagggcagagggagctgggcagggcacagcagggcaggagtgtgtttgatgtgtcctgggaaccgccctgaggccgtcgtgtggctggagtgctgcaggtgtcaaggaaattgtaggagatgtctcctgagtgtgatggaatataaccagatttccagaaggaactgacatgatctgacttaaaaaggccacctacatttacatgaaggccgcctacctcagcatgtttgggaaggaggaccacaagccgttcggggacgacgaagtggaattatttcgagctgtgccaggcctgaagctcaagattgctgggaaatctctacccacagagaagtttgccatccggaagtcccggcgctacttctcctccaaccctatctcgctgccagtgcctgctctggaaatgatgtacatctggaacggctacgccgtgattgggaagcagccgaaactcacggatgggatacttgagattatcactaaggctgaagagatgctggagaaaggcccagagaacgagtactcagtg

SEQ ID NO: 1325 - DNA, 2733 bp, Homo sapiens
  SIMILAR (1687)..(1788): 401254mologous to Mus musculus putative,accession number AK016184,Smith-Waterman Score=49.
cttggagaaggaggagggaaaaaggggctgtgggatttagtggctgggctgcaccccctgggggggcagcagagcccaatgggccagaagggccacaaagactccctttacccttgtggagggactcctgagagcagcctccatgaggccctggaccagtgcatgaccgccctggacctcttcctcaccaaccaagttctcagaagcactcagctacctcaagcccagaaccaaggaaagcatgtaccactcactgacatatgccaccatcctggagatgcaggccatgatgacctttgaccctcaggacatcctgcttgccggcaacatgatgaaggaggcacagatgctgtgtcagaggcaccggaggaagtcttctgtaacaaaattccttcagcagcctggtgaaccgccccacgctggggccaattcactgaagaggaaatccacgctgagggtctgctatgcaaagtgcctgctgcagcgagcagccctgaccttcctgcaggacgagaacatggtggagcttcatcaaaggcggcatcaaagttcgaaacagctaccagacctacaaggagctggacagccttgttcagtcctcacaatactgcaagggtgagaaccacccgcactttgaaggaggagtgaagcttggtgtaggggccttcaacctgacactgtccatgcttcctactaggatcctgaggctgttggagtttgtggggttttcaggaaacaaggactatgggctgctgcagctggaggagggagcgtcagggcacagcttccgctctgtgctctgtgtcatgctcctgctgtgctaccacaccttcctcaccttcgtgctcggtactgggaacgtcaacatcgaggaggccgagaagctcttgaagccctacctgaaccggtaccctaagggtgccatcttcctgttctttgcagggaggattgaagtcattaaaggcaacattgatgcagccatccggcgtttcgaggagtgctgtgaggcccagcagcactggaagcagtttcaccacatgtgctactgggagctgatgtggtgcttcacctacaagggccagtggaagatgtcctacttctacgccgacctgctcagcaaggagaactgctggtccaaggccacctacatttacatgaaggccgcctacctcagcatgtttgggaaggaggaccacaagccgttcggggacgacgaagtggaattatttcgagctgtgccaggcctgaagctcaagattgctgggaaatctctacccacagagaagtttgccatccggaagtcccggcgctacttctcctccaaccctatctcgctgccagtgcctgctctggaaatgatgtacatctggaacggctacgccgtgattgggaagcagccgaaactcacggatgggatacttgagattatcactaaggctgaagagatgctggagaaaggcccagagaacgagtactcagtggatgacgagtgcttggtgaaattgttgaaaggcctgtgtctgaaatacctgggccgtgtccaggaggccgaggagaattttaggagcatctctgccaatgaaaagaagattaaatatgaccactacttgatcccaaacgccctgctggagctggccctgctgcttatggagcaagacagaaacgaagaggccatcaaacttttggaatctgccaagcaataactacaagaattactccatggagtcgagaacacacttttgaatccaggcagccacactccaagccaagtcttccatagagaacagcagcagatccatggtctcatcagtgtccttgtagctttgtgcagcagttccgggctggaagacagagacagctggacagagctcctgaaacacaggataaaataccctctccccctgccctgccctggcctttggggaccaccggcactccagttggatggcacaacatagtggatccgagcagaagccgagctggcattttcaccagtgtagccaagggcctttgccaaggacagagcaggtggagccctctgcctgccctatcacacatacgggtacttgcttttcactgtgatgtttaagagaatgtatgaacagtttacattttccttagaaatacattgatgggatcacagttggctttaataaccaacaacaatcaaccacctgtaagtctttgtcttcacctattatcatctggaggtaaatctctttatatgatgatgccaaagggcaaattgcttttcaaattcagcaagttctcagcttgtgtgacggaaggtccttcagaggacctgaggaatgcctgggagagactaagcctcaggcttcaatgtcttctggggttgggcatgaggatgtacacagacacccactaccttactactcacacttcatttcactccttttgtaaatttccaatttaaaaatcaagcacgtctttttagtgagataaaatctgagctcttctgtagaaaaatcaatctctaccagtagaaaatgccagggcttgatggaagagctgtgtagccctttctatgccaaagccaggaaatttggggggcaggaggaggttctcagaatccagtctgtatctttgctgtatgccaaactgaaaccactgggaataatttatgaaacataaaaatcttctgtacttcactccaaggtacatttgcttactgacagcatttttgttaaaactgttattcttgaaaaaaaaaaa

SEQ ID NO: 1326 - DNA, 858 bp, Homo sapiens
  SIMILAR (818)..(732): 371254mologous to Homo sapiens Human myelin oligodendrocyte glycoprotein gene,accession number AAZ29204,Smith-Waterman Score= 40.
ggacttattttatttaaaatttagatttattagagggagcatggccataaaataaaataaaataaaatttagatttaaagtccaagctcagtggctcacgtctgttatcccagcactttggaaggccagggcgggtggattgtctaagctcaggaatttgagaccaacgtggtgaaactcggtctctacaaaaaccacaaaaattagccaggtgtggtgtcacatgcctgttgtcccagctgcttggagggctggggcaggagtattgcgtgagcccgggaggttaaggctgaggtgggtcatgttcgcgccactacactacagcttggataaaaaagcgcgactctgtctccaaaaataaaataagtaaataaataaataaataaaatttagatcaatttgctgttatatttttatataaactatgtttatgacataagtataaacaaaaaaataaaataagtaaataaataaataaaatttagattaatttgctgttatatttttatataagctatgtttatgacagactttcctataatattcttatcataatgttcttgcacttgaaagaatgtgcattctgcagttgtgtgcaggtgttatgtgtatttcaactgggtcaagtttgttaatcaggttggtcaaattatctacatctttactgatatttttgtctgtttttctataaattactgagagaggctaaagcccgccactattattatgaatttgtttatttctcctttgagttttgttaatttttgttttatgcatttagagattgtgttattaggttcatacccatttaaaattgacgttttctggtagagtgaaccctttattatgtgaaatggc

SEQ ID NO: 1327 - DNA, 361 bp, Homo sapiens
  misc_feature (1)...(361): n = a,t,c or g
gctaatttttatactaataatgaataaaagggtaaaataccatggttatgtgggatttagccccaaaatgaaaagctaatgtaacattcaaaatcacttgctacagttttctgtatttacagaataattagaaaaataaaaggatcatctcaattaatgcagaaaaagcaattgaccaaatccaacacacatttatgaattttttaaaaaatttcataaaactgtcagaaaactgaaaatggatggaagcatcctcaatattataaaagaaatttgtgaaagacctgtaactaatatgtaggatggtgaactattagatgattttcctaagattggagatgaagcccagaggcccccttcn

SEQ ID NO: 1328 - DNA, 777 bp, Homo sapiens
  SIMILAR (1)..(774): 1001254mologous to Homo sapiens Human h2CED-6 protein sequence,accession number AAY27252,Smith-Waterman Score=1341.
atgaaccgtgcttttagcaggaagaaagacaaaacatggatgcatacacctgaagctttatcaaaacatttcattccctataatgcaaagtttcttggcagtacagaagtggaacagccaaaaggaacagaagttgtgagagatgctgtaaggaaactaaagtttgcaagacatatcaagaaatctgaaggccagaaaattcctaaagtggagttgcaaatatcaatttatggagtaaaaattctagaacccaaaacaaaggctgaagagatcactttaacaattggccaagcatttgacctggcatacacgaaatttctagaatcaggaggaaaagatgttgaaacaagaaaacagatcgcagggttacaaaaaagaatccaagacttagaaacagaaaatatggaacttaaaaataaagtacaagatttggaaaaccaactgagaataactcaagtatcagcacctccagcaggcagtatgacacctaagtcgccctccactgacatctttgatatgattccattttctccaatatcacaccagtcttcgatgcctactcgcaatggcacacagccacctccagtacctagtagatctactgagattaaacgggacctgtttggagcagaaccttttgacccatttaactgtggagcagcagatttccctccagatattcaatcaaaattagatgagatgcaggaggggttcaaaatgggactaactcttgaaggcacagtattttgtctcgacccgttagacagtaggtgctga

SEQ ID NO: 1329 - DNA, 485 bp, Homo sapiens
  SIMILAR (184)..(480): 901254mologous to Homo sapiens PTB domain adaptor protein CED -6,accession number AF200715,Smith-Waterman Score=482.
catgaacaacatgtgtttcagagatgctcatcctctttctggcgtagtaatggtgattcatctccctgtctcaatatttcttccatctctgtcactcctatcaactcgcctgattccagactatcactgggactgttaataccaccaccttctaaatgtggctttcccaagccagtcagtgagagcagcatcccaagacctcatgcaggcagtatgacacctaagtcgccctccactgacatctttgatatgattccattttctccaatatcacaccagtcttcgatgcctactcgcaatggcacacagccacctccagtacctagtagatctactgagattaaacgggacctgtttggagcagaaccttttgacccatttaactgtggagcagcagatttccctccagatattcaatcaaaattagatgagatgcaggaggggttcaaaatgggactaactcttgaggcacagtattttgtctt

SEQ ID NO: 1330 - DNA, 1033 bp, Homo sapiens
  SIMILAR (854)..(1033): 981254mologous to Homo sapiens PTB domain adaptor protein CED -6,accession number AF200715,Smith-Waterman Score=310.
  misc_feature (1)...(1033): n = a,t,c or g
tttcgtgtccagtgggcccacagataacgaccatcagagattaaagaaggaaagtcagcgagcttgaacacaggcgtcccgtgtggaaatgtccaaggagaccgccagaagtgcgcaagccggagtcggctagagtttccttctcaccgagagggggagcccggcgttcccggccgggagcgacccggagtccccagccccgcgtcccagctgccgccagcgccagttttggattcggcggattaggaagaggagggaggggggagagagcgcgaagagggaggggaccgaagctggagggtcccgagtccagcgccgtgttggcgtagagaaactttccctctcggcctcggagacggcgccccggccgtgccggagtggagatcgccaggctcggaggaaccggcagctctccacgcccctgcccgaagcctgacccgactgcctctctcagtgagttatttatgattccatctgatatacctaggaggagaaactgatagaagaattctgatggcaactgtatgatagaagctatataaagccaagtgtccattttctttcaactatatttgagcataccnnnnnnnnnnnnnnnnnnnnnnnnnnnnnnnnnnnnnnnnnnnnnnnnnnnnnnnnnnnnnnnnnnnnnnnnnnnnnnnnnnnnnnnnnnnnnnnnnnnnttaagtcgtggaactgaacatttatttggctgatcctcatcatgaaccttgcttttagcaggaagaaagacaaaacatggatgcatacacctgaagctttatcaaaacatttcattccctataatgcaaagacttgcctggccccaccttttgccttctgccatgattacaaaacatggatgcatacacctgaagctttatcaaaacatttcattccctataatgcaaagtttcttggcagtacagaagtggaacatccaaaaggaacagaagttgtgagagatgctgtaaggaaactaaagtttgcaagacatatcaagaaatctgaaggccagaaaattcctaaagtg

SEQ ID NO: 1331 - DNA, 3332 bp, Homo sapiens
  SIMILAR (452)..(796): 791254mologous to Homo sapiens PTB domain adaptor protein CED -6,accession number AF200715,Smith-Waterman Score=442.
gcgcaaggcgcggcgggggtgatgagcccttgggttctcgctccgactgctaaattcgcttggccgggtccaccttctcgtggcctcactcgccacacggatcagaatccggagcaggcagttctctctattctgaggctcctgcggctgccgcgctgacttccctgtgtgcgggagggaactctgggcaggctggttttcttggaatgtgtttacgatgttgaatgggacttgaacaggaagctggacgctgcagctggaactagcgtgccaagttatttatgattccatctgatatacataggagagaaactgataggaagaattctgatggcaactgtatgatagaagctatataaagtcaagtgtccattttctttcaactatatttgagcatacccaggatttaagtcgtggaactgaacatttatttggctgatcctcatcatggaaccgtgcttttagcaggaagaaagacaaaacatggatgcatacacctgaagctttatcaaaacatttcattccctataatgcaaagtttcttggcagtacagaagtggaacagccaaaaggaacagaagttgtgagagatgctgtaaggaaactaaagtttgcaagacatatcaagaaatctggaggccaggaaaattcctaaagtgggagttgcaaatatcaatttatgggagtaaaaattcctaggaccccaaaaccaaaagggaagttccaacacaattgccagcttcatagaatatctttttgtgcagatgataaaactgacaagagggatattcactttcatatgcaaagattctgagtcaaataaacatttgtgctatgtatttgacagcgaaaagtgtgctgaagagatcactttaacaattggccaagcatttgacctggcatacaggaaatttctagaatcaggaggaaaagatgttgaaacaagaaaacagatcgcagggttacaaaaaagaatccaagacttagaaacagaaaatatggaacttaaaaataaagtacaagatttggaaaaccaactgagaataactcaagtatcagcacctccagcaggcagtatgacacctaagtcgccctccactgacatctttgatatgattccattttctccaatatcacaccagtcttcgatgcctactcgcaatggcacacagccacctccagtacctagtagatctactgagattaaacgggacctgtttggagcagaaccttttgacccatttaactgtggagcagcagatttccctccagatattcaatcaaaattagatgaaatgcagcgccagagatggaggggttcaaaatgggactaactcttgaaggcacagtattttgtctcgacccgttagacagtaggtgctgacatcaagaacaagaaatcctgattcatgttaaatgtgtttgtatacacatgtcatttattattattactttaagataggtattattcatgtgtcaatgtttttgaatattttaatattttgaaaattttctcagttaaatttcctcaccttcactattgatctgtaatttttattttaaaaacagcttactgtaaagtaggatcatacttttatgttcctttctgtttctactgtaggatggaatttgtaattggaaggacatattatacaaatacctgccttgtgtctgaggttctattaggtaggccatctggaaatttgtattcattttccagatggctagtttattaatgatttcccaaaagccataccttaaaggataactttttaaattctggaagagacatgccaatgtcaaactaaacatgttctgtttttaaaaccaacaaacatgttactattcattgggacagatatccttttatggtattaaatactgttcacatcactgggaaaatgtaaactttaaacataatgccacaaggtcactaatttctagcaggtaaaattataaggatataaattccaataataaaccaaatgtatttagagtatttattagtaaatgcaaggtgatgttagttatgatcagttatactctaaatatttaatttgttttataaaggtagtgaaaaaatgaaaatttgctatttattaaaaaacattaaatttcattcccaaatgaggataagtgatattacctataacatcctaagcatcatctgatttgatattccctaaaaaacattggggaatatatggcctatcctatagattcaggtatcctacctacccccatatttactttacccaaatatattttctcctcactgcataaggactactcttctcatattttccttctttgatgaagatatttttcaccaaagtttattttgtgatgccctcttggttttgatactttaaaatcctgtggcacccgttcctacatgaattatcaatatttgggtaaaattcaatctgtatttggttttggttaaaagtcaaaaatctcattttccaaaaaaaaaaaaaaaacccagttactgctcagtttagtcttgaacatgagcaataaaattctcttgcatttcattattgatgtgctgatgaacctggacttttaaaaatatttgtttcctatacctttaccctttacctaacagactaatttgtactcagtaaaacaaaaatttatggtcaaaatttctaacttggttcatcacattataagataaataaattaaattaatgaaaatgtgacttagagtaggggtagccctcaaaaatagatttatcatttactcattggaattttcttcaagtgttaaaggtacattttcactaggaaaagaaatcaaatatgcttatgcaatatatatttgtgtgtttttccttaatgttatatggtatatatgagccttcttgtttagtttcttttatctgctaagttgtaccttaattagagggcaatatatgtttcataaagaagagtctttataattttgtttgtcagaatagtattttggaatttgtataataaggatgtttagaagccatataagtggctttttttaacagatagaatttgtatttttattgtacctttaaaaagatttatgtaataggtatatatttagtggcccatttattatcaatggtaacacaaatggagtacctaagatggtatttgcacatttaagatatgttactttaccaatttttaatggtaatcaactctgctactggcatgatgaaatagtacataactggtcattaattatgaacatttacttctccagtgcgtttttatgaagatctggttgaaaattgtatttctatgtaaactcaacgatatgtttggttttcctgaaaataaatgatttt

SEQ ID NO: 1332 - DNA, 1728 bp, Homo sapiens
ttttttttttttccagttgacacatcatccatttattatccttcagagtctaaaacgttcctcggtgatacaacgtatagccacccattccagcctgcttattggaacttctattcccatctggtggcaaacatttctttttacatttgttttactatcaaagatttaggagtcacaataaatacaagtgacagcctccacacccaaagagcccccccaataccctggcactagtgtaaccgtctattacactttaaggattataaaattgtttgctgtccttttttaaaagctcaggtccaagttctttagggttaacgttcatgtgcagcataagctccagcatcaaaaaaccctacgggcagagcaggcaagggatcatcccttctgtgatggggaatatttgtataggggaaggtctctccccctggcctttaaggtccatagggggagcaggggccactgggggcccagcggggctgccactgggttgcctcattccctctgccctgaagcttttgcttcaccgaggtccgtggagtacaggtaagaccaggcacaactagcactgtgggctgttccactctgagaagggccgctacagacctcgtcagaggggtggttcctgggtcacccgtaaaagttcctggggatgaggtcaggacggccatagctgtgggaggttcccaagggcacttggccaatccaaaaccctaccccccaacctccccctaacaacaaggcgaggtgtgaactctgaagatctccccagccctgtctacagagcagctgacagagggaaccgtttcccaggtgctgttggaggttcatgtcacaggtaacaggggacagttacaatcagttgggctgggggctcccacattctgacggcttgcaggaacctgatcctggtagggctctcgggaccacagacccaggcagtgcctggtttaagagggtgtgctttgctgtgggtagaacacccttaacattaatcaatagctatcctggtgcgtccaaaccccacacccagagaggtacttaataatgccttcacctggaacatcataaacgtcataatacaacaacccgcttggggcttatcgtagaggttatgctgcaaggaactgaaaggaaataatgggctagagtgttcgagccagcagaaatgaaggaaagattaaggcctttcacacttttgccccctgggggaaaaaaaaaaagtttacatcacagtatgtacgttgtccctgatggaatgctccctggggacatggggccgaccctctccctttcgaggggccagcagtcccatatgaactcacaaggatgggtttgacagccatcagcccctggaggaacagccaggccaggctgggagaggtcaggagctggagctggggctgggggccggcaggtgcggctcggatctggccccctggtcagacccagctgacccaagctggagcaggcagaggtgacttcggtctggatgcctgatccccagccactgcatagaactgaggttggttcgctggggagggctttcagtgggaagaagccagcctgggtgctccttctgggaggagctggaagatctggcccctgtcatggaacagagagggctaacagctcagggtcgtaggagacaggtatttatttgccaggcacacagaaaaatgcgaggaatagaaatgcttgcatactcttgcattttttttttttgga

SEQ ID NO: 1333 - DNA, 2137 bp, Homo sapiens
  SIMILAR (2137)..(551): 901254mologous to Homo sapiens similar to rat general mitochondrial matrix processing protease mRNA (RATMPP),accession number D21064,Smith-Waterman Score=2400.
tttttttttttttttttttaagaaagatgccaggtcttgattaccaggggaagctgtgtgcacgcgcgtggagcagcgctccttggagctgaccagggcccttaccttctcctgcttgtcagaggtgagtcctggtacccagcacggtggccctccgggaaggctctgataggtcagcctttgctgcctcccaagctcaagggctcctccaaggaaccctgcggggcccccatgtgcccacagccccgaagaggggaagcaccgacccgccctcctcgtgggcacgcttgcactccaagcgctggggcacttcacctgcttcctgggctttcgggtgggtcaaggctcgataattgacttcactgatcggcaaattgagtttccaaaagaattgcaaaccgcgtggggtgctgtgggcgacattgttttggcaccttttattacaaccagacaggctttttagacgaaattcgggttcaaacctaagacgcacggggaacggggctccagctgcagctccctgggtctgtcaggccggggagcggttctaccggaagagccggtacgtcctgggcaggcgcccgtccttactcgacaggggcggtctggatgtcctcatacgtgggcaggtcagtcaggtcacccagggcggccacatgccggctttccttcgagccatctagaagcgactctcttcacatcttccggcttcacgttgcggatgagcgtgcacagctcgtgcggcagctttctggagcgagtggccagcacctggcctccccacatcctcgaagatcacaggcctggattccaggttcatcatgagcattgatgtcagctgcgtcttggctcgttccagctccaccgtgtccacggttccgcccattaaaataaactcctttgtgatgatttctaccatttctcgaacctgtcttgggtcggcgctggcatggatgcaaaggaggccagtgtcctcgtagctgtggtggtaggaggtcgcgttatacatccagtggtgcctgttgagcacgttgaggtagagcctggagaacatgcccttgccgggcccaccagccgagaaggagccacctccgcccatcatcatgttcaacactgcaaaggggatgaagtcctcctccaggaaggagcagctctccagtccaaccatgatgtgcgtgagctcggggatgggggtcgggcccaggctgacattggacatgtctctttctagcttggcaatccccccagtgtactgggccacagatctgtcaatatccacggcctctgcgctcccccaggccggctggacccccaggaggtacttccgggcacagtccaccagatgctcgtgctccacgcccacgccggccagcaccatgcggtcgggagtgtagtagttcctcaggtaggaatgcagcacctctcggttgatctttgctacgttttctgtggggcagaaacggtggaggccaactgtgttctccctgtaagccgcttcatgaatcatctcggtgagaagtggctctgggtcaggccgcaggttcaggtcctccagctcaaactggaccgccatccgcgtcatctcgacttcttcatctgttagccggggctgcagaaccacatcagccagtaaggcaaccaccgtgtccaagcctttgctatcagcagacacagcatacatggtggtgtctcttgatgtctggcagtcacagatacccccatgcttttccaacgtaagcagaatttcatctttgctgtcaaatcgagcagtagacgaaaatgccaatttttccaaaaagtgagcaattccactaaggtatttcgcttcatatctcgatcctgaattgataagaattcctactgtacaaaactgtccaaacttattctgagatgccacgcgaagcccattatccaatgtggttactttggtttcaaacttttcctgtccatcaactgtagcaaaaacaggcttgggtactccaggtaagggagaagagagggggatgttgggataggcaccaccactactaaaccgtctgtacgcaggaggtccaaacctcagccgcgaacagccccaagaacccgagccccgcagcaaccgcgtcgccgccagcaccacagccgccatcttgcgtct

SEQ ID NO: 1334 - DNA, 396 bp, Homo sapiens
  SIMILAR (56)..(394): 961254mologous to Mus musculus putative,accession number AK012499,Smith-Waterman Score=577.
cggacgcgtgggcggacgcgtgggcggacgcgtggggttctaggtgtcatggctgccccaagagtctagtcaccattactttaagtactgcaaaatctcagcattggctctgctgaagatggtgatgcatgccagatcgggaggcaacttggaagtgatgggtctgatgctaggaaaggtggatggtgaaaccatgatcattatggacagttttgctttgcctgtggagggcactgaaacccgagtaaatgctcaggctgctgcatatgaatacatggctgcatacatagaaaatgcaaaacaggttggccgccttgaaaatgcaatcgggtggtatcatagccaccctggctatggctgctggctttctgggattgatgttagtactcagatgct

SEQ ID NO: 1335 - DNA, 574 bp, Homo sapiens
aggaataacagattttaatataatataatattagaatcaatctctaattacaggtttgtataattttactcaccttctaaaacagaacaattgtatcaaattttacgttgtcattctcttgtgaaagttctagtaagtaatgaaatggtcaaaaagacatggggaagactaataaaatcacaagggaaaacttcagattggggtggtttgagaagtatgaataaaactaaactcattggagttacatggatggattggggctgatcttgtgtgtttgaaatagttttcaatttatgacatcatgtgatgtgtgtttttttttccagctgtaaaactaccatagaagctatccatggattgatgtctcaggttattaaggataaactgtttaatcaaattaacatctcttaaacagtctctgagaagtactttacctgaaagacagtatgagaaaaatattcaagtaacactttaaaaccagttacccaaaatctgattagaagtataaggtgctctgaagtgtcctaaataccaatataggtgtaataaagctctttaaaatgaaaaaaaaaaa

SEQ ID NO: 1336 - DNA, 1396 bp, Homo sapiens
  SIMILAR (194)..(382): 661254mologous to Homo sapiens 38 kDa Mov34 homolog,accession number U70734,Smith-Waterman Score=200.
cgtccggttctaggtgtcatggctgccccaagagtctaggtaagagtttgttcccgtggtgcggagggtcaaggcccacacccggtaaacctagcgaggtaaagttgcgtttttggttgtagaaacgacaactttttccgctttcctgggcgatggcggcgtccggaagccgtatggcccaaaaaaccctgggaaactggccaacaacatgcaggaagctcagagtatcgatgaaatctacaaatacgacaagaaacagcagcaagaaatcctgggcggcgaagccctggactaaggagtgaggagtcaccattactttaagtactgcaaaattctcagcattggctctgcttgaagatggtgattgcatgccagatccgggagggcaacttggaagtgatgggtctgatgctaggaaaaggtgggatggtgaaaccattgatcattatgggcaagtttttcttttgccttgtggagggcactggaaacccgagtaaattgctccaggctgctgcatatgaatacatggctgcatacatagaaaatgcaaaccaggtttggcagccctgaaaatgcaatcgggtggtatcatagccaccctggcttatggctgctggctttctgggaattgatgttagtactcagatgctcaaatcagcagtttcagggaaccatttgtagcagtgggtgattgatccaacaagaacaatatccgcaggggaaagtgaattttggcgccttttgggcacaccccaaaggggctacaaccctcctgatggaaggccctttctggagtcccaggcttattcccacttaataaaatagaagatttgggggtacactgcaaacaatattatgccttagaagctctcatatttcaaatcgctcttgggatcgcaaaattgcttggagctgttgtggaattaaaatctgggggggaatacgttggagttccttctggctggcttactaaatgcagactatcccactggtcaggtcctttgatttgtcctgaaaaagttagagcagtccagaagccccagcctgggacgaggggagtttccatgttggggtttagaaacgcatgacccgaaaatcagaagacaaacttgccaaagcctacaagaagcagcgtgtaaactccccatagaagctatcccatggattgatgtcctcaggttattaaggataaactgtttaatcaaattaacatctcttaaacagtctctgagaagtactttacctgaaagacagtatgagaaaaatattcaagtaacactttaaaaccagttacccaaaatctggattagaagtataaggtggctctgaagtggtcctaaatattaatatcctgtaataaagctctttaaaatgaaaaaaaaaaaaaaaaaaagat

SEQ ID NO: 1337 - DNA, 452 bp, Homo sapiens
  SIMILAR (430)..(242): 961254mologous to Homo sapiens MSTP030,accession number AF113210,Smith-Waterman Score=321.
  misc_feature (1)...(452): n = a,t,c or g
tgctgttcataagtttattatctatatctgaaaaaatcatagaaaattgctgggtttagctctcagcagcccgctcctgagctctgaggaagcttgccttcttttgagctacccgatccttcttctgagcaagggacattttgggacggttccacctcttctttttaacttctttcttgggcttcttttcatagactggattctctcgtatagcagcatgagctttcttatacatctcctccatcctgcgggccagcagcaggccagtacaatatgctgcagcataatttgtcaggccaaccttcacaccatattttggcagttcgtgtgcatacgctgcgcagactatcatatccccctctatacgggcataagcaatctgacaaatgatatctctgtttgtcacacgaactatcatcctgtaattggggtgtggtgnaattaattttaac

SEQ ID NO: 1338 - DNA, 2017 bp, Homo sapiens
  SIMILAR (1859)..(1605): 711254mologous to Homo sapiens chromosome 16 open reading frame 5,accession number AF131218,Smith-Waterman Score=296.
gcgtgtgcagactgcgctctgttagtcttctgcctgtcagcctcagcccagtctgtcttgcttaagggtgcgcctccccagggctggatgatgctgtgctcaagcctgcgggtaggagggctccagcttgcagatcccatgcctggattgccatatatagatggttgaaaccagcatcagaggaaggaaggtgaccttacagccactgccgagaccaacgtgtgccctggcccagtcacagctggaaatcccagggctggtctacacccgactctggtttggttttaattaggtcccttacgtgttggtgttgtccccaggcaagttggcatggcatcagcactgagggtgtgagaccctgaggactcagcctcccgtcctgccagtagactgcctgcagccccaccctctttccctcaaaaaagaaggaagccaggcaagagagcagaggcccagggcgggggagtgaaagggccaaatttaaatgagaaactacaaaactgagactgggccacgattcacagtgacaggaggccaatgcagtggcagttgcgagaccaggaaggacagtggcaggatacagtggtccaggtgagcaagttcacaaaccattcagggaaataaagacagggcgaggctgttgtccacccaaggcagttctaccacttgtggctgctccttcctcgtccctagcccagtgtgcctgcaggagcaggttgtgagcaggcacagcaacatgcctgtcagctggggtgagggggcccggcactttacagggaaggaaaatccatgggagaaggtttttgcacattccaagcgcacccacaagggggaccctcttggccatctttttgcccattggggattacaccagccaccaggcagaggtcaatccccacacgcagttagggacacagggcagacgggaaggggctaggctcaggggctccttccggccccagcaaataacagggttccacaagaggcatggcctgaaaagggggtctgcacactgactcaaagggacaagttcgttcttagctcccagggtctgaatcattcaccccaggtaacagtgtcctctctacctgaacaccaggcaagctctcgggcactgggaacagggtaattagacatcctggggcttctatacctgagaagttctgagggccagagttggcagttttacttccagccaccatgccccacctctagcaccccagaggcgcaaagtacccagaaacaaacccaggctttgtgaccctgtcctacgtgggcccacctgactccagacaacttacccattctcggcccagcaggtcagaaaacgcctgtggccacaggcctggggaactaaactggctaaactgctctggctgcttgttggtccccagggggaaaagagtctggactgaaacctgtaaccttgtttggaaaacagaggcatcaggacccccaccaggagaccccctccccagcttatcttccccgatcacacacacccaagcaagaccaacaacacacaagctcattgcccagccccctgcccaccccactgacccttggccttaaatccccaacagaatttttgcccagaagagtcagcggctcaggtagggcagggtgaagaggacaggacttctaggggatggtggcacggctcccagccccaagtgggagcgggaaagtgaccactgagcacaggcagcaaagcacagggggccagactgacaggcgggggagtcccgagtcccaggctccgttaggagcaggcgcttgtacggtgtagatgtaggctttgcaggctggggtcatgtgtgcgttcacattccttgaagttcattgatgaggcaggtgaggctccttcagctgctggcctggatggacagggaacaggcagggctccgggagctccagaagcccggtgcccgaggccggccgaaagcggagaggggcccgggtccggacaggcgccggcagaacaagaccctcagccccgcgcggctttgcgcgcaca

SEQ ID NO: 1339 - DNA, 433 bp, Homo sapiens
  SIMILAR (62)..(433): 961254mologous to Homo sapiens Mlx interactor beta; Mio beta,accession number AF245471,Smith-Waterman Score=602.
ccagcgtggtggaattcggggcaatggggaccctttcccctgggtcggtctttctgtgggtctgtctgtccctaccacaggcagtgaacggcggctgtcaggggacctcagctccatgccaggccctgggactctgagcgtccgtgtctctcccccgcaacccatcctcagccggggccgtccagacagcaacaagaccgagaaccggcgtatcacacacatctccgcggagcagaagcggcgcttcaacatcaagctggggtttgacacccttcatgggctcgtgagcacactcagtgcccagcccagcctcaaggagcgtgcgggcttgcaggaggaggcccagcagctgcgggatgagattgaggagctcaatgccgccattaacctgtgccagcagcagctgcccgccacaggggtacccatcacacac

SEQ ID NO: 1340 - DNA, 3155 bp, Homo sapiens
  SIMILAR (766)..(1641): 811254mologous to Homo sapiens Mlx interactor beta; Mio beta,accession number AF245471,Smith-Waterman Score=1202.
atggccggcgcgctggcaggtctggccgcgggcttgcaggtcccgcgggtcgcgcccagcccagactcggactcggacacagactcggaggacccgagtctccggcgcagcgcgggcggcttgctccgctcgcaggtcatccacagcggtcacttcatggtgtcgtcgccgcacagcgactcgctgccccggcggcgcgaccaggaggggtccgtggggccctccgacttcgggccgcgcagtatcgaccccacactcacacgcctcttcgagtgcttgagcctggcctacagtggcaagctggtgtctcccaagtggaagaatttcaaaggcctcaagctgctctgcagagacaagatccgcctgaacaacgccatctggagggcctggtatatccagtatgtgaagcggaggaagagccccgtgtgtggcttcgtgacccccctgcaggggcctgaggctgatgcgcaccggaagccggaggccgtggtcctggaggggaactactggaagcggcgcatcgaggtggtgatgcgggaataccacaagtggcgcatctactacaagaagcgggtcagtgggggagggccagggaggccccagagctttcctcctgcggctgccggctaccgcccgcctcggaagatccctggaaaggggatcctgacccccgagcttgcgcccctcgggccctccattcagtcccgggccgacagcgccaccgtgtggccacagcgtctcctagcggcctccttacctaggggtcggctccgtaagcccagcagggaagatgacctcctggcccctaagcaggcggaaggcaggtggccgccgccggagcaatggtgcaaacagctcttctccagtgtggtccccgtgctgctgggggacccagaggaggagccgggtgggcggcagctcctggacctcaattgctttttgtccgacatctcagacactctcttcaccatgactcagtccggcccttcgcccctgcagctgccgcctgaggatgcctacgtcggcaatgctgacatgatccagccggacctgacgccactgcagccaagcctggatgacttcatggacatctcagatttctttaccaactcccgcctcccacagccgcccatgccttcaaacttcccagagccccccagcttcagccccgtggttgactccctcttcagcagtgggaccctgggcccagaggtgcccccggcttcctcggccatgacccacctctctggacacagccgtctgcaggctcggaacagctgccctggccccttggactccagcgccttcctgagttctgatttcctccttcctgaagaccccaagccccggctcccaccccctcctgtacccccacctctgctgcattaccctccccctgccaagcaggagacagtccctgaattcccctgcacattccttcccccgaccccggcccctacaccgccccggccacctccaggcccggccacattggccccttccaggcccctgcttgtccccaaagcggagcggctctcacccccagcgcccagcggcagtgaacggcggctgtcaggggacctcagctccatgccaggccctgggactctgagcgtccgtgtctctcccccgcaacccatcctcagccggggccgtccagacagcaacaaggccctcctgggctccttcctaggctcacccaactctctgctccccgagaccgagaaccggcgtatcacacacatctccgcggagcaggaagcggcgcttcaacatcaagctggggtttgacacccttcatgggctcgtgagcacactcagtgcccagcccagcctcaaggtgagcaaagctaccacgctgcagaagacagctgagtacatccttatgctaccagcaggagcgtgcgggcttgcaggaggaggcccagcagctgcggggatgagattgaggagcttcaatgccgccattaacctgtgccagcagcagctgcccgccacaggggtacccattcacacaccagcgttttgaccagatgcgagacatgtttgatggactacgtccgaacccgtacgctgcacaactgggaagttctgggtggtatcctccctcaagcccatggctggggggctgcaggggctgtggcagggcagctccttgacctgggcccagttcagcatcctcatccggcctctgtttgagtccttcaacgggatggtgtccacggcaagtgtgcacaccctccgccagacctcactggcctggctggaccagtactgctctctgcccgctctccggccaactgtcctgaaactccctacgtcagctgggcacatcttaccagtatcctgaaccgacccgggccgcattccctgaggcaagccacacgggcagtcacagagggcacccttggcaaacctttatagtcctgggccagaccctggctgctcactcagctgccctgggggctgctttccctggggcacgggctccagggatcatctttggggcactcctttccttgccccaggccctggctctgccctttccctgggggggttggaagcagggtccaggtttcacacttgccacctcctggaggtcaagaagagcagagtccccgtccctgctctgccactgtgctccagcaccgtgaccttgggtgactcgtccgctgtctttggaaccgctgtgtttcaatctgcaaaatgggggatggggaaaggttcaaatcaaacagatgaccccccaggccttggcagctgtgaacattgggggcctaggctggcaactccgggggctcaacggtggaaagaggaggatgctgtttctctgtcaacctcccacttgctccccgacaggtggggcacagactctctgttcctgagcagagaagcagaaaaggaggttccctctctctgctccttcactgctgacccagaggggctgcaggatggtttcccctgggagaggccaggagggcctgatcccaggagacaccagggccagagtgaccacagcagggcaggcatcatgtgtgtgtgtgtgagtggatcgcctgtgtgtgggttttgtaaagaattcttgcaccataaaagcaaaaactgtctgcgcaaaaaaaaaaaaaaaaaaaaaaaaaaaaaagtcgtatcgatgt

SEQ ID NO: 1341 - DNA, 535 bp, Homo sapiens
  SIMILAR (1)..(534): 921254mologous to Mus musculus kinesin-like protein 2beta,accession number Y15894,Smith-Waterman Score=847.
agtgtaactgttgaatggatagaaaatggagatacaaaaggcaaagagattgacctggagagcatcttttcacttaaccctgaccttgttcctgatgaagaaattgaacccagtccagaaacacctccacctccagcatcctcagccaaagtaaacaaaattgtaaagaatcgacggactgtagcttctattaagaatgaccctccttcaagagataatagagtggttggttcagcacgtgcacggcccagtcaatttcctgaacagtcttcctctgcacaacagaatgcacgtagaaaatctaattgtgtgaaagaagtagaaaaactgcaagaaaaacgagagaaaaggagattgcaacagcaagaacttagagaaaaaagagcccaggacgttgatgctacaaacccaaattatgaaattatgtgtatgatcagagactttagaggaagtttggattatagaccattaacaacagcagatcctattgatgaacataggatatgtgtgtgtgtaagaaaacgaccactcaata

SEQ ID NO: 1342 - DNA, 401 bp, Homo sapiens
ctgtaacaaaaaactttcgcaatagttgagcattctatttagttccgagtttctagacaacaaagaacaaaaggaaaaatactgagttactgttaggaaataacacagctgacttgattgaacccataaagttgtaaactcttactgcgtgtaatacaatacttattccctctttcttttctttttccaagataaagtgaaatctttccgtgcagctctacaagaggaggaacaagccagcaagcaaatcaacccgaagagaccccgtgccctttaaaccggcatttgctgctaaaggatacccagaaccctcactactgtaacatacaacggttcagctgtaagggccatttgaaagattggaattttaagtgtctgtgggaaatgttttgccctcactg

SEQ ID NO: 1343 - DNA, 480 bp, Homo sapiens
  SIMILAR (124)..(267): 911254mologous to Rattus norvegicus kinesin-like protein KIF2,accession number AF155824,Smith-Waterman Score=226.
atgagagccttcctggcggcccttgtcaccgactggtaccaataccgtctggcagctaatgccttgtttacatttctttactgtgacaccttcaaattggagattttaaaggcttttaagcggtataaggaatctattcggtggttagaagatgaaaaggccctcttagagatgactgaagaagtagattatgatgtcgattcatatgctacacaacttgaagctattcttgagcaaaaaatagacattttaactgaactgcgggaaaacgagaccctggttccaaagacaacaaagacaaacaaaacacacaaagattgcggggcaagggggggcgcgaaccagaaaacgacagaggggaaagctatccacagcgagaagcgagcaccaaacaagagcgcgacatacacggcgaaagaagaacacaacaagacagggcaggagcgacgcgaaccagagaaataccgcgaaagcgagtaa

SEQ ID NO: 1344 - DNA, 4202 bp, Homo sapiens
  SIMILAR (1914)..(2321): 721254mologous to Homo sapiens Human kinesin-related protein KINRELP,accession number AAW88456,Smith-Waterman Score=455.
tccggtccccctccctcagacgcgctgctcctgctccagatgaggtgatggcaacgccaacttcggcaagatccagatcgggatttacgtggagatcaagcgcagtcgggatagagtcttattctgtctcccagactggagtgcaatggtgtgatgtcggttcactgcaacctctgcctcctgggctcaactgatcctccccgctcagcctcccaagtagctgggactacagatgcacaccacatccggccgaatacatcaagcaatggtaacatctttaaatgaagataatgaaagtgtaactgttgaatggatagaaaatggagatacaaaaggcaaaggagattgacctggagagcatcttttcacttaaccctggacctttgttcctgatggagaaattgaaccaagtccaagaaacacctccacctccagcatcctcagccaaagtaaacaaaattgtaaagaatcgacggactgtaagcttctattaagaatgaccctccttcaaagagataatagagtggttgggttcagcacgtgcacggcccagtcaatttcctgaacagtcttcctctgcacaacagaatggtagtgttttcagatatatctccagttcaagctgcaaaaaaggaatttggacccccttcacgtagaagatctaattgtgtgaaagaagtagacaaactgcaagataaacgagagatgaagagattgcaacagcaagaacttagagaaataagagcccaggacgttgatgctacacacccaaattatgaaattatgtgtatgatcagaggctttacaggaagtttggattatagaccattagcatcagcagatcctattgatgaacataggatatatgtgtgtgtaagaaaacgaccactcaataaaaaagaaactcaaatgaaagatcttgatgtaatcacaattcctagtaaagatgttgtgatggtacatgaaccaaaacaaaaagtagatttaacaaggtacctagaaaaccaaacatttcgttttgattatgcctttgatgactcagctcctaatgaaatggtttacaggtttactgctagaccactagtggttactatatttgaaaggggaatggctacatgcttggcttatgggcagactggaagtggaaaaactcatactatgggtggtgacttttcaggaaagaaccaagattgttctaaaggaatttatgcattagcagctcgagatgtctttttaatgctaaagaagccaaactataagaagctagaacttcaagtatatgcaaccttctttgaaatttatagtggaaaggtgtttgacttgctaaacaggaaaacaaaattaagagttctagaagatggaaaacagcaggttcaagtggtgggattacaggaacgggaggtcaaatgtgttgaagatgtactgagaactcattgacataggcaacagttgcagaacatccggtcaaacatctgcaaatgcacattcatctcggagccatgcagtgtttcagattattcttagaaggaaaggaaaactacatggcaaattttctctcattgatttggctggaaatgaaagaggagctgatacttccagtgcggacaggcaaactaggcttgaaggtgctgaaattaataaaagccttttagcactcaaggagtgcatcagagccttaggtagaaataaacctcatactcctttccgtgcaagtaaactcactcaggtgttaagagattctttcataggtgaaaactctcgtacctgccatgattgccacaatctctccagggattgggcatcctgtgaaaatactcttaatacattaagatatgcaaatagggtcaaagaattgactgtagatccaactgctgctggtgatgttcgtccaataatgcaccatccaccaaaccagatttgatgacttagagacacagtggggtgtggggagttcccctcagagagatgatctaaaacttctttgtgaacaaaatgaagaagaagtctctccacagttgtttactttccacgaagctgtttcacaaatggtagaaatggaagaacaagttgtagaagatcacagggcagtgttccaggaatctattcggtggttagaagatgaaaaggccctcttaggagattgacttgaagaagtagattatggatgtcgattcatatgctacacaacttgaagctattcttgagcaaaaaatagacattttaactgaactgcggggataaagtgaaatctttccggtgcagctctacaagaggaggaacaagccagcaagcaaatcaacccgaagagaccccgtgccctttaaaccggcatttgctgctaaaggatacccagaaccctcactactgtaacatacaacggttcagctgtaaggtccatttgaaagtttggaattttaagtgtctgtggaaaatgttttgtccttcacctgaattacatttcaattttgtgaaacactcttttgtctacaaaatgcttctagtccaggaggcacaaccaagaactgggattaatgaagcattttgtttcatttacacaaatagtgatttacttttggagatccttgtcagttttattttctatttgatgaagtaagactgtggactcaatccagagccagatagtagggggaagccacagcatttccttttaactcagttcaatttttgtagtgaggactgagccagttttaaaatcctttgccgtgcatgcataccctcatcagtgattggtaccataccttgccccactccctagaggaccagctgtgctcaccttttccctggctttgtgccttgattaaggctactgacccctaaaattcctgaagcacagcccaagaaaaattacattccttgtcattgtaaaattaccccttgtgtgtaccatttttacctgtatttgagacattttttgtgtgtgacctagttaattttgcaggatgtgcccatatcattgaacggaactaaagtctgtgaccagtggatatagctgctggacccattccatcttatatgtaaagaaatctgggaattattattttaaaaccatataacatgtgattataatttttcttagcattttctttgtaaagaactacaatataaactagttggtgtataataaaaagtaatgaaattctgagaagagtttttatcttaggaaaatacatatatatgcagtgtgtgtgccagtgtggtattaacaagactaatagtgcagtttgatccttaccaatatcattacttaatttgaagtgttcattagcaccccaaaatataccttttctatgtactgttaaaagaaattggcttctgatgcatgaacatttacatgtacattgaaagtagtccataatagaagttagtttaagccaagtgtagacagtacattactcccttgaaaaagaattaagttgaaagagttgactttgccttaaaaggcagatctaacccaagctccatccagtaccaaatgtgaaacttcattgttgtttggtgagaatcgccaaattctcactaatacattggtatggtgtagggcatgctactttttaaacagcagcacttatttttacagattgctactccaaggaagaaaactggccacttttcatgtaaatattttgttcaaagatttgtatatctctctaggagttttccctcagttcccaggatggggtccaggagtagattaacagctaaaaatctcccaaggatatcttgttttgatttatttactccagggaactatcagctccttcacaggagccaaaggggagctatgaatagagggtcacatgagccagattctttactgttcataaaacccagagagtagttgtgaaagatcctaatacaattgtgaaaagctctgtaaacatgaaatctaaaacakatgtagattttcacaatatgcttattaataaatggabgtctatggaataagttttagagataatttacttcagtcacctttgttttggaaaggactcaggttttcttgcagctgtaagatatattctatttgtgtttatttcaaagggaagaggaaggatggacaactgttacaattgaccttgcaaaggatatttaaaaaaaaggtagtttttgagattaaccaactttcaaagggcaataaagacatgtgaatttgctcattttaaagcacaacagataaaaaa

SEQ ID NO: 1345 - DNA, 637 bp, Homo sapiens
  SIMILAR (632)..(456): 591254mologous to Homo sapiens Human secreted protein, SEQ ID NO: 7870,accession number AAG03789,Smith-Waterman Score=137.
  misc_feature (1)...(637): n = a,t,c or g
agttgcattaaggtttgctgatggtgttgtactgtttatggattttgacaaatgtataatgtatatgtgtatgttacacatttatcaaaatccatatgtgtacattatacatttgtcaaaatccataaaagttacaaaagtacaaaaaaagtacaatattcataaaaagacaacttgatgctcaaaaagtttcggattttggatgtttggatttgagatgctcaacccatagtaaaattcgctctttttcagaatacagttgagttttgccaaatttgacagttcacgcaagccccaccacaatcaagatatgggccgggaatggtgactcatgcctataatcccagcaccttgggaggacaacgtgggaggattgcttgagcccaggagttcaagacaagcctaagcaacataatgggacttcgtctctcaaaaaaaaaaaaaaaaaaaanccataataaaagtaataataatagctgggtgtggtggtgtgtgtctatagttttagctactcaggaggctggggtgggaggaagactgcttgagcccaggaggtcaaggctgcagcaagctgtgattgtaccgctgcactccaactccagcctgtgtgatagagcgagaccctgtctcaaaaaaa

SEQ ID NO: 1346 - DNA, 642 bp, Homo sapiens
  SIMILAR (130)..(639): 891254mologous to Homo sapiens exportin 5,accession number AF298880,Smith-Waterman Score=760.
atgctggaggagcaactggtgaggatgttaacccgagaagtcatggacctaatcacggtttgctgtgtttcaaagaagggtgctgaccacagtagtgctcccccagcagatggagacgatgaagaaatgatggccacagaggtcaccccctcagctatggcagagcttacagacctgggcaaatgtctgatgaagcatgaggtgctgtcagggacactgctcgcagatgcagttacgtggcttttcaccagtgtgctgaaaggcttacagatgcacgggcagcacgacgggtgcatggcttccctggtccatctggccttccagatatacgaggcactgcgccccaggtacctggagataagagctgtaatggagcaaatccctgaaatacagaaggactcactggaccagtttgactgcaagcttttaaacccctccctgcagaaagtggctgacaagcgccgaaaggaccaattcaaacgcctcattgctggttgcattgggaaacccttgggagagcagttccgaaaagaagttcacattaagaatcttccctcacttttcaaaaaaacaaagccaatgctggagacggaggtgctggacaatgatgggggtggcctggccaccatctttgaaccctga

SEQ ID NO: 1347 - DNA, 539 bp, Homo sapiens
ggtcgacccacgcgtccgaaagtaacttcagtatttgcagcattttgtgtttctgcctagaagctcccatttccctcatgtatagcttgagtgcatctctagaagatcagccatgggcatgggcattatgtggaggtgggagggctcctagtactacttagccaccacttagcctataacactcagctttgataatgattggtgcgctggtgacaaaacaggatattcttctctgaactgaaaggatggagcttaacattctactctctgataacagatgaagaaatgatggccacagaggtcaccccctcagctatggcagagcttacagacctgggcaaatgtctgatgaagcatgaggtgggtagaaggagcaggtgatacctttactccttgcccaggaggggagtcaccttttacttttcttgctctatggtgctatcaagagttttatgtaatactcctttgttacataagaacctggctccaaaggccccataataaaccgaaggaaaaggtgcatgtcttggaggctacca

SEQ ID NO: 1348 - DNA, 483 bp, Homo sapiens
  SIMILAR (151)..(119): 451254mologous to Homo sapiens exportin 5,accession number AF298880,Smith-Waterman Score=39.
cttctttgaaacacagcaaaccgtgattaggtccatgacttctcgggttaacatcctcaccagttgctcctccagcatctcttgagactctgggttttcatctgcagcctcatcttctccactgcagaaaaccagggggccaagttccacaggagtgcagaaaaggaaggacaaggaaagcagcgaccctaatcagactctctctgaccactttcttctcctttgggtcttcgttttatgcaaaagtgagtaatgtcacgcagtgatccactgaaggacgctatttctagtgactctgtccagagggatgtgcatgtcacacttaacataagtgagtaaggtaccagtagcccctatgaagcatgtgtctcacagttagcatgctggtaacagcctgtccagccgatccatgtgtcacctaggcttagaatcgctccagcttcgaagttccaccaccctggactagtgatctacgattttttt

SEQ ID NO: 1349 - DNA, 405 bp, Homo sapiens
  SIMILAR (76)..(273): 751254mologous to Homo sapiens Human secreted protein, SEQ ID NO: 6065,accession number AAG01984,Smith-Waterman Score=251.
atgagatggagtttcgcttgtcaccccaggctggagtacagtggtgcgatctcggctcactgcaaactccgcctccccaggttcaagtgattctcctgcctcagcatcccgagtagctgggattacaggcatgtgccaccacccccagctaattctgtatttttagtaaagacgggttttcaccatgttggccaagctggtcttgaactcctgacctcaggtgatctgcccacctcggcctcccaaaatgctgggattacaggtgtgagccactgtgcctgggccaaggattaaaaatttaagtgtgtgtctgtagggaggaggggggggccgggggaggcggtgcatcagaatagcaacaggctttcttattggtgggaggatggagggaaaactggatgagtt

SEQ ID NO: 1350 - DNA, 316 bp, Homo sapiens
  SIMILAR (165)..(278): 971254mologous to Homo sapiens exportin 5,accession number AF298880,Smith-Waterman Score=194.
ttcgttaataaagttttattgagtgattattacatgcaaagcacaagtctgcaaaacagttcctttgaatgcttttcccctagggtggtaaattaataaacattaagtacttattttataccagttattgattcctgtccttcccttggcattttctcttggcagcctcccgagcacaacaaggagaggtgatgaggttggcatgtcgtttggatcccaaaactagcttccagatggctggggagtggctaaagtatcaactatcaacttttcttgatggctggttctgtgaattggaagtttttttcattactga

SEQ ID NO: 1351 - DNA, 1494 bp, Homo sapiens
  SIMILAR (1078)..(1491): 901254mologous to Escherichia coli hydH,accession number U00006,Smith-Waterman Score=620.
atggcggcgccggaggcggaggttctgtcctcagccgcagtccctgatttggagtggtatgagaagtccgaagaaactcacgcctcccagatagaactacttgagacaagctctacgcaggaacctctcaacgcttcggaggccttttgcccaagagactgcatggtaccagtggtgtttcctgggcctgtgagccaggaaggctgctgtcagtttacttgtgaacttctaaagcatatcatgtatcaacgccagcagctccctctgccctatgaacagcttaagcacttttaccgaaaaccttctccccagatgctagggatagactacatgggtgaactgacccagttcactgaatcccagctccagagtcattttggggagaagaatgggtctaggctatatgccatgtgccgagggattgaacatgatccagttaaacccaggcaactacccaaaaccattggctgtagtaagaacttcccaggaaaaacagctcttgctactcgggaacaggattacctcaacctctcttggaactcaatgactctcctgtcttcaaaaccgtcttggaaagaatgcagcgtttcttctctaccctctatgaaaactgctttttggaagaatgattccagagacgtggttgctttcttagtggctgtcaccgctgggccacttccctgggtcttagcttctgagctggtaactggcacctttggcagagaacttgggtcactgctcaagaagctggtgatgtctgtagaagatgaaggggcagaggcagaaaattttgtagcacagaggaaaagcattaatgacagggtagccacccagctggttgtgagcattcgtgtacaaggagacaaacgcctcagcagcctgcgccgctgctgtgcccttacccgctatgatgctcacaagatgagccatgatgcatttactgtcatcaagaactgtaatacttctggaatccagacagaatgcctgaactgcacagagtggagcctcttgccccctgccacagaggagatggtggcgcagtcgtctgtggtgaagggccgcttcatgggggacccatcatacgaatatgaacacactgagctgcagaagggacgctacaccgccaacgacacattaccggaaattcaggccgtcccggacaggctgactcaggtcctgttgaatctctatctcaatgctattcaggcgattggtcagcatggcgtgattagcgtgacggccagcgaaagcggcgcgggcgtgaaaatcagcgttaccgacagcggtaagggaattgcggcagatcattttgatgccatcttcactccgtacttcaccactaaagccgaaggcaccggattggggctggcggtcgtgcataatattgttgaacaacacggtggtacaattcaggtcgcaagccaggagggaaaaggctcaacgttcaccctctggcttccggtcaatattacgcgtaaggacccacaaggatga

SEQ ID NO: 1352 - DNA, 435 bp, Homo sapiens
  SIMILAR (237)..(422): 951254mologous to Homo sapiens exportin 5,accession number AF298880,Smith-Waterman Score=314.
ctcactctcagagaattctgtaattttctctcagctagttgaacttgaaggaccaaaacagttcggtcatcagaatgcctctatttctattggtgaagctaattcttgtgccttggacggtacccccatcttcctccttcctcacctggccagagacaggttgggatcagtgggcctgaggtggctgttgtggtagtatatacccacccttcacctagtaaccctgctttcttgctttagcggtttgctgtgtttcaaagaagggtgctgaccacagtagtgctcccccagcagatggagacgatgaagaaatgatggccacagaggtcaccccctcagctatggcagagcttacagacctgggcaaatgtctgatgaagcatgaggatgtttgtacagcgctattaattacagcctttcatttccctggcctgg

SEQ ID NO: 1353 - DNA, 4701 bp, Homo sapiens
  SIMILAR (1213)..(2709): 931254mologous to Homo sapiens RANBP21,accession number AF271159,Smith-Waterman Score=2367.
tggtggagacccaagaagggaagacaactataattgaaggccgtatcacagcgactcccaaggagagtccaaatcctcctaacccctctggccagtgccccatctgccgttggaacctgaagcacaagtataactatgacgatgttctgctgcttagccagttcatccggcctcatggaggcatgctgccccgaaagatcacaggcctatgccaggaagaacaccgcaagatcgaggagtgtgtgaagatggcccaccgagcagagctgcagagggagctgcaaagactatcccctcttcccgccactcaggtctattaccaaatcacaggcctcggcttcctgaaggagttgttccgaagagcaaaccccaactcaaccgggcccttagcaaaggcgcaaggagggtacctgacgcgctgggctcctggctccgtcaagcccatctacaaaaaaggcccccgctggaacaggggagaagccaatcgcaaagctcactttagcaccgtgcagtggccagcaccaagtgccatcgcccatgcaaaggatgacgtcagccccctccagcccacacagtgcctgctggacaacatcaagaagaaagtagtgcccctgtctggtcgcccgggaaacacagactcaacgtgccaggagtcacgtagcatctacctgaagagccaagcacttgctgtcaccttcacccactttcttactgcaactgctgaacaggctgagcccagccagctgctgtcaccgcctccaggactcggggaaaagccccctgcagacttggtgctgcagtggatgaggctccacgggcaaagcagcactactgcaccagcccctctcacccagcacaaaggagagtttcatcttctgattctggagcatccagctgcagcttcccacccccgccgcccgccgcggcccggtaccaacgggtggtctcgccgagggagctgtcgtgcctcgtggtcccgggactgcagtggtgtgcgctctcggcgcgtggcgctaggcatggcgatggatcaagtaaacgcgctgtgcgagcagctggtgaaagcggtgacggtcatgatggaccccaactccacccagcgctaccggctggaagccctcaagttttgtgaggagtttaaagaaaagtgtcctatctgtgtcccctgtggcttgaggttggctgagaaaacacaagttgccatcgtcagacattttggccttcagatcctggaacacgttgtcaagtttcggtggaacggcatgtctcgattggagaaggtgtattttgaagaacaatggtcctggaacctgattgccaaaggaccctttgaacattttggaagaggagaaccatattaaagatgctctgtctcgaattgtagtggaaatgatcaagcgagagtggccacagcattggcctgacatgctaatagaattggacactctttccaaacaaggggaaacacagacagaattggtgatgtttatccttttgcgactggcagaggatgtagtgacttttcagacacttccccctcaaagaagaagggacatccagcaaacattaacccagaacatggaaaggatcttcagttttctgcttaacacacttcaagaaaatgtaaacaagtatcagcaagtgaagacagatacttctcaggagtcaaaggcgcaagcaaactgtcgagtaggagttgcagcactgaatactctagcaggctatattgactgggtgtctatgagtcacatcactgctgaaaactgtaaactcctggagatactgtgtttgctgttgaatgaacaggaacttcagttgggagccgctgagtgtcttctcattgcagtcagcagaaaaggcaagttggaagaccggaagcccttgatggtcttatttggagatgttgccatgcattatatactctccgccgcacagactgctgatggaggaggtttggtagaaaaacactacgtctttctgaagaggctctgtcaggtgttgtgtgcgctgggcaatcagctgtgtgcattgctgggtgcagattctgatgtagaaacaccatcaaactttggaaaatacctggaatcttttcttgctttcacaacccatccaagtcagtttctacgctcttcaactcagatgacttggggagccctcttcaggcatgaaatcctgtcccgtgatcctttgctattagcaataataccaaaatatcttcgtgcttccatgactaacttggtcaagatgggctttccttctaaaacagacagccctagctgtgaatattctcggtttgattttgatagcgatgaggacttcaatgctttcttcaactcctcccgagcacaacaaggagaggtgatgaggttggcatgtcgtttggatcccaaaactagcttccagatggctggggagtggctaaagtatcaactatcaacttttcttgatgctggttctgtgaattcttgttctgcagttggaactggagaaggaagcctctgttccgtcttctcaccttcattcgtgcagtgggaagccatgactctttttttggaaagtgttatcacccagatgtttcgaacactaaatagagaagaaattcctgttaatgatggaatagagctattgcagatggttctgaactttgataccaaggatcccctcatcctgtcctgcgtccttactaatgtctctgcactctttccatttggtcacctacagaccagagttcctgccccaggtcttctctaagctattttcatctgtcacttttgaaactgttgaagaaagtaaggcccccagaacccgggcagtgaggaatgtgaggaggcatgcttgttcctccatcatcaagatgtgtcgtgactacccccagcttgtgctgcccaattttgacatgctttataaccatgtgaagcaactcctctccaatgagctactcctgacacaaatggagaagtgtgccctcatggaagccctggttctcattagcaaccaatttaagaactacgagcgtcagaaggtgttcctagaggagctgatggcaccagtggccagcatctggttttctcaagacatgcacagagtgcgtgtcagatgttaatgctttcgttgcgtatgtgggtacagatcagaagagctgtgacccaggcctggaggatcagtgtggcttaaaccgtgcacgaatgagcttttgtgtatacagcattctgggtgtggtgaaacgaacttgctggcccactgacctacaagaggccaaagctgggggatttgcggtgggttatacatccagtggaaatccaatcttccgtaacccctgcacagagcagattctgaaacttcttgacaatttgcttgcgcttataagaacccacaatacattatatgcaccagaaatgctagccaaaatggcagagcctttcaccaaggctctgggatatgcttgacgcggaaaaatctgctatattaggattacctcaacctctcttgggaactcaatgactctcctgtcttcaaaaccgtcttgggaaaggaatgcagcgtttctttcttcttaccctcttatggaaaactgttttcatatcctaggggaagggcagggcccttccatgcagcaagacttctatactgtggaggaccttgctacccagcttctcagctcagccttctgtcaacttgaacaatattcctgactaccgactcagacccatgcttcgggtctttgtaaagcctctggtgctcttctgtcccccagagcactatgaagccctggtatcccccatcctcggacctcttttcacctacctccatatgaggctttctcagaaatggcaagttatcaaccaaaggagcctgctgtgtggagaagatgaggctgcagatgaaaacccagagtctcaagagatgctggaggagcaactggtgaggatgttaacccgagaagtcatggacctaatcacggtttgctgtgtttcaaagaagggtgctgaccacagtagtgctcccccagcagatggagacgatgaagaaatgatggccacagaggtcaccccctcagctatggcagagcttacagacctgggcaaatgtctgatgaagcatgaggatgtttgtacagcgctattaattacagccttcaattccctggccttggaaagattactctgtcctgccagaggacaaccttcaaaagttctgcttgcctctccttcaaaccaagtgcttgtcagggacactgctcgcagatgcagttacgtggcttttcaccagtgtgctgaaaggcttacagatgcacggggcagcacggacggggtgcatggcttcccctggtccaatctggcccttccagatatatgaggcactgcgccccagggtaccctggagataagagctgtaatggagcaaatcccttgaaatacagaaggactcactggaccagtttgactgcaagcttttaaacccctccctgcagaaagtggctgacaagcgccgaaaggaccaattcaaacgcctcattgctggttgcattgggaaacccttgggagagcagttccgaaaagaagttcacattaagaatcttccctcacttttcaaaaaaacaaagccaatggtggagacggaggtgctggacacatgatgggggtggccctggccaccatctttgaaccctgaatcaagcttttgggcatccttcaaaaaaaa

SEQ ID NO: 1354 - DNA, 921 bp, Homo sapiens
  SIMILAR (903)..(349): 441254mologous to Homo sapiens mitochondrial ribosomal protein S18a,accession number AB049952,Smith-Waterman Score=269.
gttgggcaaaaattcctgtcccccagaactgaacaatgccctaagcccccatagcagttggcaaggggaccaaatgccccggcttgcttatagctcccaagcattgctactgtgcaggccaagggtactgaagttagtcccactgtcccctgtccatgcatgttggagggaccaggccatcgtggtggggtgggacaggagtatagttgtggccaagggcttgtgagtgggcctcctactccccagcacaggtgcaggaggaactctggaagcactgctctctgtcagtgatacagcttccaaggtgtttcttgaattagccagacattgtccctcagaaggggtgaaccccacgggccatgcgcaccctgttccaagccgggggccttttttgtagatgggctttgacgggagccaggagcccagcgccgtcaagttacccggttgagtttggggtttgctcttcgggaacaaactccttccaggaagccgaggccttgtgatttggtaaatagacctgctcggtgggccatcttcaacaacactccctcgaatcttgcggtgttccttcccctggcaataggccctgtgaatctttcggggcaagcaatccctcccatgaggccggatgaaactggctaagcaagcagaacatcgtccatagttatacttgtgcttcaggttccaactggcagatggggcactggcccagaggggttaggaggatttggactctccttgggagtcgctgtgatacggccttcaattatagttgtcttcccttcttgggtctccaccacttccctgaacccgcgagctggaagccgagacccagctggtcgctgccgggcccgctagtagcccacggagaaaacgcccacagccgaacaccagagccttgaggccccccgcacgcgtggg

SEQ ID NO: 1355 - DNA, 546 bp, Homo sapiens
  SIMILAR (49)..(390): 1001254mologous to Homo sapiens ribosomal protein L3,accession number X73460,Smith-Waterman Score=596.
  misc_feature (1)...(546): n = a,t,c or g
atggggntgnnnnnncaactgaatggccgttcaattcggcacgaggtgatgtctcacagaaagttctccgctcccagacatgggtccctcggcttcctgcctcggaagcgcagcagcaggcatcgtgggaaggtgaagagcttccctaaggatgacccatccaagccggtccacctcacagccttcctgggatacaaggctggcatgactcacatcgtgcgggaagtcgacaggccgggatccaaggtgaacaagaaggaggtggtggaggctgtgaccattgtagagacaccacccatggtggttgtgggcattgtgggctacgtggaaacccctcgaggcctccggaccttcaagactgtctttgctgagcacatcagtgatgaatgcgcctgcttcctctgcgccagaagaaggcccacctgatggagatccacgtgaacggaggcactgtggccgagaagctggactgggcccgcgagaggcttgagcagcaagtacctgtgaacccagtgtttgggcaggatgagatgatcgacgtcatcc

SEQ ID NO: 1356 - DNA, 508 bp, Homo sapiens
  SIMILAR (289)..(450): 1001254mologous to Homo sapiens ribosomal protein L3,accession number M90054,Smith-Waterman Score=271.
  misc_feature (1)...(508): n = a,t,c or g
accacgagcaaaggctcaaaagggttctcccgttttgtgggcacaaaaaagttgtcccccaaaaaccaccagggccctggccaaggttggcctgtattggggcatggcatcctgctcgtgtagctttctctgtggcacgcgtggggcagaaaggctaccatcnccgcactgagatcacaagaaaagatttataagattggccagggctaccttatcaaggcggcaagctgatcaagaacnaatgcctccactgactatgacctatctgacaagagcatcaaccctctgtccttgctggtgcagacgaagcggcgggctctggagaagattgaccttaagttcattgacaccacctccaagtttggccatggccgcttccagaccatggaggagaagaaagcattcatgggaccactgaagaaagaccgaattgcaaaggaagaaggagcttaatgccaggaacagattttgcagttggtggggtctcaataaaagttattttcccctg

SEQ ID NO: 1357 - DNA, 681 bp, Homo sapiens; identical to SEQ ID NO: 286
  SIMILAR (290)..(622): 991254mologous to Homo sapiens ribosomal protein L3,accession number M90054,Smith-Waterman Score=566.

SEQ ID NO: 1358 - DNA, 1254 bp, Homo sapiens; identical to SEQ ID NO: 287
  SIMILAR (616)..(1122): 831254mologous to Homo sapiens ribosomal protein L3,accession number M90054,Smith-Waterman Score=741.

SEQ ID NO: 1359 - DNA, 903 bp, Homo sapiens; identical to SEQ ID NO: 288
  SIMILAR (415)..(903): 841254mologous to Homo sapiens ribosomal protein L3,accession number M90054,Smith-Waterman Score=732.

SEQ ID NO: 1360 - DNA, 525 bp, Homo sapiens
  SIMILAR (7)..(138): 441254mologous to Homo sapiens putative p150,accession number U93572,Smith-Waterman Score=82.
ctctaaattggaaaagagtaagtcaaattgtctctttctgtagatagcatgatcttatatatagacaacctaaagactttaccaagaaaaacccttacaactgataaattcagtaaaatatcagaatataatattagtagtattttgatgcatcaatgatgaaaaagctgaaaaagaaatcaggaagacaatcccatttacaataattaaaagataaaatacctcggatctaaccaaaaaggtgaaaggtctctacaagggaaactacaaaacactaatgaaagaaataaacaaatggaaagacattccatgtgcatgaatcagaagaattaatatcattaaaattgtttacccaaagtaaacttgattcaaagcaatctctatcaaaatactattgtcatttgtcacagaaattgaaaacaaaaataccaaagttcatatgaaatcaaaaaagaatcagaatagccaaagcaaccctgagctgctggaacctattccctatgaattcatggcataataggtgtt

SEQ ID NO: 1361 - DNA, 1344 bp, Homo sapiens
  SIMILAR (394)..(1341): 891254mologous to Homo sapiens ribosomal protein L3,accession number X73460,Smith-Waterman Score=1465.
atgaaagcagctgggagaggggatgtaccctgcaaagccagagatgcagagatacccaaggccatgggagcccacctcttgcatcagcatgacctggatgtgagacatggagtcaaagagcccttttgggtgacaccatttctcctccaggtctgtccaggtttctgtcatctcttgccttaccatagatattttcagtccttaatggtcacctacaaaatattcattgatgtggccagaaagttttctgctcccagacatgggtccctcggcttcctgcctcagaagcgcagcagcaggcatcgtgggaaggtgaagagcttccctaaggatgatccgtccaagccggtccacctcacagccttcctgggatacaaagctggcatgacccacatcatgagggaagtcgacagcccagcatccaaggtgaacaagaagcagactgtcttcgctgagcacatcagtaatgaatgcaagaggcgtttctataagaactggcataaatctaaaaagaaggcctttacgaagtactgcaagaaatggcaggatgaggatgtcaagaagcagctggagaaggacttcagcagcatgaagaaatactgccacgtcatccgcgtcattgcccacacccagatgcgcctgcttcctctgcgccagaagaaggcccacctgatggagatccaggtgaacggaggcaccgtggctgagaagctggactgggtctgcgagaggctcgagcagcaggtaaatgtgaaccaagtgtttgggcaggatgagatgatcgacgtcattggggtgaccaagggcaaaggctacaaaggggtcaccagtcgttggcacaccaagaagctgccctgcaagacccaccgaggcctgtgcaaggtggcctgtattggggcatggcatcctgctcgtgtggccttctctgtggcacgtgctggggagaaaggctaccgtcaccgcactgagatcaacaagaagatctataagattggccagggctaccttatcaaggatggcaagctgatcaagaacaatgcctccactgactctgacctgtctgacaagagcaccaatcctctgggtggctttgtccactatggtgaagtgaccaatgaccttgtcatgctgaaaggctgtgtggtgggaaccaagaagcgggtgctcaccctccacgagtccttgctggtgcagatgaaacggcaggctctggagaagattgaccttaagttcattgacaccacctccaagtttggccatggctgcttccagaccatggagcagaagaaagcattcatgggaccactcaagaaagacggaattgcaaaggaagaaggagcttaa

SEQ ID NO: 1362 - DNA, 1134 bp, Homo sapiens; identical to SEQ ID NO: 289
  SIMILAR (1)..(789): 911254mologous to Homo sapiens ribosomal protein L3,accession number X73460,Smith-Waterman Score=1269.

SEQ ID NO: 1363 - DNA, 1380 bp, Homo sapiens
  SIMILAR (272)..(988): 501254mologous to Homo sapiens ribosomal protein L3,accession number X73460,Smith-Waterman Score=441.
  misc_feature (1)...(1380): n = a,t,c or g
gcgtaantcgaatctgacggcgtgacgtctcacagaaagttctccgctcccagacatgggaccctcggctttctgcctcggaagcgcagcagcaggcatcgtgggaaggcgaagagctttcctacggacgacccgcccaagccgggccacctcacaggcttcctggcatacacggctggcatgactcacatcgtgcgggaagtcgacaggccgggatccaaggcgaacaccaaggaggcgggggaggctgcgaccattgtagagacaccacccatggtgtctgttgggcattgtgggctacgtggaaacccctcgaggcctccggaccttcaagactgtctttgctgagcacatcagtgatgaatgcaagaggcgtttctataagaattggcataaatctaagaagaaggcctttaccaagtactgcaagaaaatggcaggatgaggatggcaagaagcagctggagaaggactttcagcagcatgaaagaagtactgccaagtcatcccgtgtcatttgcccacacccagattgcgcctgcttcctcttgcgccagaaagaaggcccacctgatggagatccaggttgaacggaggccnctgtggcccgagaagctgggactgggcccgcgagaagcttgaagcagcaggtacctgtgaaccaagtgttttgggcaggatgagaatgatcgaccgtcatcgggggtgacccaggggcaaaaggctacaaaagggggtcaccagttcgttggcacaccaagaaagctgcccccgcaagaccccaccccagggcctgcgcaaaggtgggccttgtattgggggcatggcaatcctggttcgtgtagccttctctgttggcaagccgctggggcagaaaaggcttaccatttcaccgcactgagatcaaccaaggaaggatttttaaagattggcccagggctaccttaatcaaggaccggcaagctgatcaaagaccaatgcctccacttgaattatgacctatcttgaccaagagcatcaaaccctctgggtggctttgtcccactattggtgaagtgaccgaaatgactttgtcatgcttgaaaggcctgtgtggtgggaaccaaaaaagcggggtgctcaccccttccgcaagtccttgctggtgcagacgaaagcggcgggctctggagaagattgaccttaagttcattgacacccacctccaagtttgcgccatggccgcttccagaccatggaggagaagaaagcattcatggggaccactgaagaaagaccgaattgccaaggaagaaggagcttaatgccaggaacagattttgcagttggtggggtctcaataaaagttattttccactgaaaaaaaaaaaaaactcgggg

SEQ ID NO: 1364 - DNA, 1102 bp, Homo sapiens
  SIMILAR (147)..(644): 381254mologous to Rattus norvegicus myosin regulatory light chain,accession number D14688,Smith-Waterman Score=145.
tgaaaaatcgatgaccctagtccagtttggaggacttccggcgccgccactgtccggccacagcctaacgctcttcgctgtcgtttgctgtctcgcgcagggcggtccccggttctggtgtttggcgtcggaattaaacaaccaccatgtcgagcaaaaaggcaaagaccaagaccaccaagaagcggccctcagcgtgcaacatccaatgtgtttgccatgtttgtttcactcacagattcagggagttcaaagagggcctttcaacatgattgatcaggaacagagatgggtttcattcggacaagggaaggttttgcatgatatgcttgccttctctagggaagaatccccactggatgcataccttgatgccatgatgaatgaggccccagggccccatcaagtttcaccatggttcctgaccatgttttggtgagaaagtttaaatcgcacagatcccctgaagattgtcatccagaaaccgccttttgctttgctttgattgaaagaaagcaaccaggcacccattccgggaagattacctaaggaggagctgctgaccaacccatggggggatcgggtttaccagattgaggaagttggatgaacctgtacaggagaagcacctatttgacaaaaaaaggggaattttcaaattacatcggagtttcaccacggcatcctaactggaaggcccccaaagcacaaagatgacttgaaagaacttttagcttaaaatcttcccagttacaattgtcttactctcttttacttctcagacactttcccccaccctcaatagaaccctgtggcatgcaacttagtttcacagctttgcctcttctttttgatgtatttattccagacctttctgccactttagcacttggtataatcagactgggaaatgggggatgagggtggtaaattgtattgaaaaagatcgcgaataaaaaatccacaaatgtgaaagcccagaaaaatatattcgtatttcctgggttttgctgggatttttacatttttatataataaaaatgttattttgaaataaagattatgctgactcaaatgcaatgtaaaaaaaaaaaaaaagggc

SEQ ID NO: 1365 - DNA, 483 bp, Homo sapiens
  SIMILAR (20)..(205): 931254mologous to Homo sapiens tumor-associated antigen,accession number X81109,Smith-Waterman Score=292.
  misc_feature (1)...(483): n = a,t,c or g
gaaaccttctagcaacaggatgagtctgcagtggactgcagttgccaccttcctctatgcggaggtctttgttgtgttgcttctctgcattcccttcatttctcctaaaagatggcagaagattttcaagtcccggctgttggagttgttagtgtcctatggcaacaccttctttgtggttctcattgtcatctcggcccttgtccacactctccaagcacattacaggggacctgattgctacacgttcagaatgcgtttgctgtcatcctgctgtgcctgccaggcctgcacagccttggctnctacgcctgagcgtggagagcacgagttagttgtagtccggcttgcggtggggctgacttcctgttggtttgagcccctttttgttttgccctctgggtgttttctttggtcccgcaggagggtgggtggagcaggtggactggagtttctcttgagggcaataaaagttgtcatggt

SEQ ID NO: 1366 - DNA, 454 bp, Homo sapiens
  SIMILAR (2)..(214): 1001254mologous to Homo sapiens tumor-associated antigen,accession number X81109,Smith-Waterman Score=348.
  misc_feature (1)...(454): n = a,t,c or g
naagttggaggaagagaacaggagcctgaaggctgacctgcagaagctaaaggacgagctggccagcactaagcaaaaactagagaaagctgaaaaccaggttctggccatgcggaagcagtctgagggcctcaccaaggagtacgaccgcttgctggaggagcacgcaaagctgcaggctgcagtagatggtcccatggacaagaaggaagagtaagggcctccttcctcccctgcctgcagctggcttccacctggcacagccttggcttccacgcctgagcgtggagagcacgagttagttgtagtccggcttgcggtggggctgacttcctgttggtttgagcccctttttgttttgccctctgggtgttttctttggtcccgcaggagggtgggtggagcaggtggactggagtttctcttgagggcaataaaagttgtcatggtgtga

SEQ ID NO: 1367 - DNA, 426 bp, Homo sapiens
  SIMILAR (16)..(207): 1001254mologous to Homo sapiens tumor-associated antigen,accession number X81109,Smith-Waterman Score=316.
ccttctagcaacaggatgagtctgcagtggactgcagttgccaccttcctctatgcggaggtctttgttgtgttgcttctctgcattcccttcatttctcctaaaagatggcagaagattttcaagtcccggctggtggagttgttagtgtcctatggcaacaccttctttgtggttctcattgtcatccttgtgctgttggtcatcggtgagtgagctatggctgagggcagctacctgacctagaccctgggctctgctgcaaaaccctttgccacttttgatgtgtagcatccagttttggctgctaggagacagaccaatgaaatgctgtgtctttctcttgagggagggaagaggctccctttgcccatgctgctgaccgctagtcggttcttcactttgaggcccctctaggccgtacat

SEQ ID NO: 1368 - DNA, 1657 bp, Homo sapiens
  SIMILAR (1528)..(1569): 711254mologous to Homo sapiens Human secreted protein, SEQ ID NO: 6953,accession number AAG02872,Smith-Waterman Score=49.
tttccggccgcggtatgaggggcggggccggggctgctgtgggagagttcggttgctgcggcggggcctgcacgttgactgtgggaaactcggaaacaagctcacatcttcctgtgggaaaccttctagcaacaggatgagtctgcagtggactgcagtctgccaccttcctctatgcggaggtctttgttgtgttgcttctctgcattcccttcatttctcctaaaagatggcagaagattttcaagtcccggctggtgggagttgttagtgtccctatgggcaacaccttcttttgttggttctcattgtcatccttgtgctgttgggtcatcgaatgccgtgcggcgaaatttcgggaagtatggatggatgttgacgggaaaagggtgaacctcccaggaacaatcccggggggccatggggaggcactttcccacatggaagctttttccgtggccccaggagggaatctcttacattggctgggcttttccttgttgctgttccttcctgcttagacgcctgggtgactctcatttcgcagcaggccaacgctgctgggcctccaatgaagcctttaaaaagcaggcggagaagtgctaagtgaaggcggcaagaaagtacatggaggagaatgaccagctcaaaaaaggaagctccttttgacgaaggcaagttgaatttcgaaaatgctgagttaaagttggaggaaaagaaacagggagctgaaaggctaacctgcagaagctaaaggacgagctgggccaggcactaagcaaaaaactagagaaaggctgaaaaaccagtttctggcccatgcggaagcagttcatgaggggcctcacccaaggaggtacgaccgcttgctggaaggagcaaccaaaagctgcaggcttgcaagtagatggtcccatggaccaagaaggaagagtaagggcctccttccctacccctgcctgcaagctggcttccaaccctggcaacgtgcctgctgcttccctgaagaaccccggcctctcccctccagtaacttctgtttgtgcccttctgcttcccccaattcccttccaacagctcatagctcgtcatctcggcccttgtccacactctccaaggcacattacagggggacctgattgctacacgttcagaatgcgtttgctgtcatcctgacttctgcctggccaggcactgcacagcctttggcttttcacgcctgagcgtggagagcacgagttagttgtagtccggcttgcggtaggggctgacttcctgttggttttgagccccttttttgttttggccctctgagtgttttactttggtcccgcagaagggtgggtggaagcaggtggactggagtttctcttgagggcaataaaaagttgtatgatgtttgtatgtgttttgtatttctctggagtgcaatggtgcaatctcagctcactgcaacctctgcctcccaggttcaaaccattctcttgcctcagcctcctgagcagctgggattacaggcgctggccacacacccagctgattgttgtatttttagtagagctgggtttcaccatgttggccaggctggtctcgaactcctgacctcaggcaatccacccacctcagcctcccaacatgctgcaattacagatgtgag

SEQ ID NO: 1369 - DNA, 1510 bp, Homo sapiens
  SIMILAR (420)..(587): 831254mologous to Homo sapiens beta-1,3-galactosyltransferase -4,accession number AB026730,Smith-Waterman Score=226.
ccaggcccggggagctagtctccgcccttcgctcttacggatcccctcggagtacgcttttaccatgcaactcaggctcttccggcgcctccttctcgccgctttgctgctggtgatcgtctggaccctcttcgggccttcggggttgggggaggagctgctgaccctttcactagccttcttgctcccagcccccgccttaccggggccgcccctggccctgccccgccttttgatccccacccaggaagcttgctgtggtcccggggcccctcccttcctgctcatcctggggggcacggctccggagaacctgaaccagagaaacgccattcgggcttcgaggggcgggctgcgcgaggcccgggggctcagggtacagacgctcttcttgctgggagagccgaacgcacagcaccccgtgtggggtttcccagggggagtgaactgggccttcggagtcagcagcccagggggatatcttgcaggccgccttccaggactcctaccgcaacctcaccctaaagaccctcagcgggctgaactgggctgagaaacactgccccatggcccgatacgtccttcagaacggacgaagatgggattgcaaacgtccctgaactggtatcagagctggtcttgcgagggggccgttgggggcaatgggagagaagcacggaaccccagagagaggctgagcaggaaggaggccaggttttgcacagcgaggaagtgcctcttctgtacttgggccgggtgcactggcgcgtgaacccctctcggacaccggggggcaggcaccgcgtatcagaggagcagtggcctcacacctggggcccctttccaccctatgcctcaggcacggggtatgtgctgtcagcgtctgctgtgcagctcattctcaaggtggccagcccgggcaccccttctcccattagaggatgtctttgtgggggtaagtgcccgacgaggaaggcctcgccccaacacagtgtgtcaagctggctgtgtgccaacccactacccgctagaccggtgctgctatgggaaattcctgctgacgtcccacaagctggacccctggaagatgcaggaagcctggaagctggtgggtggctctgaacggggaaaaggactgcgccccttttgctccctggttcccagggaagtccctgggcatcctgcggtgtcgaagcaatagccctggcttcagagctgagagtgcctggggcccacaggaaaggcaggaacaggaccttctctctccccaggcccaacgcaggggccctcactggctgcagctgatctgttttccttataccagatcctcagtctcactaaagacagcgatatgggagacacccagggggcctggcccgccagcccaaaagatggtcatcgggaagagaaaaagaaaaaaatgctgcagttgttctctcaagctagggcagaagaggggtgtcaagctcctcaataaacttgtctccacttcaaaaaaaaaaaaaaaaaa

SEQ ID NO: 1370 - DNA, 455 bp, Homo sapiens
  SIMILAR (1)..(264): 531254mologous to Rattus norvegicus UFD1,accession number AF234601,Smith-Waterman Score=198.
gccatcaactataatgaaaagatctacgaactgcgtgtgatggagaccaaaccccgacaaggcagtgtccatcattgagtgtgacatgaacgtggactttgatgctcccctggctacaaagaacccgaaagacaagtccagcatgaggagtcgacagaaggtgaagccgaccacagtggctatgctggagagctggcttccgcgctttctctggatctggcaatagactggatggaaagaagaaaggggtagagcccagcccctccccaatcaagcctggagatattaaaagaggaattcccaattatgaatttaaacttggatgaagctggaggcagattcgtcgctttctctggagaaggacagtcattgcgtaaaaagggaagaaagccctaagtgaggactgttggctgattggaaaataataaaagaatcatttgcaacaaaaaaaaaaa

SEQ ID NO: 1371 - DNA, 476 bp, Homo sapiens
  misc_feature (1)...(476): n = a,t,c or g
nggatggccaatagacnatagtgccgcgctgcatcttttctcagctccctgcagcatgggtgctgggccctccttgctgctcgcctgcgacagtgtggacctacctgtagcagctagcaaaggcctctagcagctacagtcccttctggagtctttatttgcatgcaaaatgcaaaggagtcctggtgacctacctccaaggcagctgccctcctgaacactcccttggaaaacagtaaacatcattttggaatgtgaacaaccagagactacacaggagaaaggaaaaaaaaattctgaagatgcaaaatcttgggtggcttcaccgttcagttttttaataaaaggaacaatatacnnnnnnnnnnnnnnnnnnnnncctnnnnnnnnnnccgggcccccaatcccccttaaagggagcggaattacaatcaatggcccgcggtttaacaaggcggggaggggtggaaannnnt

SEQ ID NO: 1372 - DNA, 1497 bp, Homo sapiens
  SIMILAR (79)..(1038): 991254mologous to Homo sapiens ubiquitin fusion-degradation 1 like protein,accession number U64444,Smith-Waterman Score=1690.
ggcacgaggaagagcggtcggcggggtttcttcgttgcattgcctgagaggagcggagtctgccaggtggtgtccatcatgttctctttcaacatgttcgaccaccctattcccagggtcttccaaaaccgcttctccacacagtaccgctgcttctctgtgtccatgctagcatggcctaatgacaggtcagatgtggagaaaggagggaagataattatgccaccctcggccctggaccaactcagccgacttaacattacctatcccatgctgttcaaactgaccaataagaattcggaccgcatgacgcattgtggcgtgctggaatttgtggctgatgaaggcatctgctacctcccacactggatgatgcagaacttactcttggaagaagacggcctggtccagttggagaccgtcaaccttcaagtggccacctactccaagagtaagttctgctacctcccacactggatgatgcagaacttactcttggaagaaggcggcctggtccaggtggagagcgtcaaccttcaagtggccacctactccaaattccaacctcagagcgctgacttcctggacatcaccaaccccaaagccgtattagaaaacgcacttaggaactttgcctgtctgaccaccggggatgtgattgccattaactacaatgaaaagatctacgaactgcgtgtgatggagaccaaacccgacaaggcagtgtccattcatgagtgtgacatgaacgtggactttgatgctcccctgggctacaaagaacccgaaagacaagtccagcatgaggagtcgacagaaggtgaagccgaccacagtggctatgctggagagcttggcttccgcgctttctctggatctggcaatagactggatggaaagaagaaaggggtagagcccagcccctccccaatcaagcctggagatattaaaagaggaattcccaattatgaatttaaacttggtaagataactttcatcagaaattcacgtccccttgtcaaaaaggttgaagagaatagaactacagacatccaagccactcctaccccgctcacccctgctacacaccgcctccatacctttgaccggcctatggctgtactcggattgcattctcagcctccacttcaagcctgcgttccctggggaggtcattcaaccctagatccaccatatgtcatgcccaaccaatctcagttactttgcgagttcacctccatcctgagtggacgctcaagcaagactgctggagctgcagatctgggagacatggcggacggcagcggctggcagccgccgcgcccctgcgaggcctaccgcgccgagtggaagctctgccgcagcgccaggcacttcctacaccactactacgtccacggcgagcggccggcctgcgaacagtggcagcgcgacctggccagctgccgcgactgggaggagcgccggaacgccgaggcccaggagaaggacgagtga

SEQ ID NO: 1373 - DNA, 1422 bp, Homo sapiens
  SIMILAR (74)..(403): 491254mologous to Homo sapiens ubiquitin fusion-degradation 1 like protein,accession number U64444,Smith-Waterman Score=176.
tgggagagcggtcggcggggtttcttcgttgcattgccctgagaggagcggagtctgccaggtggtgtccatcatgttctctttcaacatgttcgaccaccctattcccagggtcttccaaaaccgcttctccacacagtacccgctgcttttctttgtccagtgctagcagggcctaatgacagggttcgattggggaaaaggaggggaagataattatgccacccctcggccctggaccaaactcagccgactttaacattaccgtatcccaatgctgttcaaactgaccaattaggaattcggaccgcatgaccgcattgttgcagtgcctggagtttgtggctgatgagggcatctgctacttcccaacactgggatgatgcagaacttactcttggaaagaaggcggcctggtcccaggtgaagagcgtcaacctttcaagtgccaccctactcccaaatttccaacctcagagcccttgactttctgggacatcaccaaccccataagccgtttttgaaaaccgcacttaggaactttgcctgtctgatccaccggggatgtgattgccatccaactataatgaaaagatcctacggaactgcgttgtgatggagacccaaaccccgacaaggccagtgtcccatcattgaagtgtgaaccattgaaccgtggaactttgattgcttccccctggggctaccaaagaaccccggaaagaccaagtcccaccatgaggagtccgaacagaaggtgaaagccgaccccacagtggcctatgcctggaagagcctgggcttcccgcgcttttctcgtggatctgggcaatagacgtggatggaaagaagaaaggggtagagcccagccccctccccaatcaagccctggagatattaaaagaggaattccccaattatgaatttaaacttggtaagataactttcgatcgagaaattcacgtccccttgtcaaaaaggttgaagaggatgaagctggagggcagattcgtcgctttctctggagaaggacagtcattgcgtaaaaagggaagaaagccctaagtgaggactgttggctgattggaaaataataaaagaatcatttgcaacatcttggcttttagttactggcactgacagggacgagcctcatcagagaatactctgttacttaagatttatttagagttacctaagaattattaagtttgacttggaagtggagcagcaggactttgtagttgtatgcttgatttggggaaagacaaagagctgtccctgagggcctgtagatagctgcctcctcacgtcttcacactttcagcttgaggggagctcccactgcctcagcaggagcaattgtgcatccctaattctgtcaaaacctatgaaggtgagtaaattgtctaacatgaaaaa

SEQ ID NO: 1374 - DNA, 586 bp, Homo sapiens
  SIMILAR (442)..(2): 1001254mologous to Homo sapiens heme oxygenase-2,accession number D21243,Smith-Waterman Score=767.
gctccggctcgttctgccctatgtagtggatccgctccacgtacttctgggcagccttggggcactgcacctgctcctcccagttttcaccaaagaaatactccatgtccttggtcagcgcctccttccggtgcagctccatggggaagtacaaaggggcaaaggctggatggtccttgttgcgctccatttcctcctcgagggctgagtatgtgaagtaaagtgccgtggtggccagcttaaacagctccttcttaatgttgcctttcaagaagtccttgacaaactgggtgttttctgcccggtcgtgtgcttccttggtcccttccttcaggagctccgagaggtcagccattctcatttggttctccttttctagggccccagagttctttttttctgactcgtctaccccctctgaggtttccacttccgctgacattgctgctgggtgtggttcttgctgctctcgctcttctggtcctgccccaggtcgctgttcgcctgtccgccagcctccagtcagcgtgtccgtcagctactccctcaggcgccgcagtccctgcagcccagccggactggcgcg

SEQ ID NO: 1375 - DNA, 1515 bp, Homo sapiens
  SIMILAR (980)..(1372): 561254mologous to Homo sapiens HSCARG,accession number AF225419,Smith-Waterman Score=296.
atggctcctctgcagcagcacatagcagtcttgccagacacaacagcagatcaagtaactactgaagatgatggctacacttggacagcacttcaacatgttgccacagccaaggaaaaaaggaaatcaagtcagacaatggaggaatcacaggatttccctcttcacatccccagaccggcgcaggggacccaaagggctgtggcccggccaagcccaggtccgaaggcctggaccgaggcagggcccgcgaaggacgcagcgcggtccgagaagccgggcggaaggaaggccccgggagggcgcggacagctcacctgccgcaggtcgctgtcgcctgtccgccagcctccagtcagcgtgcccgtcagcgactccctcaggcgccgcagtccctgcagcccagcggactggcgcgaggccggcgcaacatctctggaccggattcgtcccattctcgtcctcatggtggacaagaaactggtggtggttttcgggagcacaggtgcccagggtggctccgtggcccgcatactcctggaagatgggacattcaaggttcgagtggtgacccgaaaccctaggaagaaggcagcaaaggagctgaggctgcaaggtgcagaagtagtgcagggagaccaagatgaccaggtcatcatggagctggcccttgaattgggcttacgccaccttcatcgggaccaattactgggagagctgcagccaggagcaggaggtcactccagccgatctctggaccggattcgtcccattctcgtcctcatggtggacaagaaactgggcctccactatgtggtctacagcggcctggagaacatcaagaagctgacggcagggagattggccgccgcgcactttgacggcaaaggggaggtggaggaatatttccgggacattggcgttcccatgaccagtttggggggttcctcgctaatttggagaacctcctcctccaactttttttccccagaaaaaccccagaagggaaagagctactttgcggagcttgcccacaggtgacgttcccatggatggcatgtccgtgtctgacctggggtcctgtggtgctcagcctttttgaagatgccagaaaaatacgtcggccagaacatcggggctgagcacttgcaggcacacggccgaggagtacgcttccctgctcaccaagcacacccgcaaggtcgtgcacgatgccaagatgacttcctgaggactacgaaaagcttggctttcccggtgcccgggacctgggccaacatgttccgtttctatgccctgagaccccgacccgtgacattcgagcttgaccctgagactcaaccccaaggccctgacgctggaccagtggcttggaacagcacaaaggggacttcaacctgctgtgacgctgcccgcctcgcggccccttgtggggattcgggggcaccagaggggcaagaaggcaccaacatctgaaataaagcccatttgttctcccaaaaaaaaaaaaaaaaa

SEQ ID NO: 1376 - DNA, 1232 bp, Homo sapiens
  SIMILAR (131)..(1171): 661254mologous to Homo sapiens Similar to RIKEN cDNA 6030457N17 gene,accession number BC006146,Smith-Waterman Score= 1122.
tcattttgcgtagcgttgcgcgtgcgcagagaggccgccgtagtttgcgttttcactggtcgcccggcggccatggcggccgttctgaagccggtgctgctgggccttcgagatgcgccggtgcacggcagccccacagggccgggtgcctggactgctagcaagctgggcggcattccggatgctctgcccaccgtggctgcgcccaggcccgtgtgtcagcgctgcgggcagccgcttcgctctggtcgtgcaggtgtattgcccgctggaaggctccccgtttcaccgtctgctgcacgtgttcgcgtgcgcctgccccggctgtagcaccggcggtgcgcgcagctggaaggtgttccgctcccagtgcctgcaggtgccagagagagaggcgcaggacgctcagaaacagggaaacagccttgcagctgaggactggtgtgaaggtgctgatgactggggaagtgatactgaggaggggccttcaccacagtttaccttggattttgggaatgatgccagcagtgccaaagacgtagactggactgctcggctccaagacctccgcctgcaggatgctgtcctgggtgctgcccatcctgtgcctcctgggctgccgctcttcctgccctactacatctgtgttgcagatgaggatgattacagggactttgtcaacctggatcatgcccacagccttctgagggactatcagcagagagaaggcattgccatggatcagttgctttcccaaagccttcctaatgatggtgatgaaaaatatgagaagaccataattaaaaagtgggaggatccagaccgttttaacaaattccatgaaagcgaaattggctgcttgtcagggagcagattttgagggtattccctggagtggagagccactctttttgacctgcccctacatcagaagtcaccgagctccccagcctgcagccagtgtgggaggccaaaaggatatttgagtttcagcttatgccagcactgggtcagcatgcttcaagagtgctaatttagggtctttctgtgggaattttggaacaattcttagttttacacatgtgaggaagagttgctggcccccaaatcatcagactcccatggaagaatttttgtattatacaaagaagacccagatgaattattgtttaatgtagagcatttccttttattaatataaattaaaacaaatgtttacatccaaaaaaaaa

SEQ ID NO: 1377 - DNA, 456 bp, Homo sapiens
  SIMILAR (206)..(247): 1001254mologous to Homo sapiens Ran-BP1(Ran-binding protein 1),accession number D38076,Smith-Waterman Score=78.
  misc_feature (1)...(456): n = a,t,c or g
ttcccgggtcgacgatttcgtcctgagcagaaataaaacactggaagaagatgaagaggaacnnnnnnnnnnnnnnnnnnnnnnnnnnnnnnnnnnnnnnnnnnnnnnnnnnnnnnnnnnnnnnnnnnnnnnnnnnnnnnnnnnnnnnnnnnnnnnnnnnnnnnnnnnnnnnnnnnnnnnnnnnnnnnnnnnnnnnnnnnnnnaactgttccgatttgcctctgagaacgatctcccagaatggaaaggagcgaggcactggtgacgtcaagctcctgaagcacaaggagaaaggggccatccgcctcctcatgcggagggacaagaccctgaagatctgtgccaaccactacatcacgccgatgatggagctgaagcccaacgcaggtagcgaccgtgcctgggtctggaacacccacgctgacttcgccgacgagtgccccaagccagagctgg

SEQ ID NO: 1378 - DNA, 512 bp, Homo sapiens
  SIMILAR (1)..(150): 1001254mologous to Homo sapiens Ran-BP1(Ran-binding protein 1),accession number D38076,Smith-Waterman Score=263.
gcggccgccaaggacactcatgaggaccatgatacttccactgagaatacagacgagtccaaccatgaccctcagtttgagccaatagtttctcttcctgagcaagaaattaaaacactggaagaagatgaagaggaactttttaaaatgtaagtaggctgatgtcccagaaataggactctttaaggttgaggttacaacttttatgggtgtccaggttttggcctgacttttaatcagactgaggctgcttaaagaaagggcctaaagttggtgactaatcccatgtggaaatttaacccgttcctttcatgaatcttcaccagatgcccttgctgccctgcagccagttgcatgaagggcatcccatcttgctgctctgtccactggcatggcggccccactgcccttttttgccactggcttctgaggatccagggagtcccttggttgagcaaggggttttaagtttttgcagcatagacttctttggcatcgtgaagcttataaat

SEQ ID NO: 1379 - DNA, 1308 bp, Homo sapiens
  SIMILAR (167)..(709): 351254mologous to Homo sapiens RanBP1,accession number X83617,Smith-Waterman Score=152.
  misc_feature (1)...(1308): n = a,t,c or g
atgcgccgacccaggcggcggctttgttggctgcggtgtctggttgagtgcgggccgctgcagagccgcagtgctgtggggaacagtgaagagcagcgaaaagcttatgttttcttttccagtttgagtctagtggacactcatgaggaccatgatacttccacttgagaatacagacgagtccaaccatgaccctcagtttgagccaatagtttcttcttcctgagcaagaaatttaaaacactggaagaagatgaagaggaactttttaaaatgcgggcaaaactgttccgatttgcctctgagaacgatctcccatgaatggaaggagcgaggcacttggtgaccgtcaagctcctgaagcacaaggagaaaggggccataccgcctcctacatgcggaggggacaaagacccttgaaagatctgttgccaacccactaccatcacgcccgntgatgggagctgaaagcccaacggcaggtaggcgaccngtgccctgggttctggaaacaccccacgcttgactttcgcccgaacgagtgccccccaagcccagagctgcctggccccncccgcttccctgaatgcctgaagaatgccacagaaattccaaaaccaaagttttgaagaattgcagggaaagagatccgaaggagaggaggaaaaggaaagcaggttccagggcaaaaatgattcattgcccgaaaaaagtgtgcggaaaagccaggaagctctctgcggtgaagggaggagaccaaggaggatgctgaggcagaagcaataaatcggcttattttattatcattttcctctctgtccttatcctagttcttaaaaaatactacacctgacacctctttttcggtttgttttttattctttcattttaaccaagggacgttatattaagtacctgaactcaacattcaggttgtttttttttttttgtttctaagtttttgccctattgaagatgacttcagaaaatccattccccagtcatgaaaatgtactgtgctaactttcttttccatagtggaaacacttatttatagtcatcaaaaatagtgaataaaaaacacatttggaacctgggccagatggcaggactgtgtgtgtacaggcccctgcgctgtgagcgccgctcgcctaagcctcccgggtgtatgtccaggcctgtccgcagcacaggtgggtgctgcacctcacggtagcctgggttcctgggagagacgccctggtgtctgaggtcgtgcatgtatcttgctgtgggccttgaagctgaggtgtctgagctggcgctggt

SEQ ID NO: 1380 - DNA, 496 bp, Homo sapiens; identical to SEQ ID NO: 1096
  SIMILAR (1)..(264): 861254mologous to Homo sapiens cathepsin C,accession number X87212,Smith-Waterman Score=397.
  misc_feature (1)...(496): n = a,t,c or g

SEQ ID NO: 1381 - DNA, 1343 bp, Homo sapiens
  SIMILAR (696)..(1034): 531254mologous to Mus musculus putative,accession number AK003007,Smith-Waterman Score=236.
  misc_feature (1)...(1343): n = a,t,c or g
ttcccaaatggtttttccttggcaataggactgtcccttagatgtctcttcccatttgtagatcactgccctatctcctccatatcccctcacctaaaatagaatgggtgaaactatgatgctatgcaggatactgtcatttacattaacattaaaccgtacctgtacttgatgcaaaggacatgtgctccacaatccaggaatagccactttcaggggattttccaaatcttaattaggattgaaatgcaaaatatccctctgttctagctattgtttaaccctgggtggcatgtgggaaacactcaaggagctttaagatacaaaacactgccaggctcccttacccagtcagtcaaatccgattctggagttgggacctaggtgtgtgatgagaactgctgagtcctgtcgaaggttaagctgggcagcactgcttggcagccactggaggtgctgttcccacccatgtgcagctgggcagggtccctaccccagggcagcagttaatgggcctaggacacccctggcatatttgagattcaaggaaatgttcagtagtgggttaattaatgtggaatttccacagttcttgtatctttcacacttccattctctgcttttaaggtgagattctaagtactgtggacccataatctgtcaggtagagtctgaaatgtttttcctctcattttagggatgggcgtgttttgggcgtgctagaggtgtcacgctccattggggacgggcagtacaagcgctgcagntgtcacctctgtgccccgacatcaagacgctgcccagctgacccccaaatgacaggttcatttcgtttggccctgtgatgggctctttcaaggtctttaccccagaagaagccgtgaacttcatcttggtcctgtctcgaggatgaaaagatccagacccgggaagggaagtccgcagccgacgtccgcttacgaagcagccctgcaancaggctggccaacaaggcggttgcagccggggctcggccggacaacgtcactgtgattggtggtgcgggatagggcactgaggggtggcgcgcggccaggagcacgcatgggtatttgacttaaaaaggttcattttgtgtgtgtgcacattgtgtgttttgtgtactccctgtgggactcccatggttgtaaataaaggtttctctttttaaaaaaaaaaaaaaaaaaaaaaaaaggggggcccgttttaaagaacccttggggggcccaaattttacccgggcttgcaacgtaaaactttttccccttatggggggccgttttaaaacctaggccttggcccgggttttaaaaaggtcgggagtg

SEQ ID NO: 1382 - DNA, 470 bp, Homo sapiens
  SIMILAR (36)..(119): 1001254mologous to Homo sapiens Human secreted protein, SEQ ID NO: 5215,accession number AAG01134,Smith-Waterman Score=141.
acttctgcttaattggattgtttttattcccacaggccttgtctggttttagacagattcatgttatagatatggacactatagatgtttccaatctaaataggcagtttttatttaggtaagttttaatatcttagcggttttctttttttaagctctgataatcatttgaacttgtacattgcagtttaataatttttaaaaatgacttgagaggataatactaattttattttaaaaaacaaaaactaccattcccattgtaggtaaagttttgtaagaaaattttgggcatcttggtgatagtagttatgtaaacaaatacatgtttttgttttttcgaagaagtctccttccaaaggtttatgtgatttttgggaatatcctcacgttaactgtgctctgaagaaaggaaagaacggtagctcttcctccagttgatgtcagaagagaatactcgctggagtatt

SEQ ID NO: 1383 - DNA, 2973 bp, Homo sapiens
  SIMILAR (1153)..(2700): 991254mologous to Homo sapiens TATA element modulatory factor,accession number L01042,Smith-Waterman Score=2536.
atgagaaaaaaatttcatattattgtatgtggactggactctatcatcgccagaagatggataaatggcatgctgatatctcttctaaattatgaagatggtgtcttagatccaagctccattgtccctttgatagatggggggacagaaggttttaaaggaaatgcccgggtgattctgcctggaatgactgcttgtatcgaatgcacgctggaactttatccaccacaggaaaactgcccagcttgtagccagcttcctcaaaatattcagttttctccatcagctaaactacaggaggttttggattatctaaccaatagtgcttctctgccgttcatagctacttctttcagccatgaggatatagataatcacacagaagactcagtacagtacgtgggatatgagccccggtacttacggctcctcgccatccgccatattgttctccgcctcttcccaggtgcccacgcgcggcagggcggggaggagcgggactggcaaagcggggaggggcggggctggcgaagcggggaggggcgaggccagaaacacaaccggcagggagctgatcggttgccgccgccgccgccgccagattctggaggcgaagaacgcaaagctgagaacatggacgttaatatcgccccactccgcgcctgggacgatttcttcccgggttccgatcgctttgcccggccggacttcagggacatttccaaatggaacaaccgcgtagtgagcaacctgctctattaccagaccaactacctggtggtggctgccatgatgatttccattgtgggatttggttgctgtgtacgtggaagaagcaagcgcatgcgcacatgggcccccttcgtctcagctgtgcgggaacggccgaggctctccagcttcgctaagcaggccctgtcccaggcccagaagtctattgacagggttctggacatccaggaagaggagccgagcatctgggccgagaccattccgtatggagagccggcttccaagcacaaccttcccgaacctgaacctcgaattgcttcgcgtctcgggcactgttgggatccaaggtctgaagtacgtaaatcatcagggaagggaagaacaatcgctaacagtggacccacaccagttttcttccgaataagttcccctgtcagtggaggatgggatacttcaacctgggggttgaaatcaaacactgaacctcagagtccaccaatagcctctcctaaagcaatcacaaagccagttcggaggactgtggtcgatgaatctgaaaatttcttcagtgcctttctctcgccaactgatgtccagaccattcagaagagtccagtggtatcaaaacctccagcaaaatcacaacgaccagaagaagaagtgaaaagcagcttacatgaatccttgcacattggccagtcaagaactcctgaaacaactgaatcacaagtaaaagactcttctttgtgtgtttcaggggaaactctggcagcaggtacttcatcacctaaaactgaaggcaagcacgaagaaactgttaataaagaatcggatatgaaggtgccaactgtaagtttgaaagtatctgaaagtgtaattgatgtgaaaacaactatggaaagtatatctaatacgtctacgcagtctctcacagcagaaacaaaggacatagctttggaacctaaggaacaaaaacatgaagacaggcagagcaatacaccttctcctcctgttagtaccttttcatcaggtacttctaccaccagtgatattgaagttttagatcatgaaagtgtaataagtgagagctcagcgagctcgagacaagagactacagattcaaaatcaagtcttcacttgatgcagacatcttttcagcttctctctgcatctgcttgtcctgaatataatcgtttagatgatttccaaaaactcactgagagttgctgttcatctgatgcttttgaaagaatagactcatttagtgtacagtcattagatagccggagtgtaagtgaaatcaattcagatgatgaattgtcaggcaagggatatgctttagtgcctattatagttaattcttcaactccaaagtctaaaacagttgaatctgctgaaggaaaatctgaagaagtaaatgaaacattagttatacccactgaggaagcagaaatggaagaaagtggacgaagtgcaactcctgttaactgtgaacagcctgatatcttggtttcttctacaccaataaatgaaggacagactgtgttagacaaggtggctgagcagtgtgaacctgctgaaagtcagccagaagcactttctgagaaggaagatgtttgcaaggtaactctaacagttgaatttctgaatgaaaagctggaaaaaagggaggctcagttattatctcttagtaaggaaaaagcacttctagaagaagcttttgataacctgaaagatgaaatgttcagagtgaaagaagaaagcagtagcatttcttccttgaaagatgagtttactcaaagaattgcagaagcagaaaagaaagttcaactagcctgcaaagagagagatgctgctaaaaaggaaatcaaaaacataaaagaagaacttgccactagattaaatagtagtgaaactgcagaccttttgaaagagaaagatgagcagatccgagggttaatggaagaagactgggctgctgtatttgaactgtacaactgtgaagatgaacgctgttacttagacttggccaggctgagaggcgttcactacatcacttggcgacggcagaacaaagtctttcctcaggataagggccaccatccaaccctgggggagcacccgaagttcaccaactactctttcgatgtagaagaatttatgtatcttgtccttcaggctgcagaccacgtattgcaacacccaaagtggccatttaagaagaaacatgatgagctataa

SEQ ID NO: 1384 - DNA, 2232 bp, Homo sapiens
  SIMILAR (1064)..(1471): 281254mologous to Homo sapiens Human NAE1-beta protein,accession number AAY25339,Smith-Waterman Score=91.
gggggcggagaacaatatggcggatggcgaggagccggagaagatgagatggacaatataggatctggtggctgatagaatggcatgttgatggtgggtgtggggacactgagacttggaaggatcgtctggaaccatgtaaagaagattcctcgagcgatctggacccttcacacaccctgatttcgaacccgagcactgaatctctccagttcttgttagatacatgtaaaagttctagtcattggagctggcggcattaggatgtgagctcctgaaaaatctggccttgtcttggttttagacagattcatgttatagatattggacactattagatgtttccaattcttaaattaggcagtttttatttaggcctaaagatattggaagacctaaggctgaagttgctgcagaatttctaaatgacagagtttcctaattgccaatgtagttccacatttccaacaaggatccaggattttaacggacactttctatccgacaatttcatattgattgtgtgtgggactgggactctatcatgcgccagaagatggataaatggcatgctgatatctcttcctaaattatgaaagaatggtgtcttaagatccaagctccattgtccctttgatagattggggggacagaagggttttaaagaaaatgcccgggtgattcttgcctggaatgactgcttgtatcgaatgcacgctggaactttatccaccacaggttaattttcccatgtgcaccattgcatctatgcccaggctaccagaacactgtattggagtatgtagggatgttgcagtggcctaaggagcagccttttggagaagggggttccattagatggagatgatcctggaacatatacaatggattttccaaaaatccctagagagagcatcacaatataatattaggggtgttacgtataggctcactcaaggggtagtaaaaagaatcattcctgcagtagcttccacaaatgcagtcattgcagctgtgtgtgccacctgaaggtttttaaaatagccacaagtgcatacattcccctttgaataattacttgggtgtttaatgatgtaggatgggctgtatacatacacatttgaaggcaggaaaggaaagggaaaactgcccagcttgtaggccagcttcctcaaaatatttcagtttttctccatcaggctaaactacagggaggttttggggattattctaaccaatagtgcttctctgcaaaatgaaatcctcccagccatcacagccaccctaggaggggaaaaaataggaacactttacttacagtcggtaacctctattgaagaacgaacaaggccaaatctctcccaaaaccattggaaggattgggggcttgttggatggaccaaaaactggccggttgctggatgtcaccacccccacagactgtactattccaaacttccattttacttcttaagggaaaatctcccacataataggaaaactcatggaaataatatactttgtggatgcttaagaagttgaatccgatgtcatttttagcaataagtgttgccacggatttggtctttttttatataatggacccactctttttttaccttgtaaccttcccttgaagacagaattttgggtgttggtgcttgcaagcaagcattttcattaataatatgagaaatgatacctggagagagagattatgagcaaatgtattgcttcttttagaggaggaagcatacaacctctttttgtgtgaattttgttattatggtcaaagaatgcattcctaagttttcattttatgtattcaaatacacaaaaggtgtcccctttaagggaaataaagaattaaagttttaaataccattaccattttaccaatcctgaccatcctggagtatattgaaccatagggcctatttccttgatataacacctcatttaattgtggcccatcccaaatgaatattattgcaagaatttatcttgttcataatgatttgttaatgggtgttatagctgaataccctgtgcatgaaaatgggcaatattttcatctgtttacttgtagtgccatagaggccaatatgcacaatattaactaatgccaagacatggctgtttaaaaaatttaatgttcaaacagttatcactgatgcttttgcactatttattaataaaatcaatatattgtgtaaaaaaaaaaaaaaaaaa

SEQ ID NO: 1385 - DNA, 313 bp, Homo sapiens
  misc_feature (1)...(313): n = a,t,c or g
naagtgttagtttacttcttgcttagtggagacaaaaattgtgagataaagaggaaggaataggatgtacacatttacccatcaatatagcacccagtgttatttcagcaggacccttctgttagcatctaaggtaaggttaggacagtcaagataaaatactggatgnnnnnnnnnnnnnnnnnnnnnnnnnnnnnnnnnnnnnnnnnnnnnnnnnnnnnnnnnnnnnnnnnnnnnnnnnnnnnnnnnnnnnnnnnnnnnnnnnnnnnnnnnnnnnnnnnnnnnnnnnnnnnnnnnnnnngctcgtgccgaa

SEQ ID NO: 1386 - DNA, 621 bp, Homo sapiens
tttttttactactaagcttttacaaaagaagtatctgttttattgtatagaacaagtacagcattttactacatagtatacaagtttttaatgagcatttaaaaaaataagtaaatctaggctatttgaaaaatacagttgagccagtgagcacattttataaatttggaagacacaaatcaaatgtgaaggatttgattttctacatttaaaatgaggaaccaaaactctcttcttgattttcagctaagggcaggggactactttccaactccttttgccttcgggaaaaggcccggtctcagttctgaaagtcccttaaggattgcttgctgtcgatccctatttttcaccatgttaggattaagaagtgggatccctgccccggtccgattacaattagcggtcgttttgggcaacagtctggggaattttggaactgagggtccggggttgaagggccgcacaatggtcactggggatccaggtaatagatctcatttgttcgaacatacgggaataaaatggggatgattccagaaatcccaagatgataattctgtttgattacttcctgagatcaaattctctctctcatagctactgttttttagtggtaaa

SEQ ID NO: 1387 - DNA, 5167 bp, Homo sapiens
  SIMILAR (3030)..(2974): 1001254mologous to Homo sapiens CTCL tumor antigen se89- 1,accession number AF273053,Smith-Waterman Score=107.
  misc_feature (1)...(5167): n = a,t,c or g
gagttttttttttttttttttttaaaattaagacaagtttattgagtaaaaaaatgcatacattggaacggcaaaacatcaataaggccctaaaacaaaaaatacagttatgctttaacaaattcttagcaatgtggcccacgctttttaaaaaattgacgtgttggcagtgttggttaggaacactgacgtacatcccaaatagtaataaattcagtatggaaattatacggcataaccttactcacccatactactttttctccccaaactattgtgacttctttttgctctctggatttaaaccaacagggggaccatccctttacacctttgctcccatcccttgggttttaaaaaggaatgggctgtagttaagttttggattcactgatatactctctgtacttgagggaagagtaagctgtggttttaaaagtgcccttttccatggtcgtcatgtcccaataccctctggcatttcaaaatggtgactcagatggtttttccctctacaggaactaggaaaattgtccccccactttggtcctatttacctcatttgaagacaaaccagggttactaagagttttaccattaagttatttctttagagtgacgaagtgttagtttacttcttgcttagtggagacaaaaattgtgagataaagaggaaggaataggatgtacacatttacccatcaatatagcaccccagtgttatttcagcaggacccttctgttagcatctaaggtaaggttaggacagtcaagataaaatactggatgttggccaggagcagtggctcaagcctgtaatcccagcactttgggaggctgaggcaggcagatcatgaggtccaggagatcaaacaccaccctggctaaacacagtgnaaaccctgtctctactaaaaatacaaaaagttagttagttagttagccaggcgtggtggtgggtgcctgtagtcccagccattcgggaggttgaggcaggagaatggtgtgaacctgggaggcagagcttgcagtgagattgcaccactgtactccagcttgggcgacagagcgagactccatctccaaaaaaaaacaaaaaaacaacaacaaaaaaaaaacactgtatgttaagggagactccttcagtatctaagagcacttgggggtggactgggggagaagggatgacttcatttacccccatagttatggagtcttgagttctaagaaaattttcatccctattgatttttatgctaaaaacagaatcttacaaatgtgatagctatatatccaaatgaggtggtctagtacaagcatttctgaaaaaatttttgaatgacaaaattttatcctaagcgatatgttttccaagtgaatataattctagtttaacacaacattgcaagtcaggtgtgcacattttactaacaaacatatatccaatgtgatttccagggccttctcccagaagcaaaaggagttggaaagtagtctcctgcctttagctgaaaatcaagaagagagttttggttcttcattttaaatgtagaaaatcaaatccttcacatttgatttgtggtcttcccaattattaaaaatgtgctcactggctcaactgtatttttcaaatagcctagatttacttatttttttaaatgctcattaaaaacttgtatactatgtagtaaaatgctgtacttgttctatacaataaaacagatacttcttttgtaaaagcttagtagtaaaaaaaaaaaaaaaaaaaaccggttcttctgctctgtcaccacctgggtattgaagccctataaaaacactttctacttaccttaatatagtctggcgttgctgggacctcacagtgttctttcacactttttatgtaacttaggaactgaaataccactcatgcatttgttctaaagtgccaaagttctgtctaacttattaacacgtctagacccataactccataacttttactgaaataacacaaattcagtttaggctccttctctaaatcctgacatttatttgcactatgacatttatttgtagaaattgcaattttcaaaaacatttttaaaagttagcattagtaacaagttagtaattagtattagaggcagtagttaggaatagatacgggtttgaaagctatctccactgtatctgtctagtatagcattaatgtgttcaacaaatggtaattactactaagaccacctcaaaaatatattcccattatacttccattttgctaaaactaatttaaaaatcaaattgttcaacgcctttgataaacagaagcctatcttttgaaataaaaaatttaatttcattaaatcaaggattgcgcaggtactgaaaattatccaatactctcaaaaagttaccagaattttagcaataggcagtttttacatgactaagcctagagataaaaaatgtgtcctatgtacatagtttattatctaaatgaaactgcactgttagataaatcttgaggtatcgagccaaaatcctgtaaatattaacactgctattactgacttatacctgtgtaaacacagtataccaaaagcctacatcaaaataattcacttcaacaaaagtactttatatcaggtgacattagagaaaaagaagtaaagcctttgctgtttaccgtcctcctgcaagcatctgattttacacataaaacaggcttcaatttgaagcctaagtacaggtaacatacaaaaagtaaaacttagaagtgccaacatgagataattcaagtacaatatatgttaaaaatatatatttatttccaatttttagatgcttcaactgttacaggccatcatgatttaaataaaagaaaaaacatttgagaaagaacaagaaccttttgtttagagaatgaaatataaattgttaataaacaaagtccacaacaatctcttaaaaaaaaagttactacagttatttctcttgtgaatatggcctggaagaatcacttttcccccaacttaagggaggggggagatttatctctatccaagctttcagtataagcagataagaagtaattctcattttcttgagactgacttgatgaaagggcatatgggtgtccccaaaaatgtctgatgagtgagaacattaaaatgactaaactgatgggacatatttaattgactatgataaacctgaaagttactatatgaatcttgttctgttgaattgctgttctctccttcagagcatactatatcaatagaagttctctcttcagaatcaaggtaagtcttatcttctaataaactgttttgcacatcaggagacgattgcaactcaatttgagtattctttttttgatctgttccacgtgatcctttggtctctttctcccatatttctgaatgaaaattgctgcatacttctatatgtgagatttcatcccctgaatccagagacatatcctcttcatccttttcatcgttttcaaaaagagctgactgcgactcaagattctcattagcaccaagctgtggaaggttttcttctgtgattgaattgtgatagcccacaagatttttaaagttttgcatgaagtcttcagcagttgcaaccactattccattatctgtataactggaaagcatcttgatgttcttctctgttaaaaagactatgtgtcgttgctgtatgttctgagcctgaagtctgataaggcaatccaattctggagcatttcgagtttgtgaatcacaattgtggtatgacaaaatttcaaccagatgtttcttctgatagacattcagaagcgtcaacagacttagagctttagcattcaatctgcctagttcctttagtttcttctgaaatttacagtggactttccattgccattttccttctggagtactaagttcctcaaggaatgtcaaaaaatttttaaggttctcaactgtgacaacctctgggtttagaattgattcatcagatacgataaaacctccagatacaaataattcattgtatgtatgatttttaacatcatccaggctatcaacaccagcaaaactaacacaggggagcttctttaaagtcaccaagccaggtatcttgtgaatgaaacctgcaatgtcttcattttgaataataatcaatagtttatctaattttgatcttctttccaaaaactgttcaggatgacattctgtattgcctaatttgataagatattcctttatttctttacagagcacactctcttcttcttcatgaatataaaatttcacagtatttttctggacgtctttcatgattttaaccaaactattaaatacttcaggttctaactggcttataaaatttgaaagagctggttgagcagaaatgtttacatcactgggggattttgttgtttcttctactggttcccgggccatatcaccaggtacaatatgatcagaagtcaccattaactctgtggcatgttgaggctggttcatttctacttcagttaaagccgaagtggaatgctgctcatcagagttggtatctttcaaaggatcactacacagtggctcaaggagatgtttattgttgaagtcacttgaggaaactggtatgacatgcctttccagaggattcgatgctatcttagcaccagaatcgttaggactgactggtggcaaattcccacccttggctgatgctttaataataatagtatttagcttctcatgcaaaccatctacaaactcctgcacaccagctttggaagtcttagaatatatgaactcggaaagccgtttcatcttctcttgtgttgaaaagataggtgtggaaactctactgacatatgaaacattcttttgcttcaaaatctcttctatcttcctagaaaagagattgtactctcctaacactgtcctctctgtggtttcgctcactgcaggcggctctgcctctgctgctggcacacactgctcctccacctgacctgtcaacacgtcatcctcagtggtgccctttagtgtgtctgtaaatggagaggatggaaactggtaatcagaacttctctgtctatttattacccgggggtcgttaggaaaggcctcctgtggtggcacacacaccagttgttcttctggtgatttcatacctatac

SEQ ID NO: 1388 - DNA, 471 bp, Homo sapiens
  SIMILAR (80)..(469): 891254mologous to Homo sapiens Zen GTPase interacting protein ZIP,accession number AAY06518,Smith-Waterman Score=608.
  misc_feature (1)...(471): n = a,t,c or g
aggtgtagcccccccccttttgaagccgttcgagagccatccgaaancncaannncnggnncgacgaaaacgtgccgctatggcgaacggtccgcgggcanntttttgtgagaatttccaggcggcgctcgctctgtcgcgggtgggactgcataaaaatccggagaaggaaccatacaagtccaaatacagcgcccgggcgctactggaagaagtcaaggcgctgctcggccctgcgcctgaggacgaggatgagcggcctgaggccgaggacggcccgggtgccggagaccacgccctggggctgcccgtcgcccagcgagcggtgaggctggcagtcatcgagttccacctcggggtgaaccacatcgacacggaggagctgtcggcgggggaggagcacctggtgaaatgcctgcggctgctgcgcaggtaccggctctcgcacgactgcatctctctctgcatcca

SEQ ID NO: 1389 - DNA, 1334 bp, Homo sapiens
  SIMILAR (51)..(1058): 901254mologous to Homo sapiens Zen GTPase interacting protein ZIP,accession number AAY06518,Smith-Waterman Score=1524.
gcactggttatctaccgctaatgtcatctctgattattatgacacagagctcacccacacaagacactgcggaaactgtctgagacacgccagagctttatcatcaaggaaagggggaaatagcaaggtgctggatcaaatactgtttgactctcatgcagaatgcccaactctccatgcaggacaacatatgagagcttgatcttgataaacagtctgaacttatagctttaaggaaaaaagaactagatgaggaggaaagcattcggaaaaaagctgtgcagtttggaaccggtgaactgtgtgatgccatctctgcaatagaagagaaagtgagctacttgagacctttagattttgaagaagccagagaacttttcttattgggtcagcactatgtctttgaggcaaaagagttctttcagattgatggttatgtcactgaccatattgaagttgtccaagaccacagtgctctgtttaaggtgcttgcattctttgaaactgacatggagagacggtgcaagatgcataaacgcagaatagccatgctagagcccctaactgtagacctgaatccacagtattatctgttggtcaacagacagatccagtttgaaattgcacatgcttactatgatatgatggatttgaaggttgccattgctgacaggctaagggatcctgattcacacattgtaaaaaaaataaataatcttaataagtcagcactgaagtactaccagctcttcttagactccctgagagacccaaataaagtattccctgagcatataggggaagatgttcttcgccctgccatgttagctaagtttcgagttgcccgtctctatggcaaaatcattactgcagatcccaagaaagagctggaaaatttggcaacatcattggaacattacaaatttattgttgattactgtgaaaagcatcctgaggccgcccagggaaatagaagttgagctagaacttagtaaagagatggttagttcttttcccaacaaaaatgggagagattcagaaccaagatggccctgtcttaatccttgtttttaaagaaaggaaatgtgcaatattgaagtgatctttttccctagtcagacaggcccaattccattgtgatgtttacctttatagccagggtgagtgcagttttgaacttgaggttacagttcaactgagtgtttgctaggatcctaaggaacataaagttaattaaagacttacacctaattatgtaaattgccttgttaaagacatgtgatttgtattttagatgcttgtttcctattaaaatacagacatttctaccctca

SEQ ID NO: 1390 - DNA, 2574 bp, Homo sapiens
  SIMILAR (1185)..(1892): 571254mologous to Homo sapiens Zen GTPase interacting protein ZIP,accession number AAY06518,Smith-Waterman Score=561.
gagccagtaagtaaagtgtcgcaaagcagaaggaaggcgggagtcccgactgcaaacatttgaggaaagccaggcagtagaggccgctatggcgaacgttccgtgggcagaggtctgcgagaaattccaggcggcgctcgctctgtcgcgggtggaactgcataaaaatccggagaaggaaccatacaagtccaaatacagcgcccgggcgaacatgagaagaggtcaaggcgctgctcggccctgcgccctgaggacgaggatgagcggcctgaggccgaggacggcccgggtgccggttgaccacgccctggggctgccggctgaagtggtggagcccgaggggcccgtcgcccaagcgaaccggttgaggcttggcagtcatccgagttccacctcggggtgaaccacatcgacacggaggagctgtcggcgggggaggagcacctggtgaaatgcctgcggctgctgcgcaggtaccggctctcgcacgactgcatctctctctgcatccaggcgcagaataacctgggtatcgtgtggtctgaaagagaagaaattgaaactgcacaggcttacctagagtcatcagaagcactatataatcagtatatgaaagaggttgggagtcctcctctttgatcctactgagcgttttcttcctgaagaagagaaacttacctgaacaagagagatcaacaagattttgctaaggtttatactcatatactatattacctagctcaagtctaccagcatctggaatgtttcgagacggctgctcactatttgccatagtacactaaaacgccagctcgagcacaatgcctaccatcctatagagtgggctatcaatgctgctaccttgtcacagttttacatcaataagctatgctttatgggaggccaggcactgtttatcagctgctaatgtcatttttggtcaaactggaaagatctcagccacagaagacactcctgaatctgaaggagaagtgccagagctttatcatcaaagaaagggggaaatagcaaggtgctggatccaaatacttgttttgacttctcatgcagaatgcccaactctccatgcaggacaacataggagagcttgatcttgataaacagtctgaacttagagctttaaggaaaaaagaactagatgaggaggaaagcattcgggaaaaaagctgtgcagttttggaaccggtgaacttgtgtgatgccatctctgcagtaggaagagaaagtgagctacttgagacctttaggttttgaagaagccagagaacttttcttattggggtcagcactatgtctttggagggcaaaagagttctttcagattgatggttatgtcactgaccatatttgaagttgtccaagaccacagtgctctgtttaaggtgcttgcattctttgaaactgacatggagagacggtgccaagatgcattaaacgcggattagccatgctagagcccctaactggtagacctgaatccacagtattatctgttggtcaacagacagatccagtttgaaattgcacatgcttactatgatatgatggatttgaaggttgccattgctgacaggctaagggatcctgattcacacattgtaaaaaaaataaataatcttaataagtcagcactgaagtactaccagctcttcttagactccctgagagacccaaataaagtattccctgaggcatataggggaaggatgttcttcgccctgccatgttaggctaagtttcggagttgcccgtctctatgggcaaaatcattactggcagatcccaaggaaagagctgggaaaatttgggcaacatcattgggaacattacaaatttattgttgattactgtggaaaaggcatcctgagggccgcccaggaaatagaagttgagctagaacttagtaaagagatgccagggcgacggagtgagactccatctcttaaagaaagaaacaaaaaagataaaattcagaccgccaagactacatctgccccacctgcacagagcctcgccctcgccactccacagccggtccgcatgtgccgccagctcaccagggtgatatcactgggctccagcaagggcaaggccagcttcgcaggacctgaccgaccgccttatgaagatcctcacattgtgcggctacagctttaccacccgcagagggagagatcctgtgtgacatcatcaaggagaagctgtgctaagtcgccctggactttgagcaggagatggccccacgggtcctcctgggagaagagctatgagctgtcagatggccaggtcatcaccagcagcaacaagcggttccactgccccgaggcgctcttccagccttctttcctgggcatggaatcctgtggcatctacaaaactaccttcaaatccatcgtgaagtgtgacgtggacatccacaaagacctgtacgccaacacagtgctatctggcagcaccaccatgtaccctggcatcgctctgcaggatgcagagggggatcactgccctggctcccagcatgaggaggatcaagatcattgctccttctga

SEQ ID NO: 1391 - DNA, 1128 bp, Homo sapiens; identical to SEQ ID NO: 1097
  SIMILAR (232)..(726): 951254mologous to Homo sapiens cathepsin C,accession number X87212,Smith-Waterman Score=845.

SEQ ID NO: 1392 - DNA, 421 bp, Homo sapiens
  SIMILAR (199)..(149): 941254mologous to Homo sapiens Human CDC25C phosphatase,accession number AAR98214,Smith-Waterman Score=84.
ggaacagtagtaatgggactgcccaaatatttcatttcactgtccaccaagtttccattgtcgttttctctatctgcagatgaactacacattgcatctctctttctatggccacggtccaaaccattcggagtgatacaaagaagctgtgcatcccagctaaatgcacttcctgaagtcctgaagaatccaggtgacccagacaaaatgcttaggtttgcagaatcaccaagaaatttgcccgctggagttctagggacatctggacagacggtaaaggaagtgtctctctccaggagcaggtttaccattttcctttgattagacctacacctgggtcctgagccagagcttccttcctctcttgtggatgagaagagttccgtagacatggtcttacgttttcgtcgacccgggaatt

SEQ ID NO: 1393 - DNA, 2055 bp, Homo sapiens
  SIMILAR (211)..(1629): 1001254mologous to Homo sapiens Human CDC25C phosphatase,accession number AAR98214,Smith-Waterman Score=2493.
caggaagactctgagtccgacgttggcctacccagtcggaaggcagagctgcaatctagttaactacctcctttcccctagatttcctttcattctgctcaagtcttcgcctgtgtccgatccctatctactttctctcctcttgtagcaagcctcagactccaggcttgagctaggttttgtttttctcctggtgagaattcgaagaccatgtctacggaactcttctcatccacaagagaggaaggaagctctggctcaggacccagttttaggtctaatcaaaggaaaatgttaaacctgctcctggagagagacacttcctttaccgtctgtccagatgtccctagaactccagtgggcaaatttcttggtgattctgcaaacctaagcattttgtctggaggaaccccaaaatgttgcctcgatctttcgaatcttagcagtggggagataactgccactcagcttaccacttctgcagaccttgatgaaactggtcacctggattcttcaggacttcaggaagtgcatttagctgggatgaatcatgaccagcacctaatgaaatgtagcccagcacagcttctttgtagcactccgaatggtttggaccgtggccatagaaagagagatgcaatgtgtagttcatctgcaaataaagaaaatgacaatggaaacttggtggacagtgaaatgaaatatttgggcagtcccattactactgttccaaaattggataaaaatccaaacctaggagaagaccaggcagaagagatttcagatgaattaatggagttttccctgaaagatcaagaagcaaaggtgagcagaagtggcctatatcgctccccgtcgatgccagagaacttgaacaggccaagactgaagcaggtggaaaaattcaaggacaacacaataccagataaagttaaaaaaaagtatttttctggccaaggaaagctcaggaagggcttatgtttaaagaagacagtctctctgtgtgacattactatcactcagatgctggaggaagattctaaccaggggcacctgattggtgatttttccaaggtatgtgcgctgccaaccgtgtcagggaaacaccaagatctgaagtatgtcaacccagaaacagtggctgccttactgtcggggaagttccagggtctgattgagaagttttatgtcattgattgtcgctatccatatgagtatctgggaggacacatccagggagccttaaacttatatagtcaggaagaactgtttaacttctttctgaagaagcccatcgtccctttggacacccagaagagaataatcatcgtgttccactgtgaattctcctcagagaggggcccccgaatgtgccgctgtctgcgtgaagaggacaggtctctgaaccagtatcctgcattgtactacccagagctatatatccttaaaggcggctacagagacttctttccagaatatatggaactgtgtgaaccacagagctactgccctatgcatcatcaggaccacaagactgagttgctgaggtgtcgaagccagagcaaagtgcaggaaggggagcggcagctgcgggagcagattgcccttctggtgaaggacatgagcccatgataacattccagccactggctgctaacaagtcaccaaaaagacactgcagaaaccctgagcagaaagaggccttctggatggccaaacccaagattattaaaagatgtctctgcaaaccaacaggctaccaacttgtatccaggcctgggaatggattaggtttcagcagagctgaaagctggtggcagagtcctggagctggctctataaggcagccttgagttgcatagagatttgtattggttcagggaactctggcattccttttcccaactcctcatgtcttctcacaagccagccaactctttctctctgggcttcgggctatgcaagagcgttgtctaccttctttctttgtattttccttctttgtttccccctctttcttttttaaaaatggaaaaataaacactacagaatgag

SEQ ID NO: 1394 - DNA, 2145 bp, Homo sapiens
  SIMILAR (446)..(1522): 741254mologous to Homo sapiens putative nuclear protein,accession number AF251040,Smith-Waterman Score=1377.
atggtctatgaaaggcaagtcaatgcctggatgaactacacattgcatctctctttctatggccacggtccaaaccattcggagtgctacaaagaagctgtgcctaaaaaagagagtttgctgagaacgtccagcatcctcaagccacaggtgggaagtagagacaaagttattctctattggtggcaaaagcagatagattatggcaagtgcacacctggctaccagtgctttctgcaccaggtcctcaagttcaggccgatccggcagctgcaagaggggctcctgggactccgagcaggccctaatccgcgcttggaccacacttcccagcagccttcacgccgcggacgggtcctttgctgggggaagggggattccttcgaagaggtggtcgtggagggcggggcagcagagcagcctttgcctgatcatgcagacatcctccaactgtgggaactctttccagcttgtgtctgaaggtgcttcctggaggggcctgccccactgttcctgtgctgagttacaggacagcctcaacttcagctaccatccctcaggcctgagcctgtccgtcagaccatccagtccgggaaactcccccaaggagcagcccttctcccaagtcctaagacctgagcccccagatccagagaagcttcctgtgccccctgcccctccatccaagaggcactgccgctcactctcagtgcccgtggacctgtctcgctggcagccggtgtggcggcccgccccctccaagctgtggactcccataaagcaccgtggcagtggtggagggggtgggccgcaggtgcctcaccagagccccccaaagcgggtctccagcctcaggttcctcacaagctcccagtgcctcttctcaatgtgccccagctcacagaccctacagccctcctttcttcagcctggccctggcccaagattcctctcgaccctgcgccgcctcccctcaaagtggctcctgggagagtgatgctgagtccttgtcaccttgcccacctcagcgccgcttctccctgtcacccagtctgggcccgcaggcaagccgcttcttgccctctgcccggagctctcccgcatcctccccagagctgcccctggcgacctgagggtctccgcaaccttccccgaaagccgctcacagccttgtgatctggatgcccgcaaaactggggtcaagcggcgccacgaggaagacccccggcgtctgcggccttcgttggactttgacaagatgaatcagaaaccatactcaggaggtctttgtctccaagaaacagcccgggaaggcagcagcatctctccaccatggttcatggcctgtagccccccacccctctctgcttcctgcagccccactgggggttcctcccaggtgctgagtgaaagcgaaaaggaggaggagggggctgtgcggtggggtcggcaggcgctgagcaagcggaccctgtgccagcgggactttggggacctggacttgaatttgattgaggaaaactaaaactgaaaggctacttcctggggccacacagactgactctctcatggctactaacaagtgttcgagttccccaaggctgggggccgagcctgggaatgggggtgagtggagggctccgactcagggcagctggaaatcttctcgctccagcaagctcgaccatgccaagagactggccgggacaagataaacggagctggtggcgggagggacagccccagagcagacccttcctatggcggccctgagtgtgagtatccctgccaccaagagagcaatgggcagggaaggaaggggtctgccgaccccagctcggggaatttcactagcccctttgcttcaaagggcacttgtgtcttagaatttggccagggtggggggttgagtcagcctcctcagagaaactgcgtgagagtgtgtgcgtgcatgggagtgtacttgtggaaaggtgtggttgcgtagccttagggaaggaaggcaattgctccttaacaacagagtatcatgatacccccaggatcttgagttttttacaggatgttgggtttgctcaaggagtcaagaggagggcaccaagttttccttttttataaatagctctggaaccaggcttgtgtatt

SEQ ID NO: 1395 - DNA, 540 bp, Homo sapiens
  SIMILAR (5)..(268): 801254mologous to Homo sapiens containing RNP motifs,accession number D89092,Smith-Waterman Score=378.
tcgacgaagaggattttgttttatcacatatactgatgaagagccagtaaaaaaattgttagaaagcagataccatcaaattggttctgggaagtgtgaaatcaaagttgcacaacccaaagaggtatataggcagcaacagcaacaacaaaaaggtggaagaggtgctgcagctggtggacgaggtggtacgaggggtcgtggccgaggcaatcagagcacttatggcaaggcatctcgagggggtggcaatcaccaaaacaattaccagccatactaaaggagaacatttggagagaacagccgggaacttcattgcaggccgtgtgtcaccctgaccacgtctatctctgggggtcgcacgttgcgggcagagcgcaaggcatacaccagaaaacgctgtcctgtggaggagatgttaaagtaacccatcttgcaggacgacattgaagattggtcttctgttgatctaagatgattattttgtaaaagactttctagtgtacaagacaccattgtgtccaactgtatatagctgcc

SEQ ID NO: 1396 - DNA, 973 bp, Homo sapiens
  SIMILAR (329)..(838): 471254mologous to Homo sapiens JKTBP2,accession number AB017019,Smith-Waterman Score=422.
tcgccagcgccgggcgcagtccgcctttttccggagcagactggccgcggtgctagtcggtagcagcggccgccgcagcggctccgcactggcgaaccgagggcagaaaaaggcggggttgacggctttttgctccatacaacgctccgccgccgctgctgccgcgacccggactgcgcgccagcacccccctgccgacagctccgtcactatggaggatatgaacgagtacagcaatatagaggaattcgcagagggatccaagatcaacgcgagcaagaatcagcaggatgacgggtaccgcacgcttcttcccccgctccccctcccccagcgcgccgcacgcgcccttcgttcctctaaaatgtttattggaggcttgagctgggatacaagcaaaaaagatctgacagagtacttgtctcgatttggggaagttgtagactgcacaattaaaacagatccagtcactgggagatcaagaggatttggatttgtgcttttcaaagatgctgctagtgttgataagattgaaaatattgaacttcccatggatacaaaaacaaatgaaagaagaggattttgttttatcacatatactgatgaagagccagtaaaaaaattgttagaaagcagataccatcaaattggttctgggaagggccaaaactggaaccaaggatttaataactattatgatcaaggatatggaaattacaatagtgcctatggtggtgatcaaaactatagtggctatggcggatatgattatactgggtataactatgggaactatggatatggacagggatatgcagactacagtgcgggaacttcattgcaggccgtgtgtcaccctgaccacgtctatctctgggggtcgcacgttgcgggcagagcgcaaggcatacaccagaaaacgctgtcctgtggtatggtctcttccaacttcatgtaccagcgtaaagattaa

SEQ ID NO: 1397 - DNA, 876 bp, Homo sapiens
  SIMILAR (669)..(175): 861254mologous to Homo sapiens breast cancer associated protein BRAP1,accession number AB032698,Smith-Waterman Score=677.
ttagttgactgtcagctgtccttgctccaggatgctgtttttgacaacggatgttttattgcctttgatgttcattaagaagcttggcgcaaatgttgcctttttatcctcgaagaagcctctgtttgtcatgtagcttgtgataaccacattgttgcctttggcttgcggcactgcggtgcgggttcggaggactacttctgcggcagatgataaagggtgtcctgaagggcttagggctccacctggtgatagagcaggggagctggggggaacttcttcctgggacctggcactctcaatgataggagagggctgggcctgggaggggccgttgcaggttagtagaggctcttcttcctcagaggagcttgcttcagatccttccttccctatttcctcatcttctaagagctccttgatctcagaattgtcttccccctgggctgcatcaggtgccagatcttcagttgctgagacagattcactcttactcttcgaggaaagtgtagagggactagtaggtgaggtaagtggactggagactgtagatgttcgaactgggggagaaatgactaaagagcgcctgctgctgcttgatagtctcttcaccacaaagactttactggaatgttgcttctccagtttgctcatcacctcggagagattgggttcagtttgctcatttccccaaaaagccgtcaaccccgcctttttctgccctcggttcgccagtgcggagccgctgcggcggccgctgctaccgactagcaccgcggccagtctgctccggaaaaaggcggactgcgcccggcgctggcgactgaggcggcgagcgcgctcgcccgccgcgcgcacgcgtgttttgtcctcgag

SEQ ID NO: 1398 - DNA, 1703 bp, Homo sapiens
  SIMILAR (654)..(1028): 521254mologous to Homo sapiens JKTBP2,accession number AB017019,Smith-Waterman Score=259.
  misc_feature (1)...(1703): n = a,t,c or g
gatctcttccgccgccattttaaatccagctccatacaacgctccgccgccgctgctgccgcgacccggactgcgcgccagcacccccctgccgacagctccgtcactatggaggatatgaacgagtacagcaatatagaggaattcgcagagggatccaagatcaacgcgagcaagaatcagcaggatgacggtaaaatgtttattggaggcttgagctgggatacaagcaaaaaagatctgacagagtacttgtctcgatttggggaagttgtagactgcacaattaaaacagatccagtcactgggagatcaagaggatttggatttgtgcttttcaaagatgctgctagtgttgataaggttttggaactgaaagaacacaaactggatggcaaattgatagatcccaaaagggccaaagctttaaaagggaaagaacctcccaaaaaggtttttgtgggtggattgagcccggatacttctgaagaacaaattaaagaatattttggagcctttggagagagggaaaatattgaattttccatggatacaaaaaccaatgaaagaaggaggattttgttttatcacatatactgatgaagagccagtaaaaaaattgttagaaagcacataccatcaaattggttctgggaagtgtgaaatcaaagnttgcacaacccaaagaggtatataggcagcaacagcaacaacaaaaaggtggaagaggtgctgcagctggtggacgaggtggtacgaggggtcgtggccgaggtcagggccaaaactggaaccaaggatttaataacgtattatgatcaaggatatggaaattacaatagtgcctatggtggagatcaaaactatagtggcctatgggcggatatgattaatactgggtataactatgggaaccctatggaatatgggaccaggggatatggccagacctaccagtggccccaacagagcaccttaatgggcaagggcatcctcgagggggtgggcaatccacccaaaacaattacccagcccatacctaaaggagaacattggacaaaacatggaggagatgttaacagtaaccccatcttgcaggacgacattgaagattggtcttctgttgatctaagatgattattttgtaaaagactttctagtgctacaagacaccattgtgtccaactgtatatagctgccaattagttttctttgtttttactttgtcctttgctatctgtgttatgacatcaatgtggattgggtttatacacattttatttgtatcatttcatgttaaacctcaaataaatgcttccttatgtgattgcttttctgcgtcaggtactacatagctctgtaaaaaatgtaatttaaaataagcaataattaaggcacagttgattttgtagagtattggtccatacagagaaactgtggtcctttataaatagccagccagcgtcaccctcttctccaatttgtaggtgtattttatgctcttaaggcttcatcttctccctgtaactgagatttctaccacacctttgaacaatgttctttcccttctggttatctgaagactgtcctgaaaggaagacataagtgttgtgattagtagaagctttctggtagaccatatttcttctggatcgtaataaaattgttagtagctccttttaaaaaaaacacaacacaaaaac

SEQ ID NO: 1399 - DNA, 2987 bp, Homo sapiens
  SIMILAR (688)..(1968): 451254mologous to Homo sapiens JKTBP2,accession number AB017019,Smith-Waterman Score=805.
tgcagaaaggagccccgcgagtggcgcgccggggatgtgagtgccccttgccctctactgaatccagccccctccccgcccaccgcctccgcctttgcatagatacagtcatctggccagcccccgcccctcctcccggcgtcagcccgccagaggccgcgcggggcccgggcttcggccgatcagcccgggaggccccgccgcgcccccttggcccgcgcgcccgtggtcacagtggaagaggcgcccgcgctgcgctgcccggaggagccgtcgcgcgcccgcttcctgttcggctggttcctgccagctcgaggacaaaacacgcgtgcgcgcggcgggcgagcgcgctcgccgcctcagtcgccagcgccgggcgcagtccgcctttttccggagcagactggccgcggtgctagtcggtagcagcggccgccgcagcggctccgcactggcgaaccgagggcagaaaaaggcggggttgacggctttttggtaggagtgggctggaccggacgccagagacaaaggctcccaaggcaagagggactgtggccctgcgtcggctctgctcggaactgctgaccccaggaatttacgccccttcgtttttctcttctgattcttctcttctcccaagcccgcgtcccctcacgcgtggcctctctccttgccgggagggccgcgatggaggtcccgcccaggctttcccatgtgccgccgccattgttcccctccgctcccgctactttagcctcccgcagcctctcccattggcggccgcggccgccgcggcagctgagccccgctcctcccttcgctcgctcccagctccgcccggcagggggcgcgccgggcccagcgccacgtcaccgcccagcagccctcccgattggcgggcggggcggctataaagggagggcgcaggcggcgcccggatctcttccgccgccattttaaatccagctccatacaacgctccgccgccgctgctgccgcgacccggactgcgcgccagcacccccctgccgacagctccgtcactatggaggatatgaacgagtacagcaatatagaggaattcgcagagggatccaagatcaacgcgagcaagaatcagcaggatgacggtaaaatgtttattggaggcttgagctgggatacaagcaaaaaagatcctgacagagtacttgtctcgatttggggaagttgtagactgcacaattaaaacagatccagtcactggggagatcaagaggatttggatttgtgcttttcaaagatgctgcttagtgttgataaggttttgggaacttgaaagggacacaaactggatggcaaattgatagatcccaaaagggccaaagctttaaaagggaaagaaccctccccaaaaaggtttttgtggagtggattgagcccggatacttcctgaagaacaaattaaagaatattttggagcctttggagagattgaaaatattgaacttcccatggatacaaaaacaaattgaaagaagaggattttgttttatcacaatatactgatgaagagccagtaaaaaaatttgttagaaagcagataccatcaaattggttctggggaagtgtgaaatcaaaggttgcaccaccccaaagaggtatttagggcagcaacagcaaccaccaaaaggttgtaagaaggtgctgcagctggtggacgagttggtacgaggggtcgtggccgaagtccagggccaaaactggacccaaggatttaataactattatgatcaaggatatggaaattacaatagtgcctatggtggtgatcaaaactatagtggctatggcggatatgattatactgggtataactatgggaactatggatatggacagggatatgcagactacagtggccaacagagcacttatggcaaggcatctcgagggggtggcaatcaccaaaacaattaccagccatactaaaggagaacattggagaaaacagcgggaacttcattgcaggccgtgtgtcaccctgaccacgtctatctctgggggtcgcacgttgcgggcagagcgcaaggcatacaccagaaaacgctgtcctgtggtatggtctcttccaacttcatgtaccagcgtaaagattaaaaatgaagccaaagtctgaagttttccactttaatctttacgctggtacatgaagttggaagagaccataccacaggacagcgttttctggtgtatgccttgcgctctgcccgcaacgtgcgacccccagagatagacgtggtcagggtgacacacggcctgcaatgaagttcccgctggcgggtacaaacaaggtataatgtcagagttagaagacaacattcttgttttccttaagttgtacccatttcagtactttacctgttaatagttctaaaatgtttaattattcctctagaccacctggtacacaaaagcaaacagaaaaactcttaagtttttctgcaatactaaagaaagtgagataagactttaaagttaaagatctatagacactttaggcaaaacaggctcataaagcaattaaaaaatcaacaatttagtaaaaacaggctacatagtattttgtttttacgtttcatttgtctattgatctttaaattaaattagacatttctactgttttcctgtactcttatacacacctgttttctccaatgttctcctttagtatggctggtaattgttttggtgattgccaccccctcgagatgccttgccataagtgctctgttggccactgtagtctgcatatccctgtccatatccatagttcccatagttatacccagtataatcatatccgccatagccactatagttttgatcaccaccataggcactattgtaatttccatatccttgatcataatagttattaaatccttggttccagttttggccctgacctcggctcgtgccgaaatcgccatcgcatcaatttccag

SEQ ID NO: 1400 - DNA, 755 bp, Homo sapiens
  SIMILAR (659)..(165): 411254mologous to Homo sapiens microsomal glutathione S- transferase 3,accession number AF026977,Smith-Waterman Score=161.
gcggccgcgatttttttttttttttttttaggtatgaggactgatgccaggttaagtttttattatatttagaaaaaaaaatgtaacgggggagataattggttaagtcatttaaaaatgaagaaggttttttaaaacccccctataatttctttaaatggcaggcatttgggttccacttgcccaagcccactttttaacccaaaccaagatgcttggaaagccagagcacacagttgtgccccacccaaacgccaggagggcggatggacccccaggggctcctcggactacgcttgctggggttctccccgtgtaataagccataaagcataaaggaactccgtccaacaaatccagggccaagcccagggccaagaagcttataccgcggggtggtaaacacctcccaacaagctaggaaaaaataaggaaggggagggttacactttcccaaccgtgtttcttgggtggggcttcgcttgaatgcaggttgaaggatggtgcccattgttcaggggttccgtggctgtacatggatagggatactcccactttggtaccttcttggcggggccttgggaacattgatggctaaggtgggccaccatttataaagctggccagccccagttagaagcacaaaacccatattcctttagagagggccagccattcttgcgtctggatcaccttcgaacagctggagcagaacaaaactgcgcagccgcggtgtgggtgcggcgcctcgtgcc

SEQ ID NO: 1401 - DNA, 1349 bp, Homo sapiens
  SIMILAR (1183)..(1341): 601254mologous to Mus musculus open reading frame 2,accession number M29622,Smith-Waterman Score=133.
  misc_feature (1)...(1349): n = a,t,c or g
ccgttttaatggtcccaaaaagggncctagaaagtgccccgttgtgtttttatgtttcctcaaacccccttaaaaaatataaataaagaattttaaaagaatttttaaaaattattttgtccaagaattatattttccaggattttaatcatttgggattggaattttggggattttggacttcagggattttgatctttcaggatttcatcatttgggattataacattcaagattgtgtcttttgggattatggcccaaacccatgcaatgggccagttctttaantcacccccgnaaagcccttcangagaaaattgcaaaatgcaaaaatgataagacttccaaacatctttatacaatttataccctcagtattaaaatgggactgagggaggccgggcacagtgggctcacacctgttaatccctgactttgaggagggctgagtggggcggatcacttgaggttaggagttggagacctgcctgggccaacatagtgaaaccctgtctgtagtaaaaatacaaaaattaacacttgagccccggggggcggagggttgggagtgagctgaggattgtaccactggcactccagcccgggtgacaaagtgagaccctgtctcaataaaaaataaaaataaaaaaagtatgttattatttcctgttttattgtactaaaatggtactatgaagtgactctgttgtgtttttatgtttctcaaatctcctttaaaaaatataaataaagaattctaaagaatttttaaaattattttgtcaagaattatattttcagcattttaatcatttgggattggaattttggggattttggacttcagggattttgatctttcaggatttcatcatttgggattataacattcaagattgtgtcttttgggattatggcccaaacccatgcaatgggccagttctttgaaaggaatagtgttccataactcacgcaaggagaaatagaaaatttgaataggcctatacctgttaaactaaatcaataactaataaccttctataatagaaagcaccaggcttagatgggttcactgatgattgatcaaacatttaagaaataaatctttgacccagaaatatttccttaaaatttttttttctaagaaagaaatcataccaattctctacaatagcttccaaaaaaatagaagctaagggaacacaccctaactgactctaggagaccagcattactctaatactaaaatcagataaagacatgacaagaaagggaaaactacagtctctcataaacatagatgcaaaaatccttaacaaaatattagcaaatcaaatgcaataatgtgt

SEQ ID NO: 1402 - DNA, 2586 bp, Homo sapiens
  SIMILAR (1022)..(2170): 911254mologous to Homo sapiens cathepsin C,accession number X87212,Smith-Waterman Score=1892.
ttaggttataaggacatgatctaaacctaacaaggcctgtctgttcagattcttcttggtgtctctgtgcagtgttccttctgctatggtatggggcagaatactctctggtatgagggtcttagaacccataatcagattagagttcttaaaaaaggcaaaccacttgtagtcattcaacacaatctcaaagccttggttgtaaatgatggtgaaatggccagaattgccaaggtcatcatatgctgtatccagcttctgaaggtacaccactacttttttttcttgtggtcctttctcctcaaaggctctacagtttagaacctcataatctgaatccttccaaagtttattcagcaaactagaggtctgtatcctataaaaccaattagtgctgataggaatgatacgtttaaccttcatagatgagggctcagacccataaccgagcagttgacatcgcgctgggaaccgctggagcccacctggaagacccaggtgcccagcagggtcaagataggtgcagttggcaggtgtgtcgcagcgcacggcgccgtcgccggagagaagcagcaggagggcggcgagcagcaaggagggcccagcacccatgctgcagggagcccagtggcaatcagtcactatctgctcatctgcacactggtgccaccaagggtcctgcatccagtcttctgcatgaacacctctggaagccgatagcccgcagcgctcggcttcctggtaattcttcacctcttttctcagctccctgcagcatgggtgctgggccctccttgctgctcgccgccctcctgctgcttctctccggcgacggcgccgtgcgctgcgacacacctgccaactgcacctatcttgacctgctgggcacctgggtcttccaggtgggctccagcggttcccagcgcgatgtcaactgctcggttatgggaccacaagaaaaaaaagtagtggtgtaccttcagaagctggatacagcatatggatgaccttggcaatttttggccatttcaccatcatttacaaccaaggctttgagattgtgttgaatgactacaaagtggtttgccttttttaagtataaagaagagggcagcaaggtgaccacttactgcaacgagacaatgactgggtgggtgcatggatgtgttgggccggaacttgggtttttttcaccggaaagaaggtgggaactgcctctgagaatgtgtatgtcaacacagcacaccttaagaattctcaggaaaagtattctaataggctctacaagtatgatcacaactttgtgaaagctatcaatgccattcagaagtcttggactgcaactacatacatggaatatgagactcttaccctgggagatatgattaggagaagtggtggccacagtcgaaaaatcccaaggcccaaacctgcaccactgactgctgaaatacagcaaaagattttgcatttgccaacatcttgggactggagaaatgttcatggtatcaattttgtcagtcctgttcgaaaccaagcatcctgtggcagctgctactcatttgcttctatgggtatgctagaagcgagaatccgtatactaaccaacaattctcagaccccaatcctaagccctcaggaggttgtgtcttgtagccagtatgctcaaggctgtgaaggcggcttcccataccttattgcaggaaagtacgcccaagattttgggctggtggaagaagcttgcttcccctacacaggcactgattctccatgcaaaatgaaggaagactgctttcgttattactcctctgagtaccactatgtaggaggtttctatggaggctgcaatgaagccctgatgaagcttgagttggtccatcatgggcccatggcagttgcttttgaagtatatgatgacttcctccactacaaaaaggggatctaccaccacactggtctaagagaccctttcaacccctttgagctgactaatcatgctgttctgcttgtgggctatggcactgactcagcctctgggatggattactggattgttaaaaacagctggggcaccggctggggtgagaatggctacttccggatccgcagaggaactgatgagtgtgcaattgagagcatagcagtggcagccacaccaattcctaaattgtagggtatgccttccagtatttcataatgatctgcatcagttgtaaaggggaattggtatattcacagactgtagactttcagcagcaatctcagaagcttacaaatagatttccatgaagatatttgtcttcagaattaaaactgcccttaattttaatatacctttcaatcggccactggccatttttttctaagtattcaattaagtgggaattttctggaagatggtcagctatgaagtaatagagtttgcttaatcatttgtaattcaaacatgctatattttttaaaatcaatgtgaaaacatagacttatttttaaattgtaccaatcacaagaaaataatggcaataattatcaaaacttttaaaatagatgctcatatttttaaaataaagttttaaaaataactgc

SEQ ID NO: 1403 - DNA, 386 bp, Homo sapiens
caggagagaaacctatatgtgaactaactgtgaggaagccttcaaatgtcaaatatgaagaaacccagcatgctcatacttaagataaagcctatcaatgcagtgactgtgataagggctccattcagtcaccctggtatccagataatcagttctcagtatgcatcagagcattcatatatggaaaaaaaaacttatttgtttcctgaaagtcataaagccttctcacagtaatcagctctaatcataaagcagagaattcatgttgcacagatcatatgaatatgttgtatatgggaaagccttcaaccagaagtcgtactgtgagaactcattcccaagagaatttgtaggaatgcctggtatgagggaacctttccttattt

SEQ ID NO: 1404 - DNA, 1580 bp, Homo sapiens
  SIMILAR (1580)..(1380): 981254mologous to Homo sapiens Human secreted protein encoded by gene 41,accession number AAY76164,Smith-Waterman Score=354.
tcgcggccgcgtcgaccttaaaagtcattgctcatttaatcttggaggccacttggaggagcatggcgtcttttgtctcgccctgggtgagcacaccgaggcccagagtttgatgattccttcaaggtctcaaagcttgccttcttcacagcgcttggtgatgcacgtggttgtttctcagtatggtttgccaaagggatgctctgattcaggaggctgaggtggggcctgggaatgttcatttctaaccttttcccaggtgatgctgaggccactggtccaggggccacctttgggcctgaagccgctaattaacaacatgagtcgtcttttatatggtccaggcatgtcgccccctcgatagaacacagagctccctctttccctcttggcctcatcaccagcccccagaacaggacccagcactagcagcactgaaatcgtgttttgttgggtgaacttatgcgtcgtgatgctggggttagacaaggacggccgtgggagaggcggaactggccaagtctttgatgaccatgtgaagaagcccccagccctgagggcgagaggccagagcctccctgatgctgagtccagaccaggagtccagccaggagctggtcactggtggagctagaggcttttcaagtgcatcctgggacttctgaccttccctcctgacagttctcatccccagctgcccggtgagtcacctgggagcttcgaaaagtcccgatgccctggctgctggccacacccagcccaaccacatcagagtcgctgggctgtggccagcttgtagcagctactcaggtgttctccaaggatgagaaccacagatttagtcactgcagcatggcaggggtgggggtgggagaacaggaggcttggaaaaggaaactcgaacaggctcaagaatatcagacacagccttgggaggggggccgggccctgcccttgtggccagctgcctcacctgcctgggcccccgcccgctgctcacgatgcaggcccgtacataccactaaaggcccaggcggtagcgggtaccttcacccccacggatccgcaaagcttggctcaaaccagggagccatgaagcaggctgggagaacacggctctgcaggaagccagggctctgctgagtttcacaaggcagctctgtggacgtgaggctgctaggttagaagactggacggagaggattcccgccagggagaggctgacccagcacgctctcaccaggcttcattaagcccctcagtcagggccaggaggcgccactaaagcccacactggggcagtgtggctctggagcccgagtgcctgggttcaaatcccagctctggccctggctgacgctgtggcctcgactgtctcaggtgaaggaagagtaacaggaagggatgatgcaggcagtttgcagctggatcacagagcagggccccaggcaggcttgctctaactgtggccagctctttccttccttaggaagtggttcccggactcttctgaaggcacttccatcagtaaacaacttctgagcattcccaatagatgtatgtgtataaattgcactcat

SEQ ID NO: 1405 - DNA, 502 bp, Homo sapiens
agaacctgtatgtgccacatggaaaaacaggacaccagagcccaccagacagtgccggccagcagagaagcagagagccagcgccacacaacatcaagaaggccgacaaccaggttggaaaccaagacggagctcagacccaccacatcgccccagaggcttttccagcacccatgatgtttcggactgacctaaaaactaattgtcgagaagccaagggtgaggaggcaggaagcggtctccccaccggcactgggattggcgggtccaagcccagcaaccggcttcgctccacaacacacaccacacctgggactgtttttaatacatagcaacagactgggttatttatttaagatgtgtattgtgtcatatgaagtttaagagacataaatggcattttgttatttattaagacaaactccaattgttctctggctgtttttttcagttgtgtctagcaaaatccttatctgccctttgaaataaaatgtttaagttt

SEQ ID NO: 1406 - DNA, 1116 bp, Homo sapiens
tttttttttttttttgagatttttataaacaaaaacattttatttcaaagggcagataaataatttgctagacacaactgaaaaaaacagccagagaacaattggaatttgtcttaataaataacaaaatgccatttatgtctcttaaacttcatatgacacaatacacatcttaaataaataacccagtctgttgctatgtattaaaaacagtcccaggtgtggtgtgtgttgtggagcgaacgcggattgctgggcttggacccgcccaatcccagtgcctgtgggggagaccggttgtccaaacctctgctgtgccccctgtgccctgaagctgaaacagcagcgcccatggccccggagggcggccaggaaagccccagggctggggatgaacggtgacttcggggcgctctgtggctggcaagcctggggtgccctccaaccggaggtgcttcctgcctcctcacccttggcttctcgacaattagtttttaggggtcagtccgaaacttcattgggtgctgggaaaagcctctggggcgatgtggtgggtctgagctccgtcttggtttccaacctggttgtcggccttcttgatgttgtgtggcgctggctctctgcttctctgctggccggcactgtctggtgggctctggtgtcctgtttttccatgtggcacatacaggttctctgaagccacagccagcgcagtactcgctcactttgatgttctgtgtctggaatgcctgagagggtcggggctaacctgtgaaccccccccaccctcccggccttgttgtcacgcgtgcatttgggtggctgcaatgggcacacgcctgtgagcccagggccggccgggtcttcggttctctggcttggctcaggcagcagttcctgcagacttttctcactgctgttcagcaatatgtctcctttaaaatagcaccaggggttctcaggttggcttctgtgtcttttccaggtgcgtgtgcaaaaggcaaagggaggtctctctttccatgcagggccctttgtctgaactgtccttgaaaggcagttgtgaagggtgggcccagaccccctccacgggactggggtggggtgtcactgttc

SEQ ID NO: 1407 - DNA, 1305 bp, Homo sapiens
  SIMILAR (48)..(998): 421254mologous to Homo sapiens TGF-beta superfamily protein,accession number AB000584,Smith-Waterman Score=366.
  misc_feature (1)...(1305): n = a,t,c or g
gccgcaacctgcacagccatgcccgggcaaagaactcaggacggtgaaatggctctcagatgctcctggtgttgcttggtgctctcgtggctgccgcattggggcgccctggtctctggccgaaggcgagccgcgcaaagtttcccgggaccattcagagttgcaactccgaaggacttccaagattccgaagagtttgcggaaacgctaacgaggacctgcttaacccaggctgcgggccaaaccagagctgggaagattcgaacaccgaccttcgtcccggcccctgcagtccggattactcacgccaagaagtgcggctgggatccggcggccacctgcacctgcgtatctctcgggccgcccttcccgaggggctccccgaggcctcccgccttcaccgggctctgtttccggctgtccccgacggcgtcaaggtcgtgggacgtgacacgaccgctgcggcgtcagctcagccttgcaagaccccnatgggcccgcgctgcacctgcgactgtcagccgccgccgtcgtcgcagtcggaccgaactgctggcagaatcttcgtccgcacggccccagctggagttgcacttgcggccgcaagccgccagggggcgccgcagagcgcgtgcgctctaacggggaccactgtccgctcgggcccgggcgttgctgccgtctgcacacggtccgggcgtcgctggaagaccctgggctgggcccgattggggtgctgtcgccaacgggaggtgcaagtgacccatgtgccatcggcgcgtgcccgaagccagtttccggggcggcaaaaaatgcacgcgcaagaatcaaagacgaaccctgcacccgccctgaaagccccgaacacggtgcccaagcgcccctngcttggtgccccgccagctacaaatcccatgggtgctccattcaaaaagacccgacaccggggtgtgcttccaagacctattgattgacttgttaagccaaagacttgccacttgcattattgagcagtccttggtcctttccacttgttgcaccctgcgccggggggaggcgaccttcagtttgtccttgcccttgttggaattgggctcaaggttccttgagacacccgatttcttgcccaaacagctgtattttatataagtctgttatttaattattaattttattgggggtgaccttctttggggacttcgggggcttggtctgaatggaactgtgtatttatttaaaactctggtgataaaaataaagctggtctgaattgttaaaaaaaaaaaaaaaacttcggtgccaatt

SEQ ID NO: 1408 - DNA, 652 bp, Homo sapiens
attaaaatctttttttttttttttttttcatggtcacttctttatttttgtatacaaatgtacatgacacgtcttgacagcccacccaccaccacacaggttagggcctggcccccagggaagaagcgggatggggagagagctggtgggtcccaccgtctgcctctccagccttcccaggctggcagccagttttcccaggcctccagagggttgggaccacagcaggtgcaggtagtgaatggtgggtgctggccttgcagaggttacggggaggggactcaagctccacagccaccaagctgagtcggggaccccggggagcccaacccccaggctccaggtgctcagtcctccacccctaagccagcacacattccccctccaacgcaggaagcaggaaggagatgggaggggaagtggtttttttgattttaagtttcattagaagaagggggcgagagtggggaagggattaagggaaggcagcttggcaaggaccaaaacttggctaacccggacagttccctggcttccaagttgggggaaagggaagctgattccccatgcttggttccactgctctggtcccctcacccctcaaaactccagatggaccaggcctccggaacggcactgccgcccacactcc

SEQ ID NO: 1409 - DNA, 1420 bp, Homo sapiens
  SIMILAR (334)..(170): 541254mologous to Drosophila melanogaster BcDNA.GH09817,accession number AF181640,Smith-Waterman Score=188.
gtgccttgagccgctccagttcctctgcactctgcaggtgcatcgctgctgtctcattctcagcaatgaactcctggaagtcctgggtctcagggccctgtgctcctgtcaggctgcaactggcagtcggggagggctcctcatctggggctgctgggcggctcacctgccgcttgctctccagctccagcttcataatggcgtggaggtaatgagtccggacccggattggattaaattcaatgcgtcctgccatgttcccacagccatcccgggagcagccacatggaaaggacatgcgatccactgacctggcatttaatcccagcctggctgcaggcacacgcttctgggtcacaatacagtcggcagtcacaaccacattcttcccgtgacaggcggatggctcgaagttcttgcttctcttcagcatcaatccggtgtaccccagaagccctcagcagggcccgtctccgtttggtgggcagatggctgcaggaagaagtaatcatccacctccacattttccacatcaatatcttcatctgacacatcatccagcgtcaggccatcagcctccaccgactccactgtcccattcttggtcagcttcattttcttggcatggagtttctcttccttcaggtgctcacgcagaatctctcgatggttcacctcctgttcctgggcaaactcacagagtgtatagctccgtacagagttatggcgctgggccatgcccagagagctaccaccctggctgggcacactggtaaaaccttggcgccgggcaaagtagtatacagtcacctggtcaaagcgtacattcttcctccgcagctgcttctgccgcttcaggatggatgtgggtgtgaagctggcagtggtaggaggattgaggctgtcgcagctgtcagcactatcactgctggagatctcatcatctgagttggaaactgatgagcccacatccacatcatcaaacttcctcttgagacccgagcccgtgaatgcatccattggtttcaaaggggtttccttggggagcccaccaagttggccccaaagcccctactcacccccagctagccaggtacattaggattctgcccagggaaaaaaaggaatcagcattcctgtccccagacagactcctccccagtctatacacacagctctctaaagaaagcacctcacctagcactgatgtctgctttctcaatattacgttctttctctactagctctggccaacattctcctactttcgtttcccttcagcccctctattctcaatcactcttagaataatgagatgggtagcagcagcacctttcccagtgaaggaaaggcctttgcttccaatccagctggggtctaggcttcattagccccctcgtgccaagcttggcgtaatcga

SEQ ID NO: 1410 - DNA, 847 bp, Homo sapiens
  SIMILAR (43)..(372): 491254mologous to Homo sapiens Human secreted protein, SEQ ID NO: 4396,accession number AAG00315,Smith-Waterman Score=217.
  misc_feature (1)...(847): n = a,t,c or g
ctggcacgagatttcttcactcttttctaagctccctcaagcatgggtgtgggccctccttgctgctcgccgccctcctgctgctctctcccggcgacggcgccggtgcgttgcgacacacctgccaactggcacctatcttgacctgctgggcacctgggtcttccagggtgggctccagcnggttcccagcgcgatgtcaactgctcggttatgggacccacaaagaaagaaaaagtaggtggtgtaccttcagaaagctggatacagcaatatgatgaccttgggcaattctggccatttcaaccatcatttacaaaccaaggctttgagattgtgttgaatgactacaagtggtttgccttttttaaggatgtcactgattttatcagtcatttgttcatgcagctgggaactgtggggatatatgatttgccacatctgaggaacaaagctggttattaaatagagcatctgttgagggactcttttaaaaccacagccatgaacagacgttggggctaagagacagagcagcctgcggccagtgtggacctacctgtagcagcatagcaaaggcctttaacaggttccagtcccttctggagtctttatttgcatgcaaaaatgcaaaggagtcctggtgacctacctctcaaggcagctgccctcctgaacactcccttggaaaacagtaaacatcattttggaatgtgaacaaccagagactacacaggagaaaggaaaaaaaaaattctgaagatgcgaaaatcttgggtggcttcaccggttcagtttttttaataaaaggaacaatatacaaaaaaaaaaaaaaagggcggccgct

SEQ ID NO: 1411 - DNA, 546 bp, Homo sapiens
  SIMILAR (11)..(241): 941254mologous to Homo sapiens Human secreted protein encoded by gene 85 clone HBXFG80,accession number AAW67891,Smith-Waterman Score=363.
  misc_feature (1)...(546): n = a,t,c or g
tctggttgtcatggatgcactggtagaagatgatatctgtattctgaatcatgaaanagcccataagagagatacagtgactccagtttcaatatattcaggagatgaatctgttgcttcccattttgctcttgtcactgcatatgaagacatcaaaaaacgacttaaggattcagagaaagagaactctttgttaaagaagagaataagatttttggaagaaaaggtaatttttatcttttaccttcattgcgtttgtgacataaggaataattcaaaatacttgaaattttgaatactttttgtcctgtcttccatgattgtactaaatttccaagaataactcactgctaatctgaaaactctgggcattatacttatcctgtgtttcacataccatgtacttggtaaatatttgtaggagaggatttaacaacttggagttatattccaaatatttttctttcattttcaggtttacttacctccatagctgtatgtattttattcagaattttcaaatctgggcaaaaaaaaaaaaaaaaa

SEQ ID NO: 1412 - DNA, 557 bp, Homo sapiens
  SIMILAR (2)..(292): 1001254mologous to Homo sapiens Human secreted protein encoded by gene 85 clone HBXFG80,accession number AAW67891,Smith- Waterman Score=486.
tgaatctttgaaagtattgaatgagcagctacaatctaaagaagtagaactcctccagctgaggacagaggtggaaactcagcaggtgatgaggaatttaaatccaccttcatcaaactgggaggtggaaaagttgagctgtgacctgaagatccatggtttggaacaagagctggaactgatgaggaaagaatgtagcgatctcaaaatagaactacagaaagccaaacaaacggatccatatcaggaagacaatctgaagagcagagatctccaaaaactaagcatttcaagagtatctgtagcacagcctggagtgcagtggcgcaatcatgggatagcatgaattttgaggactgttccctcttcgcataagaatagaagtagccatcagagttcatatactttttcaaccctttttcctcaaatacgtatcatttttacttaagtaacttcaattctgtgttttaagctatctaataattgttgtttctactatgttaagatagcctctctacattgttacccaccatcccctaaaaaatgctgatctgaaa

SEQ ID NO: 1413 - DNA, 2354 bp, Homo sapiens
  SIMILAR (302)..(1435): 461254mologous to Homo sapiens Human secreted protein encoded by gene 85 clone HBXFG80,accession number AAW67891,Smith-Waterman Score=640.
cgggctcctgccgagtcagaagaaatgggactccctccgcgacgtgcccggagcagctcccttcgctgtggaagcggcggtgtcttcgaagaaaccggaagcccgtggtgacccctggcgacccggtttgttttcggtccgtttccaaacactaaggaatcgaaactcggcggccttgggggcggccctacgtagcctggcttctggttgtcatggatgcactggtagaagatgatatctgtattctgaatcatgaaaaagcccataagagagatacagtgactccagtttcaatcatattacaggagatgaatctgttgctctcccattttgctcttgtcacaccatatgaagacatcaaaaaacgacttaaggattcgagaaagagaacatcttttgttaaagaagagaataagatttttggaagaaaagctaatagctcagatttgaagaagaaacaagttacgtagggacgagaaccaagtaaataaggcctatcatgcatatcgagaggtttgcattggatagagataatttgaagagcaaactggacaaaatgaataaagacaactctgaatcttttgaaagtattgaatgagcagctacaatctaaagaagtagaactcctccagctgaggacagaggtggaaactcagcaggtgatgaggaatttaaatcccaccttccatccaaactggggaggtgggaaaagttggagctggtgacctggaagatccatgggtttgggaaccaagagctggaactgatgaggaaagaatgtagcgatctcaaaatagaactacagaaagccaaacaaacggatccatatcaggaagacaatctgaagagcagagatctccaaaaactaagcatttcaagtgataatatgcagcatgcatactggggaactgaaggagaggaaatgtcttaattttacatctggtgacttcaagttacaagcttgaactactaaggaaaacttgaaaaaccttcaactgcaatcaagaaaggcctgtgccccttgtaggatgcagttgaagaccttggaagagacagcacaaaacttgcacttggatggatttttactggcaacatacgcaagacatccccctctcttaccaaatggcaaagctctttgtcataccacatcttcccctttaccaggggatgtaaaggttttatcagagaaagcaatcctccaatcatgggacagacaatgagagatccattcctaatgatgggtacatgctttcagggaacacagttcttatgggcagaattctctggaagacaattcctggggtattttccaaagtcctcctaaaatcaaagtgagacagcatttggggaaactaaaactaaaactttgcctttacccaaccttccaccactgcattacttggatcaacataatcagaactgcctttataagaattaatttgggaaggagattcacgatttcaccatgaggacacttatctctttcagtggtcctccccaagaaattatttaaccaaactgaaaggagatttggattaaaaatttttgcagaggtcttcagtatcctatatttggaaccacactgtacaatagtaccaaaacccaacatagttggttttcctagtatgaaagagcaccctctggctccatattcctaagaatcctgaaatatgctactatactaattaataagtaaaccttaagggtgtttaaaaaacctctgccttctatattaattgtaaaattttgcctctcagaagaatggaattggagattgtagacgtggttttacaaaaatgtgaaatgtctaaatatctgttcataaaaataaaaggaaaacatgttcccttcaaattgccataatggaacaaatggcaatgtgagtaggttacatttcctgttgttataatgccgtaaagatattggaaaaaataatgaaataaaagcatccttaggttatacccatctttatatgctattgcgtttcaatatttaagatttaaagtgattttttggtcacagtgttttgttgataaaatttttttagaattgaagtttgaattctaagacttgaaacaacctgatcactgaagccaactttgtcccagcacattccttaagtcctaattgggaaaaaaaaaaaaaaaaatgaaatagttgaaaaactctggggtgtaaacaaatgattgtaaccctacacactattcaataagtagtagaaggagcatcacacagatttcagtctaatctgcccttctgtgggccataatataaacataaatgtgtgtaatgataaaaagtcattttcttcaaagagactacagctagctgcacattgtgtagagcagcttcta

SEQ ID NO: 1414 - DNA, 422 bp, Homo sapiens
  misc_feature (1)...(422): n = a,t,c or g
ccaaaaaaaaaaaaaaaaaaaatagnattcctatatgatccagcaccaccatttctgagtatataccctataagaattgaaagtagaatcttgaatagacacttgtacactcatcttcatagcagcattatttcaataggcaaaaggtggaagtagcccaagtatccactaacagatgaatggataaataaatgtggtatataaataccatagaatattatttcacctaaaaaggaaggatattctgacacattatacaacatgggtgaaccgtgaagaccttatcctaagtgaaataagccagtctcaaaagataaatactgtagaatccacttatatgaggtacaaatatatatcaaattcatagatatctattggtacctcatataagtcccatagagtatagaaatatagctcgtgcc

SEQ ID NO: 1415 - DNA, 1658 bp, Homo sapiens
  SIMILAR (1385)..(1486): 581254mologous to Homo sapiens Human secreted protein sequence encoded by gene 112 SEQ ID NO:282,accession number AAB56188,Smith-Waterman Score=89.
  misc_feature (1)...(1658): n = a,t,c or g
cgacttttttttatttttggaagaggaatgatggagatttgtatgttgtctttttaatgtataagattgtggaaatgattaaggtcatatggctcttagaaagtttgatgcacttatattctttcatcaacgtgagaattaaaatgtattttctgtctttcatcatttagttaattgcaccttaagcggaagatatttcccagaaggaggatacacaaagaagctagtcccaatcgaatcagagtatagaagatcttcatttgaaaaaccatctacctcagcatttactgagcattttaaaactcagcttcacagagatgtctttgtgatgtgatgcttagcagtttggcccgaagaaggaaaatatccagtaccatgctgttttgtggcatgaatatagcccactgaccaggggattatttaaccaacccactgaaaacttgtgtgttgagcagctctggaactggattttacttttaaagaatttgctcatggacctgtcatcctttttataaaaaggctcactgacaagagacagctgttaatttcccacagcaatcattgcagactaactttattaggagaagcctatgccagctggggagtgattgctaaggaggctccagtctttgcattccaaagccttttggctaaagttttggcactttttttttttcatttcccatttttaagtagttactaagttaactagttattcttgcttctgagtataacgaattggggatgtctaaaacctatttttataggatgttatttaaaataatggcagcaatatcacctcttattgacaatacctaaattatgagttttattaatatttaagactgtaaatggtcttaaaccactaactactgaagagctcaatgattgacatctgaaatgctttgtaattattgacttcagcccctaaggaatgctatggatttcacgtgcagggctaatttccaaaggggctagagttagtactactttaccagatgttaattatgttttggggaaatgttacatatttcaaacagaagtgcctcattttagaaatgagtagtgctgatgggcactgggcacattacagtgggtgtcttgtttaatactcattggtatattccagtagctatctctctcagttggtttttgatagaacagagaggccagcaaactttctttgtaaaaggctggttagtaaattattgcaggccacctgtgtctttgtcatacattcttcttgctgttgtttagtttgttttttttcaaacaaccctctaaaaatgtaaaaaccatgtttagcttgcagctgtacaaaaactgcccaccagccagatgtgaccctcaggccatcatttgccaatcactgagaatttagtttttgtttgtgtttgttgttgttgtttttgagacagagtctctctctggttgcccaggctggagtgcagtggcgcaatctcagctcactgcaacctctgcttctcgggtttaagcaattctcctacctcagcctcccgagtagctgggactacaggtgcatgccaccacaccctgctaatttttgtatttttagtagagatggggtttcaccatgttggcaagntggtcacaaactaccgacctcagtgatccaccgcctggccttccagtttggg

SEQ ID NO: 1416 - DNA, 1113 bp, Homo sapiens
  SIMILAR (732)..(866): 861254mologous to Homo sapiens S1R protein,accession number AF113127,Smith-Waterman Score=195.
ctttatctcaggaatccctgtcctgtgctgtttgctgtccagtgtccaagaactgttgtttcatatattttgtctggttttatttaaggaaggaggataaatgtggcctctgtaattccctgtgacctgaagcagctgataagtcccatattttataacaaaagactgacttcttagatgtcctttctcatataatttatactctctatatataacaattgaattgtaactcataaaattatagcagtgtcagatgtgtccatcaattaagttccataaatacataagaataaaacggaaagcacattgtgaacttcgatagacatgttcacagaataacttgatattacttgggtttaaaagtgcaatcctagttcatttgtttatatattttctaaaagtttttataggatcctcctgaattaaaatacttgtaatgatatttctgcttttatctgtattttatgttccaaaacgtcacaaattatactgttaactaggtttgtataccataaagacaaatgttgaataaatagctgttctttcaatttctttaaaaaaaagatccaagatgggcattatattcattgtatgtttacaaattcttacattttagttattcttcagcaaaaaatccagatggatgtttttttcagaaagtgttgaatgggtttacaaagtttttttgtaaggaacaatattgcaaattactaaaattgtatttttataggctgtttgctcttttgtggatattgtgcctgtcaggattcttgaagttttttttttatagtgagataatggagttggtcttagccgctgcaggagcccttcttttctgtggaatttcatcatctatgacacacactcactgatgcataaactgtcacctgaagagtacgtattagctgccatcagcctctacttggatatcatcaatctattcctgcacctgttacggtttctggaagcagttaataaaaagtaattaaaagtatctcagctcaactaagaacaacaaaaaaaatttaacgagaaaaaaggattaaagtaattggaagcagtatatagaaactgtttcattaagtaataaagtttgaaaaaaagattaaaaaa

SEQ ID NO: 1417 - DNA, 1059 bp, Homo sapiens
  SIMILAR (722)..(934): 701254mologous to Homo sapiens Secreted protein 108-003-5-0- D2-FL,accession number AAY59658,Smith-Waterman Score=196.
ttcttcagcaaaaaatccagatggatgtttttttcagaaagtgttgaatgggtttacaaagtttttttgtaaggaacaatattgcaaattactaaaattgtatttttataggctgtttgctcttttgtggatattgtgcctgtcaggattcttgaaggtaagttatgttataatggttaatttgaaatataattctggctgtgtcaatataaataacctcaaaaagctataagagatactcttatgataggacacttagttataattatccagaacatttgtatatagaatgattatagaattatccctttaggaaaatcaggggtcttgtgttggtccttattattgactgaaaaaaagatgaatgaataaatgaattaaattacatagaaagaggcccttggcttacaactgccaagctccagtggcacatttaattgtgaaaaacgaaatatatttttaaataatttatatgtggaatgctgtttttcaaagtgggtaatttagtttaatggaatataaccactcattcatccttccatccaacagaggcaagtttggacttgccttgcctttttctgcttttaaccattggtattcaaagtgtacccccattgtcaaatgtataatgtagccagtaaatcattagaggaagtaagttaagtcctgttaatactgttctcaaatataaacatatttctttaatctcttccctatagttttttttttataggtgaggataatgggagttgggtcttagccgctgcagggagcccttcttttctgtggggattcatcatctatggacacacactcactggatggcataaactggtcacctgaagagtacgtattagctgccatcagcctctacttggatatcatcaatctattcctgcacctgttacggtttctggaagcagttaataaaaagtaattaaaagtatctcagctcaactgaagaacaacaaaaaaaatttaacgagaaaaaaggattaaagtaattggaagcagtatatagaaactgtttcattaagtaataaagtttgaaacaatgaa

SEQ ID NO: 1418 - DNA, 1790 bp, Homo sapiens
  SIMILAR (274)..(675): 651254mologous to Homo sapiens MDS013,accession number AF182414,Smith-Waterman Score=317.
gacccgaccccggtgacccctcgttcctcgttgaagaacgactcaactaatggcagcagcgtggcctcctgccaccgtgcacatcgaatgggcctttctgagaaaagtctacagcattctttctctgcaggttctcttaactacagtgacttcaccagtttttttaatactttgagtctgtacggacatttgtacatgagagtcctgccttaattttgctgtttgccctcggatctctgggtttgaattttgcgttgactttaaacagacactaagtatccccttaacctgtacctactttttggatttacgctgttggaagctctgactgtggcagttgttgttactttctatgatgtatatattattctgcaaagctttcatactgactactaccagtatttttttggtttgactgtgtatactcctaccaatctaagaaggatttcagccaaatttggagcagggctgtttgctcttttggtgggataattgtgcctgtccaggattcttgaaagttttttttttttatagtgagataatggagttgggccctagcccgctgcaggagcccctccttttcctgtggatttcatcatcctatgacacacactcacatgatgcataaacttgtcacctgaagagtacgtattagctgccatcagcctctacttgggatatcatcaatctattcctggcacctgttacggtttccgggaagccagttaaataaaaagtaattaaaagtatctcaggcttcaacttgaaggaaccaaccaaaaaaaattttaacggaggaaaaagggattaaagtatattggaagcagtatatagaaactgtttcattaagtaataaagtttgaaacaatgattaaatactgttacaatctttatttgtatcatatgtaattttgagagctttaaaatcttactattctttatgatacctcatttctaaatccttgatttaggatctcagttaagagctatcaaaattctattaaaaatgcttttctggctgggcaccagtggctcacgcctgtaatcccaccactttgggagaccgaggcaggtggatcacgaggtcaagaggttgagaccatcctggccaacatggtgaaaccccgtctctactaaaaatacaaaaattagctggatgtggtggcacacacctgtagtcccagctagtcaagaggctgaggccagagaatcgcttgaacctgggaggtggaggttgcattgagccaagatcacgccactgcattccagcctggtgacagagcgagactcagtctcaaaaaaaaaaaaaaaaatttttcttcctaaattagccacgcatagcggttcgtttgcaattcaaaaataattttatgagtagataagaatatcagtttaccgttgtctagtgattttatctaaattttccctgaattattaagtaatattgatttggctttgattctgaagtagtagagtctttaccattataaactgtaaatctctttttgcttaaaaggaaaaaaatgtaaaagataaattccacagagaattattcagtattacattaaaatgttaatgactttttattttaaattgtactaacattaaaagttggcctgaaagtcagatattatgacaaaatttgacattaattgtttttaaagtatagatttcatttgaaattatagaatggtaatgtggttagaggacaccaaagatactgggtcatcagccattaagtatatctatttcaaaattaaaatatttgggaagtaaaaaaaaaaaaaaaa

SEQ ID NO: 1419 - DNA, 2558 bp, Homo sapiens
  SIMILAR (1204)..(1512): 911254mologous to Homo sapiens zinc finger protein ZNF140,accession number U09368,Smith-Waterman Score=519.
  misc_feature (1)...(2558): n = a,t,c or g
ctaaaggtcggcgaggcttctgaagacgcaattcctgcgacgcccgcggaggggccctgggggtcggctccgagcgtctggcctgtgttggctgtaggcaacgaaaggagccctcccggtctgcgccggatggccccgggcggtgactcggtccggagccctggaacgctacgcccacctggcggaaagcaccacggaaacgcatccttctgtggccactgctaggtctgccattttacacttttctgatctcctccttccccttctgtgagctatgtctcaggggtcagtgaccattcagagatgtggccatagacttctcccaggaggagtggaaatggcttcagcctgctcaaagagatgtgtacagatgtgtaatcgttggagaactatggccatctggtctcactggcaggtctttccatttctaagcccagatgtgggtttccttattggagcaagggaaagaaccctgggctgggggaaaagggaagtgaaaagagatctgttttcagtttcagagtcaagtggtgagaaccaaggacttttccaccaaaaaaatgtcatttatgatggactccatcccagtatttgaatcatggaaaggaattctaaagtcaaggcccctgtgtattccagttttaaaggaggctggaaatgcaaggatcatactgagatgctgcaagaaaatcagggatgtattaggaaagtaacagtctctcatcaagaagccctggctcaacatatgaatatcagtactgtggagaggccctatggatgccatgaatgtggaaaaacttttggtcgacgcttttccctggtgttacaccagaggactcatactggagagaaaccatatgcatgtcagggcatgtggcaaaacctttagccagatttcaaaccttgtgaaacaccaaatgatacatactggaaagaaaccccatgagtgtaaggactgtaataaaacattcagttacctttcatttcttattgaacaccagagaacgcacactggggagaaaccttatgaatgtactgagtgtggaaaggcctttagccgtgcctccaacctcactcgacatcagagaattcacataggaaagaaacaatatatatgtaggaaatgtggtaaagcatttagcagtggctcagaactcattcgccaccagattacacatactggagagaaaccttatgaatgcattgaatgtgggaaggcattttcgccgtttctcaccccttactcgacatcagagcatccatacaaccaaaaccccgtatgaatgtaatgaatgtaggaaagctttccgttgtcactcattccttattaaacatcagagaattcatgctggagaaaagctctatgaatgtgatgaatgtggtaaagtcttcacttggcatgcatcccttattcaacatacgaagagtcacactggagagaaaccctatgcgtgtgctgaatgaaataaagccttcagccggagcttttccctcattctacatcagaggacttcatactggagaggaaccctatgtatgtaaggtatgcaacaaatccttcagctggagctcaaaccttgctaaacatcagaggacacacactcttgacaacccctatgaatatgaaaattcatttaattaccactcattccttactgaacaccagtgaatttacactgcaaagaaaaactatgaatgtatggaattttttaaaaagaagtataatgccttacttcagagaactcttggaaagaagccttatgtgaaagtgatgactgtgaagtaatatggcccacactttattcaccaccctggagaaaaaaaaacccaggaatatgtggaaaagccattaataaccactcttttatttttttgcaataacaaggtgaaatcaatattgttgagaagattcttccatctggtaatgttgagaagacttcatttggtaggagtcccttactttacgtgtgtaaattcctaccaggaaagaatacatatccaatagattggagaaagccagagattagccccgcattccgcatctgtcaaccaggacagaaagcatggacaagggatgagctttacaaagatgatgcactttggagatcagaaaattcatatttaaggcaaagtgatacaaacacagtgatttggggaatgccttccatttacaatgcaataccttaaattttaatacccttgtagggagganaaagccaactgtattaaatgaatgtaggagtgacctttctgcaatatttcaaacctatatcagagaattacactgtgggaaaactaccattgtaataagtgtagcaaaatctccttagatatctgaaaagtcatactggatggaatctgtagggaaacggttctattttgagggaagggggattcctttttgttttttaagtgaattcagaaaatgttataaataaatcttttggtttattataaaccttctgcttgctgattttttcccacagcatgtgattctgaaaatgtaactacaatattgacataaaaaataaacagtagtttttcttgttgaaacatac

SEQ ID NO: 1420 - DNA, 1673 bp, Homo sapiens
  SIMILAR (1460)..(1567): 581254mologous to Homo sapiens Human secreted protein, SEQ ID NO: 7253,accession number AAG03172,Smith-Waterman Score=101.
acccggatcagggagacctgtgctattgacctctctgccccaggtgtctggcttctggtcttgtgccacatggctggttcctggatcagaggagctagatgtgggcctggaaaggctgattttagtgcatgaacatgcacttggagcatgtttatgggtcaaagaaaatcgagaggagaagttgaagttataggagagaaaagaaatgattaatggggcaagatgaaggaaaccggaggggtcaggatgggatcaagagcccaagtagaagaatgtatcttgaaaaggagatatttgaaacagcagggaagaagaaaaaggatagtgagatataaaaaggctactgggctttttggtctttgaaggacattttactgatgcaatatattttctcagggagttaggaggcactattagtttaaatgtggaagagtgggggtttaaatggcacgagtggggaatagtcatataccctttgaacataaaaggaagctgccccaaatcaaaagttttaacaaataatgttgagtgttcacctgggattgggaaccatgagtttgtaggaaaccactcttcttagttaagtgatttattatacagtgtttcatttagcctgctataaccatagagaagtctgattatagaattattctggggaatggggtttataaatggcttgtagctaacaaaaaaagataatcctttctttttcttacactccacttccaaaccatcagcaaatcctgtttgactctaacttcaaaacgtatcctgagtctgaccacttcctaagcctgtctactgctaccacccttgtataagccaccgccactcctcctcccctgatagagtggccctgttaaaaggtgcatgttgtgttgctcctttgctcagaacactccaggaaagcttctcatctcactcaggaaaaaccgaagccctctttttgatctgctgttctccacctcactcagtctgctccagcagcactgaccttgctatttctagaacatgctggagatgctggcaagctcaggagccctgtcaatttgtattccccattgccctagagtgctctgtcttcatcatccatgtctcgtccccccaccttctttcgagtgtttgctcaagtgtcaccatagggagagaaccttttctgaccaccttaaacgttgctgaaaacctcccccagcctgcctcttgccagcatgttccatcttcttccttttttagcacctaccaccttcacatatattatttacttatttttattgtgccggttcttccccggccccggagagacggagatttttacccctagcacctggaactgttcctgggtatcagaggcattaaaatgtttgttggatggactaatgaatgagaagagaaggctgggctgaatggctcacgcctataatcccagcactttgggaagccaaggtgggtggatcattcaggtcaggagttcgagaccagtctgtctgggcaacatggcaaaacttcatctctacaaaaaaatactaaaactagctgggcgtggtggcgtgcacctgtagtccctgctacttaggaggctgaagtgggaggatggcttgagcccagaggtgggggttgcagtgaggcagtgagtggagcattctagcctgggcaacagagccagaccctttaaa

SEQ ID NO: 1421 - DNA, 397 bp, Homo sapiens
  SIMILAR (117)..(173): 521254mologous to Homo sapiens Human secreted protein, SEQ ID NO: 4433,accession number AAG00352,Smith-Waterman Score=58.
tttttttttgagacagagtttcgctcttgtcacccaggctggaatgcaatagtgcaatcccagctcactgcaacccctgtctcccaggttcaagcaattctcctgcctcagcctcccaagtagctggggttagagatgcctgccaccacgcctggctaattttttgtattattagtagaaatagggtttcaccatgttggccaggctggtctcaaactcctgacctcatgtgatccacccacctcggcctcccaaagtgctgggattacaggcatgagccacagtgcctgacctgtaactcacctctttctaaggatacagatatgaagacagttttgactttctgccaaaagttccaatctaaaaataaaaaacaaaacaaaacaaattttgatag

SEQ ID NO: 1422 - DNA, 836 bp, Homo sapiens
  SIMILAR (142)..(222): 1001254mologous to Homo sapiens Human cytokine signal regulator CKSR-2 SEQ ID NO:2,accession number AAY78114,Smith- Waterman Score=136.
ctctcattgtgaagccatcctcaagccacctgcctacccttttatagtcattaaaatgtccctaggaatttggacttgttttgttccaaaggacatggtctcagggatcaacctaaggaacactagtgatgagcttctttaggcccggcatcatctcttactgcgctgctcctcatagctgtcctcctgggccccatctacgtcccctggaagcagaagacctgactctccttccttcctcccctgccacgtgggaccctcatctctgctgcctccttcctttcctgagaggctcagcttgagagaataagccagtgagaagcttctctagacttggctccaaacatctcccctcccaagacatcctgcctgcccacaggctcctgttgctccttcacacagacctggatgccccagagcaaggtcttcattcatggtcctgagcaggggccatgggattgggctctgggcactgacttaacggcacttccctttaaggcgagaaacatgccaaatctagacacggcaggactcccatccatcgccttgagactgaccgtaaaccacagacgctctccaggttctcaagagctatcctgccttccagattcctgcctatcccaactccccagccttgttgagggtctctattgcctcttgaatacaaatgcactcccaaagaggccttaagaaaataaaaaagattatccttcctctttgtctaagggtcctactcctcacactcagaaacaaagaagctctccctgctctctctgtgatgggaacactacttctagcatcctgcaggcttccccgccctgctgctcatggcggaa

SEQ ID NO: 1423 - DNA, 926 bp, Homo sapiens
  SIMILAR (299)..(715): 391254mologous to Homo sapiens Human secreted protein, SEQ ID NO: 6063,accession number AAG01982,Smith-Waterman Score=157.
  misc_feature (1)...(926): n = a,t,c or g
cggcccnnttcgatgaccatgtacagagcgctggaantcgtctgaggaagaacagcgaagcttttcgtcctggcaccagggtgatgagcccgcagtgacgtggaagtggcttccaaaggtgccacctcggtggcgattttcccatttccctttggattctccttggcacttcttacttcagactgcagtcactccccttccccagatctcagccgctcctcccaagcccttactgccccccacctccccgcttgctttcttctcatctcttcttactgaccttccttacctccatccacagggattctcggcaggagccacagcttaacaaggcttcttcataacaggacccgggccctgcaaagccacagcttccccagagggcaaggaggaacnctgaaccccctatcccccggagctggaatacattccccagaaagaggggcaagaacccccatggaaagcttgtgggaactggcctggggcattcggctttcccttgtggttattccttcctctttcatccttcacccaagcggggaagtgggacaagggaccgtgttgaaggcagattgaaggctcggcaaaacattcgggtttgttccaacaacggggcgagtatgaagaagccagaaggttcaaggggctttcctcccagaagtggccccgttccccctgatgtttgggtctggggtgcagacctgaggagcgctgcaaacctcctaggctattgactgttaagtcctcaggttttggccagattccagtttcgtgcctctgaaggtccaccagaagggcgcatgaagccccaggctgtttgccaaaaccctaccctgccccacaccaaggaagccagccaaaagggaaaataaagttattgagtgtttagtagaaaggaaaaaaaaaaaaaaaaaaaaaagtcgacc

SEQ ID NO: 1424 - DNA, 652 bp, Homo sapiens
  SIMILAR (532)..(567): 911254mologous to Homo sapiens DC21,accession number AF251292,Smith-Waterman Score=55.
gggtacggctgcgagaagacgacagaagggggcagctcttagtcgcgggctgactggtgtttatccgtcactcgccgaggttccttgggtcatggtgccagcctgactgagaagaggacgctcccgggagacgaatgaggaaccacctcctcctactgttcaagtacaggggcctggtccgcaaagggaagaaaagcaaaagacgaaaatggctaaattcgtgatccgcccagccactgccgccgactgcagtgacatactgcggctgatcaaggtagcggagagccagagctcctcccggggcgtggggtggaggtggctccgtttcccagggtggggtgattcacgtcttgaggtctcggccggtgtgagagcccagcctgttcccctttctgcgcccatccccggctcggccgccaccccgcccgcccgccccattcccttcccctgagctggccgggccggagcctcattttgttttctacttttttctctcctatgtgcatccccccaaggagctggctaaatatgaaatacatggaagaacaagtaatcttaactgaaaaaggtaattcaacagtggcgggacgggggacaagcgttcggtgcctgtcaccttcgccaagggcattaccgcccctgctccccttct

SEQ ID NO: 1425 - DNA, 526 bp, Homo sapiens
  SIMILAR (119)..(382): 1001254mologous to Homo sapiens DC21,accession number AF251292,Smith-Waterman Score=474.
cgcgggccgactggtgtttatccgtcactcgccgaggttccttgggtcatggtgccagcctgactgagaagaggacgctcccgggagacgaatgaggaaccacctcctcctactgtttcaagtacaggggcctggtccgcaaagggaagaaaagcaaaagacgaaaatggctaaattcgtgatccgcccagccactgccgccgactgcagtgacatactgcggctgatcaaggagctggctaaatatgaatacatggaagaacaagtaatcttaactgaaaaagatctgctagaagatggttttggagagcaccccttttaccactgcctggttgcagaagtgccgaaagagcactggactccggaaggtaacccctcgccctttccagaagccagagagaccaagttgttatgtaagaagtagtgtcggctgtgtagaaccactgactacacaggcccgaagttactgagaacttgggacagaaaaaatagccagcaagtgttcaaactactgaggaaaaaaaaa

SEQ ID NO: 1426 - DNA, 1228 bp, Homo sapiens
  SIMILAR (87)..(404): 891254mologous to Homo sapiens DC21,accession number AF251292,Smith-Waterman Score=496.
ctggtgtttatccgtcactcgccgaggttccttgggtcatggtgccagcctgactgagaagaggacgctcccgggagacgaatgaggaaccacctcctcctactgttcaagtacaggggcctggtccgcaaagggaagaaaagcaaaagacgaaaatggctaaattcgtgatccgcccagccactgccgccgactgcagtgacatactgcggctgatcaaggagctggctaaatatgaatacatggaagaacaagtaatcttaactgaaaaagatctgctagaagatggttttggagagcaccccttttaccactgcctggttgcagaagtgccgaaagagcactggactccggaaggttacagtctctagcttcgccatgtacatggcccttccgtgtacatggatgggcggggaggtaactaaaagatcctttacacaataaagtagatgatcatgataaatgaggacacagcattggttggttttgcccatgtactaatttaccctatgaacccgtgggattggcaaagttatttgtatcttgaggacttctccggtgatgagtggttatataaggcttgggcataggatcagaaattctgaggaatcctaagcccaggttgccaatgacgctgtcgcctgcagcagcaaggcacttcttggtagccagaatggcaatgaacccatcccatcaccttctattaaaagaagaggtgcttctgatctgtcccagtgaaggaggggttgggagacctgttccaagatcggacaagggagtacttggctaaaaattgggcaaccagagggagtgagggagtgctgcttgttaggatggacaacctcccattcctatttttaagaataaaattcccccaacttcctcttgcctttcctatgcctgtttgtaagtgaaataataggaatgagcaccccattcccaaagcttttattacccagtgggcgttgttgcatgtttgaaatgaggtctgttttaaagtgggccattctcagatgccagtttggagagtcagatcctttctcccttgaatatctttccgataaaccaccaaggtgggtgtgatcttaatatatttgaaaaaaacttcattcctcgtggagtcatttaaatgtgtacaatgtacacactgggtacttagagtttctgttttgattctttttttaataaactactctttgatttaaaaaaaaaaaaaaaaagggcggcc

SEQ ID NO: 1427 - DNA, 1007 bp, Homo sapiens
  SIMILAR (192)..(806): 381254mologous to Homo sapiens dJ470L14.3 (novel protein similar to the Arp2/3 protein complex subunit p21-Arc (ARC21)),accession number AL133174,Smith-Waterman Score=197.
atccttaattaaattaatcccctttcccccgcgtttcgcttccgcctacctcgcccaggctgccagaccggaagcgctccgctgtacctggatcctgctcctctgggttgaaacccgggcgccgccaagatgccggcttaccactcttctctcatggatcctgataccaaactcatcggaaacatgggcacctgttgcctatcagaagtcaattcaaaggacctgcccccaagagagacacaaggataccagatattgtggatgaggccatctttttaccttcagggcccaatgtcttctttcaaaaactatgaaattaagaatgaagctgataggaccttgatatatataactctctacatttctgaatgtctgaagaaactgcaaaaagtgccaattcccaaaagcccaaggtgagaaaggaaatgtatacgctggggattccactaaatttccccattccttggagagcctggtttttcccactttaacgccaatttatgcccaaaccctgcaaacaaaccaggaagatgaaagtgatgagagccctatttaccaaccagcctaaggccaagaacactgggactgaaaactttgtgagaaaagtttttcggaccctccagaatggataaaccccagcaaagtggttggacttggctttgttgaagagacagtttcatgaacaagagtcttttcaggaccttggaccattgaaagggagcccggggcagcccaccgtcttcccagaggccctggggcagcatttttccagcaagatgttacacaatctttttgcctttatttcagtaaagtttttatacagaagagaagaagagcatgtctttacttgaaaaactcttgatcaagaatttgggtgggagaacacagaaactgggttatccaagggtgatttgaaattttgtgcgagcattaaaactggcgcctccataagaataagtaataataaagaaatttctaacattccaaaaaaaaaaaaaaaaaacatt

SEQ ID NO: 1428 - DNA, 395 bp, Homo sapiens
  SIMILAR (13)..(144): 971254mologous to Homo sapiens HSPC114,accession number AF161463,Smith-Waterman Score=222.
gcgaaggcgaagatggcggacgtgctagatcttcacgaggctgggggcgaagatttcgccatggatgaggatggggacgagagcattcacaaactgaaagaaaaagcgaagaaacggaagggtcgcggctttggctccggtgagtttggggaaaatggggtagagtggcctagtagggcaggagctacgggttttggagtccccacccacctcataggaacaatgggagaaaggaggagttttcggtgatctcgtgtatgtcccttatagaagaggggtcccgagcgcggatgcgtgaggattatgacagcgtggagcatgatggcgatgaacccggaccacaacgctctgttgaaggctggattctctttgtaactggagtccatgaggaagcc

SEQ ID NO: 1429 - DNA, 153 bp, Homo sapiens
  SIMILAR (3)..(98): 1001254mologous to Homo sapiens human leukocyte antigen- A*0104N,accession number Z97027,Smith-Waterman Score=171.
gctcccactccatgaggtatttcttcacatccgtgtcccggcccggccgcggggagccccgcttcatcgccgtgggctacgtggacgacacgcagttcactgaccgagcgaacctggggaccctgcgcggctactacaaccagagcgaggacg

SEQ ID NO: 1430 - DNA, 947 bp, Homo sapiens
  SIMILAR (185)..(718): 671254mologous to Homo sapiens HSPC114,accession number AF161463,Smith-Waterman Score=518.
tttcactatacctttactttctttaatttgccagagggatatttcttgcacttaatgtatcatgtagaaatcaatttttattttcttattctggtattctctacatcttgcatggcctagcatatagtatatgttgagtatctagtgtctgagcggcacagacgagatctcgatcgaaggcgagatggcggacgtgctagatcttcacgaggctgggggcgaagatttcgccatggatgaggatggggacgagagcattcacaaactgaaagaaaaagcgaagaaacggaagggtcgcggctttggctccgaagaggggtcccgagcgcggatgctttaggattatgacagcgtggagcaggatggcgatgtacccggaccacaacgctctgttgaaggctggattctctttgtaactggaagtccatgaaggaagccacccgaagaagacatacacgacaaattcgccagaattatgggggaaattaaaaacatttcatcttcaaccttcgacaggcgaacagggatatcttgaaggggtatactcttagtttgaatattgaaacatacaaggaaagcccaggctgctatggagggactcaatggcccaggatttgatgggacagcccatcagcgttgactggtgttttgttcggggtccacccaaaaggcaagaggagaggtggccgaagacgcagcagaaagtccagaccggagaccgtcgctgacaggtcctctgttgtccaggtgttctcttcaagattccatttggaccatggcagccttgggacaaataggactggggtgggaactttgctgtgtttatatttaatctcttaccgtatatgcgtagtatttgagttgcgaataaatgttccatttttgttttctacatttaatgttactttcctgtcctaaaattgaaagttctaaagcataaaaaaaaa

SEQ ID NO: 1431 - DNA, 444 bp, Homo sapiens
  SIMILAR (442)..(299): 581254mologous to Homo sapiens Human secreted protein sequence encoded by gene 94 SEQ ID NO:264,accession number AAB56170,Smith-Waterman Score=143.
tttttatgtcatcttgatcagtgtgagagaactgtacttatgtcatcacctgcctttcctctgtgctggagtctacatgacaaattctgccatgaaagttttcttgatttggctggtgatagttaaaatcacagttttagaatttaaaaagctgtcttggccgggtgcagtggtatggttctgaggattaattttatatacacacatataaacactcacacacacatttgagttcaaaatgtatgttactacattttacaaaggaataagtgatttcatagattctgtatcaatattaaatcttggctgggtgcagagcctcatgcctgtaatcccagcactttgggaggctgacacagttaagatcacttgagcccagaagtttgagaccagcctaggcaacatagtgagaccctgtctttacaaaaaatacaaaaattagct

SEQ ID NO: 1432 - DNA, 425 bp, Homo sapiens
  SIMILAR (341)..(111): 881254mologous to Homo sapiens DNA polymerase delta smallest subunit p12,accession number AF179890,Smith-Waterman Score=381.
caggcgtgccaaccctccatccatttctccctcagctcaggacagcagggtgacagtgcctggagaaggccctggctcccctgatagccctcccggcctgtctctgacctgcactggaagcgggggtctccggggtgggtcttcagcacctgccacacctctgggggaggctcctagcccatctgcttggcccgacaccagcgctgcagccgtgtgatcccggtgcagggcccgtactgccaggccaggtcaaactgcctcagcagctccagctccgcttcctcctcgtcgcggggctggggctcctcccccaggcaggcagagaaggaggcccctgcggggaagaggagcgcccgcccagtgggcgcgagaaagtcagctgctgaaagagacagacggggccaggccagcggcgggcagacaag

SEQ ID NO: 1433 - DNA, 674 bp, Homo sapiens
  SIMILAR (248)..(511): 401254mologous to Mus musculus putative,accession number AK014802,Smith-Waterman Score=136.
  misc_feature (1)...(674): n = a,t,c or g
tgcctgcaccgccgcggacttaattgccgggacgactatttctgaagcgggcccgcatatggagaaccagcctgcgaggtggcgggccctgccgggcctcccacgccctcctgggctccccgcatccccctggctcctccttggcgtgctgctgctggccgggaccctgcgactgtcaggaggacagtcagtgacccacaccgggctgcccatcatggcctccctggccaacacagctatctccttcagctgcaggatcacctatccatacactccccaattcaaggttttcacagtcagctactttcatgaagatctccagggacagaggagccctaagaagccaacaaactgccaccctggactgggcacagagaaccagagccacaccctggactgccaggtcacccttgtgctgccgggagcatcggccactggcacctactactgctctgtccactggccacactccacggtgagaggcagcggcaccttcatcctggtcagagaagcggatgcggggtccagggaaggaccccaccaggaagtgcccagatccaagatctgccagcagccccaagcagcatccttcagaatctgtctacacagctctgcagcgccgcgagaccgaggtctatgcctgcatcgagaatgaggatggcncctcgcatgtn

SEQ ID NO: 1434 - DNA, 349 bp, Homo sapiens
cctcaggacagaagcgagagcccattgctcctgctcagctcaactcctccatctaaccagcaggctcccagagtccccggaagagcctgcgcagctgaagcagagtgcttctagatggagagtggtcactggggaaaaggacctggccatcaccttccaatacctgctgcctgtctccctgacccatgatctggcaagttaggcacagtcagacatggacagttgatccatgaggaaaagatgctctcccacctaaggccaggaatttgagagcaggactggctgagctcccagggcaaggggttcactaatgcttatcaataaagaatattgagcctggaaaaaaaaa

SEQ ID NO: 1435 - DNA, 609 bp, Homo sapiens
  SIMILAR (342)..(136): 981254mologous to Homo sapiens DNA polymerase delta smallest subunit p12,accession number AF179890,Smith-Waterman Score=386.
ctaacttgccagatcatgggtcagggagacaggcagcaggtattggaaggtgatggccaggtccttttccccagtgaccactctccatctagaagcactctgcttcagctgcgcaggctcttccggggactctgggagcctgcactggaagcgggggtctccggggtgggtcttcagcacctgccacacctctgggggaggctccaagcccatctgcttggcccgacaccagcgctgcagccgtgtgatcccggtgcagggcccgtactgccaggccaggtcaaactgcctcagcagctccagctccgcttcctcctcgtcgcggggctggggctcctccccctccagagatcccatccggttcttccttccagggatactgggagggtggggcacagactcctgggctgctgcctgctcagaggcctctgcctcctcctttccctgctctggggtctgggtgttctgcactggaagagggctaagccactggtacacgtgggcacaagggaggaagctgctcatgaggtttgtggggagagccaggtagagctgggaagcaccctccacaccttcttctctagtcacctcctctttcaccttggccat

SEQ ID NO: 1436 - DNA, 438 bp, Homo sapiens
  SIMILAR (295)..(107): 1001254mologous to Homo sapiens DNA polymerase delta smallest subunit p12,accession number AF179890,Smith-Waterman Score=339.
gggagacagttcctgagggtcagagtcacgcaagcgcttgggtgacttcagaaacgtgtgggtgactggctgggagaggcgcctccgtggggctgggtgggttctcaccggtgcagggcccgtactgccaggccaggtcaaactgcctcagcagctccagctccgcttcctcctcgtcgcggggctggggctcctcccctagctcgggtgccagctcccccttgctgtgcccagcgggcccctccctcctcttcacaaccgggtaggaatcagtgatgagccgcttccggcccatggcggccacccaggcaggcagagaagtaggcacctgcggggaagaggagagaccggccagtgggcgcgagaaagacagctgctgagagagacagacggggccaggccagcggcgggcagtcaagatgacccagacaatccgag

SEQ ID NO: 1437 - DNA, 1935 bp, Homo sapiens
  SIMILAR (643)..(500): 791254mologous to Homo sapiens DNA polymerase delta smallest subunit p12,accession number AF179890,Smith-Waterman Score=212.
tttttttttttttttttttggttttccaggctcaatattctttattgataacgcatatagtgaacccccttgcccttggggagctcagccagtcctgcttctcagattcctggccttagggtgggagagcatctttttcctcatggatcaactgtccatgtctgactgtgcctaacttgccagatcatgggtcagggagacaggcagcaggtattggaaggtgatggccaggtccttttccccagtgaccactctcacatttagaagcactctgcttaagctgcgcaggctctttccggggactctgggagcctgctggttagatggagtgagttgagcctctgacacctccagggttctgcctgcccaagggttccctcccgcaagccgggctgaagctgagcagggagcaatgggctctcgcttctgtcctgaggtttttggggtgggttaagcaagagagctaagggcaggaggtttttacgtggtgcctcatagggggttagagatgccagagactgcactggaagcgggggtctccggggtgggtcttcagcacctgccacacctctgggggaggctccaagcccatctgcttggcccgacacacagcgctgcagccgtgtgatcccggtgcagggccccgtactgccaggccaggtcaaactgcctcagcagctccagctccgcttcctcctcgtcgcggggctggggctcctcccctcagagacctagctcgggtgccagctcccccttgctgtgcccagcgggcccctccctcctcttcacaaccgggtaggaatcagtgatgagccgcttccggcccatggcggccacccaggcaggcagagaaggagagcaactgcggggaagaggagagaccggccagtgggcgcgagaaagacagctgctgagagagacagaacggggccaggtcagcggcgggcagacaagctaaagagtcgccgcagacaagcaggcccccagatggagaaccagcctgtgaggtggcgggccctgccgggcctcccacgccctcctgggctccccgcagccccctggctcctccttggcgtgctgctgctgcccgggaccctgcgactggcaggaggacagtcagtgacccacaccggcctgcccatcatggcctccctggccaacacagctatctccttcagctgcaggatcacctatccatacactccccaattcaaggttttcacagtcagctactttcatgaagatctccagggacagaggagccctaagaagccaacaaactgccaccctggactgggcacagagaaccagagccacaccctggactgccaggtcacccttgtgctgccgggagcatcggccactggcacctactactgctctgtccactggccacactccacggtgagaggcagcggcaccttcatcctggtcagagacgcagggtaccgagagcccccgcagagtccacagaagctcctgctctttggcttcaccggcctcctgagtgtcctgagtgtagtgggcacggccctgctgctctggaacaaggtgcaggaatggcttgatgcaggtcttgtaggcatttgccatgtttccctggagaggaagcggatgcggggtccagggaaggaccccaccaggaagtgcccagatccaagatctgccagcagccccaagcagcatccttcagaatctgtctacacagcattttctgaaacaattttcctggagatgtgggtgcatctccaggaagtggaagagcctcctggcacccagcacacagctctgcagcgccgcgagaccgaggtctatgcctgcatcgagaatgaggatggcagctcacccaccgccaagcagagccccctctcccaggagagaccgcatagattcgaagatgatggcgaacttaacctggtctatgaaaatctctag

SEQ ID NO: 1438 - DNA, 328 bp, Homo sapiens
  SIMILAR (168)..(314): 951254mologous to Homo sapiens arrestin,accession number Z11501,Smith-Waterman Score=252.
cccactgttcagcgacaacgggaaaaagcggggtctcgccctggatgggaaactcaagcacgaggacaccaacctggcttccagcaccatcgtgaaggagggtgccaacaaggaggtgctgggaatcctggtgtcctacagggtcaaggtgaagctggtggtgtctcgaggcggccgctccggagacagatgtccctgtggacaccaacctcattgaatttgataccaactatgccacagatgatgacattgtgtttgaggactttgcccggcttcggctgaaggggatgaaggatgacgactatgatgatcagtcgacgcggccgcg

SEQ ID NO: 1439 - DNA, 417 bp, Homo sapiens
  SIMILAR (187)..(417): 941254mologous to Homo sapiens beta-arrestin 2,accession number AF106941,Smith-Waterman Score=375.
tgagattcgagccttctgtgctaaatcactagaatagaaaagccacaaaaggaactctgtgcggctggtgatccgaaaggtgcagttcgccccggagaaacccggcccccagccttcagccgaaaccacacgccacttcctcatgtctgaccggtccctgcacctcgaggcttccctggacaaggagtgagacagtacgccgacatctgcctcttcagcaccgcccagtacaagtgtcctgtggctcaactcgaacaagatgaccaggtatctcccagctccacattctgtaaggtgtacaccataaccccactgctcagtgacaaccgggagaagcggggtctcgccctggatgggaaactcaagcacgaggacaccaacctggctttcagcaccattgggaaggaggggggccac

SEQ ID NO: 1440 - DNA, 752 bp, Homo sapiens
  SIMILAR (475)..(702): 751254mologous to Homo sapiens PRO2550,accession number AF130089,Smith-Waterman Score=288.
  misc_feature (1)...(752): n = a,t,c or g
atggctgaccaggttccaagccatgtgggatcctaaacaagaagactgtgtcatagttggcagcatggcccatccacgacgggtagaaatcttccatgagacaggaaagagggtgcattcgtttggtggagaataccttgtctctgtgtgttccatcaatgccatgcacccaactcggtatattttggctggaggtaattccagcgggaagatacatgtttttatgaatgaaaaaagctgctgagtttttggtttaggaacatcaatttgttcaaattgaccactgtctaaggagcctagtaatcggcgtgccttagtgtgtttatgtggtaatgtgttacatttagcaattataacaatgaattattaataagactataagaagagtgtacttttagtaagggagaagtcttggagggttgcttctgcaggacggggagggaatttgaggggaggctgagagtgccgtcaggactttttttttttttttttttgagatggagttttgctcttgttgcccaggctggagtgcaatagcgcgatcttggctcaccgcaacctccgcctcccaggttcaagcgattctcctgcctcanactcctaagtnnctgggattacaggcacctgccaccacgcctggctattttttttgtatttttagtananatngggtttcatcatgttggccangctggtctcgaacctcctgacctccaggtgatctgcccgccctcggcctccaaaaattgctg

SEQ ID NO: 1441 - DNA, 423 bp, Homo sapiens
  SIMILAR (27)..(218): 981254mologous to Homo sapiens A11.1,accession number D16841,Smith-Waterman Score=321.
ccgggtcgacccacgcgtccgcgaggatggccgtcatggcgccccgaaccctccttctgctactctcgggggccctggccctgacccagacctgggcgggctcccactccatgaggtatttctacacctccgggtcccggcccggccggggggagccccgcttcatcgccgtgggctacgtggacgacacgcagttcgtgcggttcgacagcgacgccgacgagccaaaggatggagccgcgggcgccgtggatagagcaggaggggccggagtattgggaccaggagacacggaatgtgaaggcccagtcacagactgaccgagtggacctggggaccctgcgcggctactacaaccagagcgaggacggttctcacaccatccaaataatgtatggctgcgacgtggggccggacgggcgc

SEQ ID NO: 1442 - DNA, 378 bp, Homo sapiens
  misc_feature (1)...(378): n = a,t,c or g
nnnnnnnnnnnnnnnnnnnnnnnnnnnnnnnnnnnnnnnnnnnnnnnnnnnnnnnnnnnnnnnnnnnnnnnnnnnnnnnnnnnnnnnnnnnnnnnnnnnnnnnnnnnnnnnnnnnnnnnnnnnnnnnnnnnnnnnnnnnnnnnnnnnnnnnnnnnnnnnnnnnnnnnnnnnnnnnnnnnnnnnnnnngggggggcccttttaaaagatcccttggggggcccaaatttaccggggggtggaaaggataaatttttttctttttggggggcgttttaaaaccctcctggggatttttgggaaggaaccttttttttgggggggggcattttgggcccannnnnnnnnnaaaatttaaagcttttggggaaaaataaaag

SEQ ID NO: 1443 - DNA, 457 bp, Homo sapiens
  SIMILAR (312)..(455): 971254mologous to Homo sapiens arrestin,accession number Z11501,Smith-Waterman Score=249.
cacgtcaccaacaactccaccaagaccgtcaagaagatcaaagtctctggtaggaggtggggtttggaagggggtcttcggggagggcgttactgcacaggtggctcctggtgtgatctcagcccaggccatttcccagtgcgggagacccaccagggctcaaagaatttaggttgttccagaatgatacggggagcctcggtgtttactgcttcagtggggagcatgggggggccacgccacggggtctggagttgtggtgtggtggtggcttgtgctccatccagagctgcctgaccccgtcccaccccacagtgagacagtacgccgacatctgcctcttcagcaccgcccagtacaagtgtcctgtggctcaactcgaacaagatgaccaggtatctcccagctccacattctgtaaggtgtacaccataaccccactgctcagtgacaacct

SEQ ID NO: 1444 - DNA, 447 bp, Homo sapiens
  SIMILAR (1)..(129): 901254mologous to Homo sapiens beta-arrestin 2,accession number AF106941,Smith-Waterman Score=203.
ccttcagccgaaaccacacgccacttcctcatgtctgaccggtccctgcacctcgaggcttccctggacaaggagctgtactaccatggggagcccctcaatgtaaatgtccacgccgcaggcctttccagaatcttccatgctccgtcacactgcagccaggcccagaggatacaggaaaggcctgcggcgtagactttgagattcgagccttctgtgctaaatcactagaagagaaaagccacaaaaggaactctgtgcggctggtgatccgaaaggtgcagttcgccccggagaaacccggcccccagccttcagccgaaaccacacgccacttcctcatgtctgaccggtccctgcacctcgaggcttccctggacaaggagctgtactaccatggggagcccctcaatgtaaatgtccacgtcaccaacaactccacgccga

SEQ ID NO: 1445 - DNA, 2094 bp, Homo sapiens
  SIMILAR (102)..(545): 591254mologous to Homo sapiens beta-arrestin 2,accession number AF106941,Smith-Waterman Score=387.
  misc_feature (1)...(2094): n = a,t,c or g
aatttccgggtcgacgatttcgtggaggagcagggatcttggcagcgggcgaggaggctgcgagcgagccgcgaaccgagcgggcggcgggcgcgcgcaccatgggggagaaacccgggaccagggtcttcaagaagtcgagccctaacatgcaagctcaccgtgtacttgggcaagcgggacttcgtagatcacctggacaaagtggacccatgtagatggcgtggtgcttgtggaccctgacataccatgaaggaccgcaaagtgtttgtgacccatcaccatgcgccttccgctattggccgtgaagacctggatgtgcatgggcttgtcattccgcaaagacctgttcatcgccacctaccagggccttccccccggtgcccaacccaccccggccccccacccgcctgcaggaccggctgctgaggaagctgggccagcatgcccaccccttcttcttcaccataccccagaatcttccatgctccgtcacactgcagccaggcccagaggatacaggaaaggcctgcggcgtagacttttgagattcgagccttctgtgctaaatcactagaggagaaaggccacaaagggacctctgtccggctggtgatccgaaaggtgcagttcgccccggagaaacccggcccccagccttcagccgaaaccacacgccacttcctcatgtctgaccggtccctgcacctcgaggcttccctgggacaaggagctgtactaccatggggagcccctcaatgtaaaatgttccacgttcaccaacaactccaccaaggaccgttcaaggaaggttcaaagtctcttgttgaggacagttacgccgacatctggcctctttcaggcaccgcccagtacaagtgtcctgtggctcaactcgaacaagatgaccaggtatctcccagctccacattctgtaaggtgtacaccataaccccactgctcagtgacaaccgggagaagcctttgtctcgccctgggatgggaaactcaagcacgaggacaccaacctggttttccagcaccatcgtgaaggagggtgccaacaaggaggtgctgggaatcctggtgtcctacagggtcaaggtgaagctggtggtgtctcgaggcggggatgtctctgtggagctgccttttgttcttatgcaccccaagccccacgaccacatctccctccccagaccccagttcagcggctccggagacagatgtccctgtggacaccaaccctcattgaaattgataccaactatgccacaagatgatgacattgtgtttgaggactttgcccggcttcggctgaaggggatgaaggatgacgactatgatgatcaactctgctaggaagcggggtgggaaagaagggaggggatggggttgggagaaggtgaggggcagggattaaagatccccaacttgtccaatgggggattgtccccagcccccttcttccctttccccctcacctggaagcttccttaaaccaaatccccttaaaaactctctccccccaatcccccccaaagatacacactggacccctctcttgctgaatgtgggcattaattttttgacttgcagctctgcttcttccagcccccgccgtgggtggcaagctgtgttcatacctaaattttctggaaggggagcagtgaaaagaggagttgacaggagggaaagggggggaacaaaactcctactcttcaacctccacaccaacacctcccattatcactctctctgcccccattccttcaagaggagaccctttggggacaaggccggtttctttgtttctgagcataaagaagaaaataaatctttttactaagcatgnnnnnnnnnnnnnnngggggggggggccctttaaaaaaaacccttggggggcccaaatttaacggggggtggaaaaataaattttttttctttttggggggggtttttaaaactggggccggggcgggtttttaaaaccccgggaagggaaaaacccccacctggggatttttggaaaaaaaccttttttttggggggggaaaatttgggcccacccccccccaaaaatttaaggcctta

SEQ ID NO: 1446 - DNA, 2157 bp, Homo sapiens
taattcagcatcttagttttaatgtaattataaaagtcaccaaaaattgacagaacactagaaaacaagtaattgctaaatcaaaatagaatatcgtatacttttaatctttcatttttttttctttcagtttttcagttgccttctttcctagatcacgtatttctatcgttgttccctttttaatgttccctgtgacccactggagccactagttaataaatccttaactccaaataggttaatatttaatttcagcaccccaagctcccaaatgcatcagctaaactgggttatagcatggagaatacctcagacgaccacagattttatttttgttaagattctatcaagactgaggcaaattataataaaagttctcatatcatagaaaacaaattacgtggaaaaggataaacatttatacagtactgaagcgttatcaacaatgagtagcagaaattctttttcactgaagtccaaaagccatcccagccctccagcagatttaaagattcttgctaaaggtcaattcaggatatagacctaatacaagaacaaggtatttactgtcaagatttgctatgaaagttccacgtaacttgtaacaactctgtccttggccaactatatatacaaggtgctgttacaatgaaatatattttaaggcacagtattccaaactgagtagaacattttgctcccagagtctgcacagattttggattatttataccagctaatagaattagtaccaattaacccgagttggaaatctgggtggtaacagacttcagagggctatccaaggtactcatgcctggtgcctatgaactacgaaagatcagaaagaatgggtcacaggaatcaaggttgagctggtaagaaaagggggaaaagactggacttcagtattgacagattagcccagaatgaagaggaacaaaaacatcctttactatggtacaaataagctttataacacaaataatcttctcaataattttataaacattctagtatcatctttagggttatctgaaagaagtttctatagatatattctctagtacttttctgtagaaattaaaaataaagatccataattggcctattatccctgtatttcatattatttcctaaaaatattccctagaaatatctgcaagaatagttattttaatcttttaagtagctgtgaaaacaaaccaaaaaattgtattggggggtctgaataaccactttatctcctatagaaaagaagataggtaagaagaggatgagtacttatagtaggtgccatgaattaatgtctaagggtgaagatgtgaaatttgctcactttttgaaaagcaggcatcaagttagataatgatcattgattttatttgtccattactatttcccacttgatcaaagcactgcctattaaaaaggataaatcagataatacctttactaccactaatgaatcaatagaaaaggctagggttttgcagtcagaatctactacactgctaatattgctattaataaggctaccattatattctaaccaactcaaagaaattgcaggataatcccagtataatgcctttaccttatatataaattgaatcaaggtccagagagttcaaataatttgtccaaaataatacaaatatattttccaagttttaacaaaaaacaaagttcgaggagctatatcatcaattatcagaatcagaattaaaaattaaatcactggcttcagttagtgcttttgctaccatgctcacgttgcttgatatctaatcaatgttacagactatttagttcaccttggccaacctctacatatttccagctgaagttgctttaagttgaaaaaacggtatacaatcacagaggagagatataaagaaacaagaatgctgctaccatcctattagggttcactcctctaaaagtagagcaaagggatatcagaacatacacaagaagggctggagttttgtttccccaaataagttaagcgtaagcttcaagaaagtttttgatcttcatgtttttgtagcaaacagttaagaacatctctgtataaatatgcctgagattgtcatcaaatagctttataaacatgtctttctagcttattcacttaactacccaaccatc

SEQ ID NO: 1447 - DNA, 2009 bp, Homo sapiens
  SIMILAR (269)..(1072): 371254mologous to synthetic construct vascular anticoagulating protein,accession number A01769,Smith-Waterman Score=239.
agcagctgccggatccttcagcgtctgcatctcggcggggccccgcgtacccgtcgcccggctctccgccgctctcccggggcttcggggcacttgggtcccacagtcgggtcctgcttcaccttcccctgacctgagtagtcgccatggcacaggttctcagaggcactgtgactgacttccctggatttgatgagcgggctgatgcagaaactcttcggaaggctatgaaaggcttgggcacagatgaggagagcatccgtgacgtctgttgacatcccgaagtaatgctcaagcgccaggaaatctcgtgcagcgttttaagactctgtttggcagggatcttcgtggatgaccgtgaaatcagaactaacttggaaaatttgaaaaatttaattgtggctcttgatgaaaccctctcgggttttatgaatgcttattgaactgaaacattgccttgaaagggagctggaacaaatgaaaaagtacttgacagaaattattgcttcaaggacaccttgaagaactgaggagccatcaaacaagtttatgaagaagaatatggctcaagccttggaagattgacgttggttgggggacccttcagggtactacccagccggatgttggttggttcctccttcaggctaacagagaccctgatgctgggaattgatgaagctccaagttgaacaagatgctcaggctttatttcacggctggagaactttaaatgggggacagatgaagaaaagtttatcaccatctttggaacaccgaagttggtcctcattttgaggaaaggtgtttgacaagtacatgactatatccaggatttccaaattgagggaaaccattgaccgcgaggacttctggccaatttaggagccaactactccttggctgttgtggaattctatttcgaaggtatacctcgcctaccctgcaggagacctttatttatgctatgaaggaagctgggacagatgatcataccctcatcagagtcatggtttccaggagtgagattgatctggtttacatcccaggaagggagtttaagaaagaatttttgccaccctcccccttattccatgattaaggggagatacatctgggggactattaagaaagctcttctgctggctctgtggagaagatgactaacgtttccgggggaagagaccccctgctgtgtgccctgcaccaccccccactgccttcccttcagcacctttagctggcatttgtatgcccaggggcttaacacattgcccttattccatactggccatgctccatgaccaaccacatacaccgtcatagaagaaaaatagtgggtgcttctttctggatctctagtggagatctcttttgactgctgtagtacctaaagtgtacttaatgttacgtaagtttaatgcctggccatttttccatttatatatatatttttaagaggctagagtgcttttagccttttttaaaaaaactcccatttatattacatttgtaacccatgatactttaatcagaaggcttagccttgaaattgtgaactcttgggaaatgttattagtgaagttcggcaactaaacttaaacctgtaaaaattatgatgattgtattcaaaagattaatgaaaaataaacgatttctgtccccctgaattatgtgtacatgtgtgtttagatttattattaaatttatttaacaatgttctctctttttaagctaataattgacagtggtgttagttgagaactgaatttacagttggtcttttgggcagtaagaaatgcaaaccatagactgaatttccttcatagtacatgatttttcctaaatataggaaagatcgaaggggtctctggtttatttgcaccatgtttatttaggcatctattaaagcaatgcttgtggtgctacttgcttagtagaaaagctaattataaaacttaatgcaaaaattcagagtactacctttctctttcctctttcctattgag

SEQ ID NO: 1448 - DNA, 501 bp, Homo sapiens
  SIMILAR (193)..(294): 791254mologous to Homo sapiens PRO1546,accession number AF116638,Smith-Waterman Score=156.
atgaggaaaagccagtgcaaaaaggctgaaaattccaaaaaccagaaagcctcttctcctccaaaggatcacaactcctcaccagcaagggaacaaaactggacggagaatgagtttgacgaattgacagaagtaggcttcagaagggacatggatgaagctagaaaccatcattctcagcaaactaacacaggaacagaaaaccaaacaccacatgttctcattcataagtgggagttgaacaatgagaacacatggacacaggaagtggaacatcacacaccaaggcctgtcaggagtgcagtattctcagtgttaagtaagcagagttggagagtatcagaaacaggattctcagcagaaatgtggttgaatggactcccagccctcttggcatcgtacctcatcatccatgcctaccttccttttccaggaaagcccatgtattttagcaaacggacttctgacacaaaggccattatctctacggctttagattaa

SEQ ID NO: 1449 - DNA, 394 bp, Homo sapiens
  SIMILAR (2)..(394): 911254mologous to Homo sapiens U2 small nuclear ribonucleoprotein B'',accession number M15841,Smith-Waterman Score= 622.
  misc_feature (1)...(394): n = a,t,c or g
tataatatcaaaaatgcgtggaacttttgctnnnnnnnnnnnnnnnnnnnnnnnnnnnnnnnncaaaactgtggaacagactgcaacaaccacaaacaaaaagcctggccagggaactccaaattcagctaatacccaaggaaattcaacaccaaatcctcaggtccctgattaccctccaaactatattttattccttaataacttaccagaagagactaatgagatgatgttatccatgctgtttaatcagttccctggcttcaaggaagtacgtctggtaccagggaggcatgacattgcttttgttgaatttgaaaatgatgggcaggctggagctgccagggatgctttacagggatttaagatcacaccgtcccatgctatgaagatt

SEQ ID NO: 1450 - DNA, 540 bp, Homo sapiens
  SIMILAR (232)..(387): 821254mologous to Mus musculus putative,accession number AK012916,Smith-Waterman Score=223.
atgccagttaataaacataaaaggcatgatactattgcggaatcacttataactcctaatgtaacaacagattcagtgaaggactgtatcaaggagttggggaacaggttattcttatggactcaaggctgttcaagtcacgtggcgactgtggccccgcccacagctcccagaggcctgcgcgtgcggtctgcagttcggccgcttcctcttggcgggtgggctgcagctatggagggcgagcctccacctgtggaggagcggcggcggctgcaggaggagctgaacgagttcgtggagagcggctgccggacgttggaggaggtgaccgcgtccctgggctgggacctagatagtctggatcccggggaagaggaggcggcggagttgcaccagattcggtgtcaggagagctgggagtttgccagttcgcctttctgtgccttaaaattggacacttctgactgggacagcaccaattctaggattattaaaggttgtcaccaagaggtggtaactggcaactcctgtggacattag

SEQ ID NO: 1451 - DNA, 355 bp, Homo sapiens
  SIMILAR (47)..(148): 791254mologous to Homo sapiens PRO1546,accession number AF116638,Smith-Waterman Score=156.
ggacatggatgaagctagaaaccatcattctcagcaaactaacacaggaacagaaaaccaaacaccacatgttctcattcataagtgggagttgaacaatgagaacacatggacacaggaagtggaacatcacacaccaaggcctgtcaggagtgcagtattctcagtgttaagtaagcagagttggagagtatcagaaacaggattctcagcagaaatgtggttgaatggactcccagccctcttggcatcgtacctcatcatccatgcctaccttccttttccaggaaagcccatgtattttagcaaacggacttctgacacaaaggccattatctctacggctttagattaa

SEQ ID NO: 1452 - DNA, 580 bp, Homo sapiens
  SIMILAR (1)..(201): 1001254mologous to Homo sapiens U2 small nuclear ribonucleoprotein B'',accession number M15841,Smith-Waterman Score= 342.
ctgggctcatccacaaatgccttgagacagctacaaggatttccattttatggtaaaccaatgcgaatacagtatgcaaaaacagattcggatataatatcaaaaatgcgtggaacttttgctgacaaagaaaagaaaaaagaaaagaaaaaagccaaaactgtggaacagactgcaacaaccacaaacaaaaagcctggcttcaaggaagtacgtctggtaccagggaggcatgacattgcttttgttgaatttgaaaatgatgggcaggctggagctgccagggatgctttacagggatttaagatcacaccgtcccatgctatgaagatcacctatgccaagaaataacatttgggatagtcgtctttaaaagacttggtgttatttacagtgtttgttttgataacatttggctgggtcattttaatagttagagatgaggaggagtaaaagtgaaatttttgtgaaggacttaaattatccagtgtttctttagccttggtgaactatgaaatacgaaggccttaattttgtacaataaacttttatttgtattctgtgtaaaaaaaaaaaaaaa

SEQ ID NO: 1453 - DNA, 328 bp, Homo sapiens
  SIMILAR (50)..(172): 731254mologous to Homo sapiens PRO1546,accession number AF116638,Smith-Waterman Score=154.
agatgtcagaaaagagtcagaaagcccaggtgatagaataagtgccaagaacatatacaccatggaatactgtgcagccataaaaaggaatgagttcatgtcctttgcagggacatggatgaagctggaaaccatcattctcagcaaactaacacagcaacagaaaaccaaacaccgcatgttctcactcataagtgggagttgaacaatgagaacacatggacacagattggtaaaacttcagcggttggatgacaccctcttttggtgatgccgtgggggaacgcaacatgattcaaccccaatggaagagaagttgccattaacc

SEQ ID NO: 1454 - DNA, 1527 bp, Homo sapiens
  SIMILAR (1527)..(376): 981254mologous to Homo sapiens monoamine oxidase B,accession number M69177,Smith-Waterman Score=2050.
ttaagccctgcatgcattaggtatttgtcctaatgctctccgtcctcttgccccctcaggccctggtgtgtgatgttcctctccctgtgtccatgtgttctcattgttcaactcccacttatgagtgagaacatgcagtgtttggttttctgttcctgcgttagtttgctgagaatgatgggagaagaaggggctttcaaaagctgttttgacaaccttctccccacccccacacatgaatccatggtaaaaatttccagttaggtaaagacagaagacagtattgggataatgtaagcgtcgtttggcatcaggtgggtgcttttgagcactcagcagatcacatccttcacggatcggcattgagggaaatgagggttctgcacagcagtccctcacagactctggttctgactgccagatttcatcctctggaatcttccccatggcatgcaggatctctcgggctgctctctccccggcctctacagccccctccatgtagccgctccagtgtgtggcagtctcggtgcctgcaaagtaaatcctgtccactggctggcgtagaacccttccatattgagtcaggatcccaggggggaaataagttgtgtagcagcccccagagtactgctcctcacaccagttcttttcttcataatgcactggctccagagcttctagggaacccagaaccttggcatagagttcacaaagtttcttcaacctttcctctttggtaagacgtgccagttttctggctttgtgggccaggataaatcccattatggcagcatagttgccttcaggtttggtatcatccaacgtgtaggcaactggagcttcttctccatcaataatcatggttccacagtaatcctttttcctccagaaaggctctttataataaactatacacttgatgactgaacccaaaggcacacgagtgatcatctggtttctcatcattggcagagggggattgaagtgaatcttcatgcccagagtaggaggaatagcactaatcacatatttagcctcatacatctcatggtttagggtctccacaaggacattttctcttgtctggtcaatgtagatcacaggcctctccagcttcactcggtctccaaggaggtccattatccgctcactcacttgaccagatccgcccacaaatttcctctcctgtcctccatttgttgtcgagatgattcttgttgtgcctccacactgcttcacataccacaggaaccagagagcagagacctcatgggtctctgcagtgacacacaggttcacaaagagagtggcaagctgctttgcagattcagtccagcagagcttgtccagtagctccttcattgtcatgttgtcccactcttctgcaaggggagccttccatggggcatcactcggaatctctcgccccatgtcatccattgtcctccaaaagttgttatgatctaagtaggtaattggattccatacaggtgggaatggccccctgaaggggtatgatttgcc

SEQ ID NO: 1455 - DNA, 975 bp, Homo sapiens
  SIMILAR (572)..(733): 811254mologous to Homo sapiens PRO1546,accession number AF116638,Smith-Waterman Score=248.
atgggcaaaaagaaacagctccagtctgcagctcctatggtgcctggaaccccagcgacagaaccgttcactcccatgaaaagggggatgaagccagggagccaagtggtcttgctcagtgggtcccactcccatggagctcagcaagctaagaaccactggcttaaattctcactgccagcacagcagtctgaagttgacgtgggacgaaccagcttggaggcgggaggggcacccaccgttactgaagctttagtaggcggttttcccctgacagtgctaaggaggctgggaggggttgacagacacctcatacaggagagctccagctggaatcaggccagtgctccagaggaaggagcagacagtaatctttgctgttttgcagcctctgctggtgatacccagatgaacggcatctggagtggacctccagcaaactgcagcagacctgcagaagagaggcctgttagaagaaaaactaaaaagcagaatgcaacaacatcaaaatcaacaaaagggacccccacacagaaaccccattcaaatgtcatcagattcaaagatgaaagggacatggatgaagctggaaaccatcattctcagcaaactaacacaggaacagaaaaccaaaccaccacatgttctcactcatacgtgggagttgaacaatgagaacacatggacacagggaggggaacatcacacaccagggcctgtcagggggtggggagctaaaggagggatagcagtaggaggcatacctaatgcagatgacgggttgatgggtgcagaacagcttagccacacagcagtgctccatggcggctgccgtcaaaaatttaaacacggcttggaattttttgaggatgttattcataaaggcccagttaatcaaactcagacctcttttcagaatttcactgtacaagccaaacttattgccaataaaaggaaggtgccagaccaaaaaag

SEQ ID NO: 1456 - DNA, 2248 bp, Homo sapiens
  SIMILAR (716)..(1390): 401254mologous to Homo sapiens U2 small nuclear ribonucleoprotein B'',accession number M15841,Smith-Waterman Score= 310.
ttatttcttggcataggtgatcttcatagcatgggacggtgtgatcttaaatccctgtaaagcatccctggcagctccagcctgcccatcattttcaaattcaacaaaagcaatgtcatgcctccctggtaccagacgtacttccttgaagccagggaactgattaaacagcatggataacatcatctcattagtctcttctggtaagttattaaggaataaaatatagtttggagggtaatcagggaccccccaccccccgataggccgtagtgtgtgatgttcctctccctgtgtccatgtgttctcattgttcaactcccacttatgagtgagaacatgtggtgtttggttttccgtttctgtgttagtttgctgagaatgatggcttccagcttcatccatgtccgcgcagagagattgccagccctggctgccagagacccggaagcatcgatcggctctgtgctcggcttctagacttgtcggcgctcgattgaggagcgtggctacgttgcttccggtgcctggctccgtttcctgcttttggttcttacagtagtcggcgtaggccttaggtgggttcgtgcgccttctacctcgctgtttcggttttcctggctcctcggccctttctccacctgttgcagctgggagcggacgaaagcgcgaagctgggattttttacggtctcctgaagaaatttaacacaaacatggatatcagaccaaatcatacaattcatcatcaacaatatgaatgacaaaattaaaaaggaagaattgaagagatccctatatgccctgttttctcagtttgggtcatgtggtggacattgtggctttaaagaccatgaagatgagggggcaggcctttgtcatatttaaggaactggggctcatccacaaatgccttgagacagctacaaggatttccattttatgggtaaaccaatgcggaatacagtatggcaaaaacaggttcggatataatattcaaaaatgcgtgggaacttttgctgacaaagaaaagaaaaaagaaaagaaaaaagcccgaactggtggaccagactgcaacaaccacaaacaaaaagccttggccagggaactccaaattcagctattcccccagggaaattccaccacccaaatccctcagggtccctgattacccctccaaactaaatttttattcccttaataaacttacccagagagagactaatgagatgatgttatcccatgctgtttaaatcagttccacatggccttcaagcgaagtaccgtctgggtacccagggaggcatgacaattgctttttgttgaatttgaaaatggatggccaggctggagctgcccagggatgctttacagggattttaagatcaccaccgtccccatgcctatgaaggatcaacctatgcccaagaaaataacattttgggatagtcggcctttaaaagacttgggtgttatttacagtgtttgtttttgataacatttgggctggggtcattttaatagttagagatgagggagggagttaaaagtgaaattttttgtgaagagacttaaaattatccaagtgtttctttagccttggtggaactatgaaaatacgaagccccttaattttggtacaaataaacttttatttgtattctgtgtatataatgctttcttgattgacccatcgccctatcatcaaatgacttctagtctagaacacacttaaggtttataaacttgtgtaataggatgcttttctagtgttactttggaggagctaattatacaacatcattgaaccattcaataaaagttaagtaaaattagatcacagaagcctagtagatgactgttgtaattaagggtaacaatgattgttcctgggtattagaagaaaatgagacccccaggcaggatcctaaatttggatcctttgtatccttttaagaaatgaatatattattttgcctgcctagtagggattcccacaagttttccttcattccagtattaaataaaggctgttcttactgtttactgagaaaacagaaagggaatgctatcttcacactttgcatttaatgctgtttccttcatgaggcaggactgttctaaggttaatatgcaatctctttattgaaagacctccagggtaaaaattttttgatctatagtctcttttcccccttaagacaaatagactgattaataaagagttgccagtgctaaaaaaaaaaaaa

SEQ ID NO: 1457 - DNA, 1506 bp, Homo sapiens
  SIMILAR (1459)..(1253): 551254mologous to Homo sapiens Human secreted protein, SEQ ID NO: 7871,accession number AAG03790,Smith-Waterman Score=178.
ttttttttttttttttatttttgttttgaggttataaacattaacttgatttaatcattttacaacataaacatatatcaaaatattacactgtagacagatatatacaactattatttttcaatttaaaaatcaattttttttaaaatttaatctttcttttttcaatgaatcttggatttcttcactttaaactcttaaggtattaggcatacaaatgttttaatgggcttagaattagttaccctaacacaattatatgagcccaaatactaactactccctccaaactatctatttttcatagcattcttcaaaatacaagattattcctgtatatcttattaaaatttattatgtctgccttatctaaatattgataaaaatagaaggtaggggcatttgcctggcttcatacattccaaaatcaaagggcagttttactaattatttttacattcagtaactcatttggtctcacacagtaaacacaaatattacgtaacagaactatattcatattcttcatcctaaaaatggaaaaaattttgagttatttattgattgtagtacgggactcattctctatttttttcaaattattccatgtcaagtgcctagaataattgttcatgacatactatgaaataaaaaataccgatagagatggattacaaaagtaaactgaaaaaacatcctatgaattgtttcattatatatataatagaatatacttatatccatagaacaaaaaaattatatctttttagatagaatagctgttataaactgcttaagttgtacatttcatcaacacttaatgaaaaacatcaatttctcacaaaaacttcaagcagtagaagaggtaacatttcttaattcatctattagccaataatacccaaaggagacaaaagaatcacaagatgattacgaaacaacatcctatttaaatttagacacagaaattctcagaaatatttaaayaaagaatacayaaaggtataaggatgattacataccatgactaagcagggtattttcacaatgccaatgttccatttaatatgatacaatattacttgaacaaagtaaaaatgtaatacttgaaatagaaaaagtttggtaaattcaacacctatgaatgatagaacaccaagaaaactattagaagaaaacttttgagacctgctaaaagtcctccatgaaaaaccaaaattggcccggcgcagtggctcacacctgtaacccagaactttgggaggctgaggtggaaagactgcataaagccaggagttcaagaccattctggacaatatagggaatccccatctttacaaaatattaaaaaaaaaattatctgggcatggtggtgcatgcctattgtcccaactactcaggcagttaaggtgggaggctcacttgagcttaagaggttgaggctgcagtgagccaagatgaaaaactccacaccaaaagctaatatacttaatggtgaatgactag

SEQ ID NO: 1458 - DNA, 475 bp, Homo sapiens
  SIMILAR (1)..(288): 421254mologous to Caenorhabditis elegans putative,accession number L23646,Smith-Waterman Score=216.
gtcttgaaattgcaaaaggtctactatgcacagtcccagcaaaaggtatttgatgtacgattgaatggccacgtcgtggtgaaggacttggatatctttgatcgtgttgggcatagcacagctcgcgatgaaattatacctatgagcatcagaaaggggaagctgagtgtccagggggaggtgtccaccttcacagggaaactttacattgagtttgtcaaggggtactatgacaatcccaaggtctgtgcactatacatcatggctgggacagtggatgatgtaccaaagcttcattccaaccctcttctgcctctgccggttgtgagaacaaatgactatcctgaacagggtggaggggtgtgggaaagaaaccagccatattggttttggtttctgtatttttcacaatgattaatgaacaaaaacaaagagaaaaaaacacacatcaattaaaggagacaaaaagaggcaa

SEQ ID NO: 1459 - DNA, 534 bp, Homo sapiens
  misc_feature (1)...(534): n = a,t,c or g
ttttgtcactgcaaattgtttattaaaacacaaagcaatggacagtgaaaaacatcctgattttgtactttttggtgggagtggggtgggacatggaaggggtagggtcagatggagacagcccagaaggaaagccagctctatccacccctacagcttccccggccaaccaggttcaaagcccatcagttatatctcactgtgccgctgtcaatgcatgttgtggaagggtgggcttggtttcctgacaagccaggttagaccaataatggttgaagaggctgccctgggctcanaatgggcagctggtccttgcctgggagaactttgtggaaggaaaaggtaagattccttaagtccaaggagagaaccaatccagggtcaaatttcttttcattccctggatcacaacacaccagggaagagaggagtcaagaatgtctctccctgccagtgctcccctcctacctcgcaactcggctctcccttcccgacagttgtcctttgaaaggacggaaagcgcacttcagtttg

SEQ ID NO: 1460 - DNA, 6427 bp, Homo sapiens
  SIMILAR (585)..(728): 321254mologous to Caenorhabditis elegans putative,accession number L23646,Smith-Waterman Score=46.
  misc_feature (1)...(6427): n = a,t,c or g
ctgagtccggggtggcctggcagccggccgaggacgagggtcggcgggggctgcccccgtggtggtggccgccatgctgggagcctgggcggttgagggaaccgctgtggcgctcctgcgactgctgctgctgctgctgccgccggcgatccggggacccgggctcggcgtggccggcgtggccggcgcggcgggggccgggctgcccgagagcgtcatttgggcggtcaacgcgggtggagaggcgcatgtggacgtgcacgggatccacttccgcaagtgtatccctttgtaaggccgggtgggccgagcctcagactatggcatgaaactgccaatcctgcgttccaaccctgaggaccaatcctgttatcaaactgagccgttccaatggaggagacctttggctacgaaagtcccattcaaagagaagggggacttacgtgctggtctttgaaatttgcagagggtctactttgcacagtcccagcaaaaggtatttgatgtacgattgaatggccacgtcgtggtgaaggacttggatatctttgatcgtgttgggcatagcacagctcacgatgaaattatacctatgagcatcagaaaggggaagctgagtgtccagggggaagttgtccaccctttacacagggaactctaacatggagttgtcaaggggtacctatgaccaattcccaaggtctgtgcactcttacatcatggctggggacagtggatgatgtaccaaagcttcagcctcacccgggatggagaaagaaaaaagggggaagaagaagaagaagaattatgatgaagggtctattcccaaaaaaaacaggcccattaagaacggggggcagtcaggccccccggcacaaccccacaccctaagcctcggacaacagcagcctcatgtttcccatcctggtgggccttcggagtcttcattccaaccctcttctgcctctgccggttgtgagaacaaatgactattcttgaacagggtggaggggtgtgggaaagaaaccagccatattggttttggtttctagaattttccacaatgattaatgaacaaaaacaaagagaaaaaaaacacacatcaattaaaggagacaaaaagaggcagagcgagtagagagcagccctcattcaccacctggtcccagacgtgcttcagtcctcgtcctctctttgtggctggctcccagccttctctttcctcttgaggatacttagggtaaactggatccttcctgctcaaggatcctcatttgtatacctagtggaaaggactctgaactcagaggagtcactgtttcttttttttaggttagaaattaacagcagggaaatgccatcttattacctgagacgaccagcactgggagttaggtacggtctgaagttatgtctagataagacttcagacgtcctgggattgaaagaatgtgtgtgaaggggtagaatttgtgcggtaaagacttaaaaaaaaaagtagggagattaaaaaaaaagaaagaaaatgcttccttatctggaagcctttctggattaatccagtgatggtcccacctttagtgtttcgagctttgtcattgcttgtctccctggcatgtgccagtttatagactgtccagcatccaagacgtttcggttatgtcgggtcctcagatcgcctctgacttgttaccacaacaaatcattttgatttcagtgcctgttggggacttgatttcttctcaggttttgtttgtttgtttgtttccttaatctggctcatttgaaatttcttctccctctcaaccatcccactaagttatagccaagaagggaaggagacacggggatttggggttctctgcttgaatgtcttctcctttaccacctcaccttgttggtacctccctccctggatctctgagccagcagccaggaggacctgacccagcagttctttactggcccctttgtagggccttgctgccagggggcagggatgctttccagcctgcagcaacagaacacttgaccttaaaagtctcttctggtctttggattagaaaaggcttatgttagcatagcttaagagcaacctcagagacttgagccctactaagtgactgaccactgtttagagtgtctggtatctgatgttcatttattcccatgttcttgtgtgtcacagttcagccagttttggtttatgcctagagctacttcaaggaactagactaattagctatataggcccagcgatgcttcttattgatcttaatagtatgcccttccttcccctgtcctttcatttctctatccaagtagcagtcaggttcttggtgtgatgggactgaaagaattccagtcagccagagccttggcagctctgaagctaaccttagcatctaagtgtcgatcttgaattccctgaaaaaatttctataggaaatgaagcttccctggtcccctcctttctggccattgtcatccatttcccagttagggcaacaatgaaggaggacccagccaagctagaaggaattttgtggatgggagacagcaggattagcttcagcttgggctggagcagtcaatataggatctcaggccaggcccgcttttctagaatgtgtttaattttgagtttgctttattagatatgttttttaagagctctgtatatttgaactgctccttatgtgacaaaataggtagctcttgggctcatgtcctgggttttggctctttaatgattactccaggccagcatttagtcgtttgagaattgtagcctgttgttttcgctgtgacttgggtctcagtgctagggtattgagtcaggcagctggagggttgtggcccgaggctgcagtcagaggtatacttcccatagtgcttcacacagctcccctgcttctaaaggataaggtactgtagccttggtcctggggaccacctgcctggggcagtggacatcctaactaaacaggcttctggcagtagctttggttcctatcccatcgaaattccccaaagccctgggccactgccattgggttagtcaagatgaaggaggaggactggctgcctccattttgccttgtttgttagtttgcctgggtctgtctgaggaaggagggggtcccgccttccacctcaacacatcccttcagtgactcagagtctcagaaggaaaccctgactcctggggccatttcctaatggtactgtaagccaagcagctttgcttctgcctctgtttccaagcccacccttttcccctgagctcagggttagggatgggcgcttttcctctctggttgtgaacgaaaagaaggaacatctttctatggctaacaaaaacttaagggggaagtgaggaaacaggaagaagtatggtgggggctggggtagactcccctggagccaagcctatccagctaacaagagctccctggggctggtcacagctggctcatgatgctgaacttgaaagtttttttgtttttgtttttgttttgtggctcctccaagatataggtacatgaagtttaggttaaaggggtgggattctttatttttatttttgtattgtatgtgtcaagaattactctgttgttcaccttttgctttttgcactgtttgttctcttatctgtattttgagcttagtgctaggactgagaggctgcaccatagggaatgtatgggagatggtgaggggtgccagtgaggggtgcgtggaggagaggcctgggctcctctactggatctacactctgtcccaggtttttagatcccactgagcccagctgactgaaaacaaggacagtcagggtgaaacttcttttgccagaagtgtggcctgagttgaatttctgggaggatgacgcagatgtctgctgcagagctgggctgagagttctgcagtctagctctgacttaggtcaggggcctgttggtctctcattggacgtttttgggtctcactcatgcttactgaaacattgtgccaagaaactcctgtgggatttgtgtcccttaaaccagactcacttttctgaaaaatcctccattgtttgaggagaggctgctcaatcgacaccccgagttctcatgactggggaagaaaagttttcttcaggtgtcaatggcgttagactcccaggaagactagccctgcccacagggccacctgttggtttgagagcgtgttcgtgttctctttgccctccctgcctaagagctactgggatcacgttagcgggcatttaggctttgattgagagggcacagtttgagttaggtttacctccccctttctgtgcctgggaactgtttggtccagctttagaactgtggttttgacttccttatctcttgggagaagcttctgttttaaggaatttctcttccttcttctcctgcctctagcctttcctggaaaggcccggatatggtttctaaaatctcagctgagaactttagaaaacagcagcagtatttttccttttcctagtgctaaaatccctttccctagaaattggctcaccttgggaaacccagggaaagaatcagcaggttctctgccctccctaggggttggggaaggacccaccccggtcagcacagtgccttttcctctcctgctctgagccagggtggggcattccctctagattcaggtttgggcaggggtcctatagtccctgccatggggctgcttccctgtcccttccctcccctttgctggcctactctggcataattcaagtgtcttcttggccttggggaatccttagtggcatcaaatggcaacatggaatattgtcctccatgcccctccagaaggacctaggaagagtaggtgaagctttccaaaagtgaagaagacgaatctttctttctttttttttttaaaggggcaggatggggtatgctttgggctttctccttctgtgggccccggaggaagggagagattgagggcaagggcaaagttgatagttacattgaaagcagaaccggaaacacccaggaactgttcagaaatctcagaagaaatctgcttctcttccgatggaaacgatataattaacgatcaaagaagctctaagaaaattgcaaaagaagccttaatgttcaagctttagaaacgatcagagcaatttttctctttcaagtccaaactaagactctctggtatttaaatctctctggggcaagagggctagatttcctcattttgttatggangactagatttggtaccagtagatcagctgcctagcgaggggcagggtttccttccttgcatctgtgtggcttgcttccagtctggcctggtcctttccagctggccttttggtctagcctgctatggggggccagattatcttgataagagcaggtgatttgggggactagctggggttgggcaggaaaagagcagggatgggatctcttggggacaggttcccccagggagtattaaacacaagggagccagggatttgttgntgggcagcccaagggaaacagttagttgcctgttttggagtttggcagagagggccttggcacctcttgcatccaggcagtcttgtggagatggggggcacatagcactggggaaagcagaactccattctcacctctattttgagcttcagtgctttattttcagtatggaggaaaaacagcaaccaaactgaagttgcgcttttccgtccctttcaaaggacaactgtccgggaacgggagacgccgacgttgcgacggtacggaggggaagcacctggcacgggagacgacacttccttgactcctcctccttccctggtgtggctgggaatccagggaatgaaaaagaaatttgaccctggattggttctctccttggacttaagggaatcttaccttttcccttccacaaagttctcccagggcaaaggaccagctgcccatttctgagcccaggggcagccttcttcaaaccattattgggtctaaccctggcttgtcaagggaaacccaagcccacccttcccaaattgggccctggcttgcttctattcgtgtaccgaagtacttggagaaaaagcatcaagttcttagcccgttgtagcttctacccgtagtttcccatccgtctctcgtgtggaggccaaaccaacttcttttgccagcaggccccaacatgcattgacagcggcacagtgagatataactgatgggctttgaacctggttggccaggggaagctgtaggggtggatagagctggctttccttctgggctgtctccatctgaccctaccccttccatgtcccaccccactcccaccaaaaagtacaaaatcgaggatgtttttcactgtccattgctttgtgttttaataaacaatttgcagtgacaaaaaaaaaaaa

SEQ ID NO: 1461 - DNA, 574 bp, Homo sapiens
  SIMILAR (232)..(387): 821254mologous to Mus musculus putative,accession number AK012916,Smith-Waterman Score=223.
atgccagttaataaacataaaaggcatgatactattgcggaatcacttataactcctaatgtaacaacagattcagtgaaggactgtatcaaggagttggggaacaggttattcttatggactcaaggctgttcaagtcacgtggcgactgtggccccgcccacagctcccagaggcctgcgcgtgcggtctgcagttcggccgcttcctcttggcgggtgggctgcagctatggagggcgagcctccacctgtggaggagcggcggcggctgcaggaggagctgaacgagttcgtggagagcggctgccggacgttggaggaggtgaccgcgtccctgggctgggacctagatagtctggatcccggggaagaggaggcggcggaggtgaggagcgcggccgcggggccctttcggggactatcggcccggggtcttctctggaagaagggagatccgcactggcagccgcggagggaagggcgaggagtcctcgtccataaggactcacaattccagataattaaacaagctagaactgcagttgggaaagacagtgattgttataatcaaa

SEQ ID NO: 1462 - DNA, 453 bp, Homo sapiens
  SIMILAR (158)..(451): 761254mologous to Homo sapiens Membrane-bound protein PRO1073,accession number AAY66687,Smith-Waterman Score=366.
  misc_feature (1)...(453): n = a,t,c or g
cggaactcggaaaaagaagtagaaaaaagaaaagtagccttacaagaagccaaattaaaagcaaagggattgaatccggatggaactccagccctttcaaccctgggtggattttctccagcctccaagccatcatcaccaagagaagtaaaagctgaagagaaatcaccaatctccattaatgcgaagacagtcaaaaaagaacctgaggatagacaacaggcttcccaaaagcccttacaatggctataataataggcggagtcgatctggaacatacagctcgagatcaagaagcaggtcccgcagtcacagtgaaagccctcgaagacatcataatcatggntctcctcaccttaaggccaagcataccagagatgatttacaaagttcaaacagacatggtcataaaaggaaaaaatctcgttctcgatctcagagcaagtctcggga

SEQ ID NO: 1463 - DNA, 442 bp, Homo sapiens
  SIMILAR (31)..(150): 951254mologous to Mus musculus putative,accession number AK011629,Smith-Waterman Score=191.
  misc_feature (1)...(442): n = a,t,c or g
nttttgagaccactagancagcgggggaattacagtttcgagattgttgctatggcttgtattaatcttgcatcaaaaatcgaagaagcacctagaagaataagagatgtgattaatgtattccaccacctccgccagttaagaggaaaaagcgaccagctacatttaccaaagcctgggtgatgtggagtggtacatagagatgaagctgtcgtcatggcaacagactccaagccccctgatccttgatcagaactacattaacaccaaaaatcaagttatcaaagcagagaggagggtgctaaaggagttgggattttgtgttcatgtcaagcatcctcataagatcattgttatgtatttacaagtcttagaatgtgaacgtaatcaaaccctggttcaaactgcctgggtagtccatgatggaattacatgaatgacn

SEQ ID NO: 1464 - DNA, 437 bp, Homo sapiens
  SIMILAR (195)..(374): 981254mologous to Homo sapiens BM-001,accession number AF208843,Smith-Waterman Score=316.
aacatttgcttaagatttaatatgttatatataggctggggcatacagcagtgaggggtggggagattttgaaaagttctggtttgtcatttatgtagctggtagttttgttttgaacctgttatgagcaaccaccggaataatctgttccccatataaactgaacctaaacttcaaatttttattatctaagctataataataggcggagtcgatctggaacatacagctcgagatcaagaagcaggtcccgcagtcacagtgaaagccctcgaagacatcataatcatggttctcctcaccttaaggccaagcataccagagatgatttaaaaagttcaaacagacatggtcatataaggaaaaaatctcggttctcgatctcagagcaagtctcgggatcactcagatgccggctagaaacacaggcttgaaag

SEQ ID NO: 1465 - DNA, 2432 bp, Homo sapiens
  SIMILAR (455)..(1618): 561254mologous to Rattus norvegicus cyclin ania-6a,accession number AF030091,Smith-Waterman Score=923.
gctgtagtcccgcgccgtaattcccgggtcgacgatttcgtctgcgttgggcttgcgtgcggctcgctaagactatggcgtccgggcctcattcgacagctactgctgccgcagccgcctcatcggccgccccaagcgcgggcggctccagctccgggacgacgaccacgacgacgaccacgacgggagggatcctgatcggcgatcgcctgtactcggaagtttcacttaccatcgaccactctctgattccggaggagaggctctcgcccaccccatccatgcaggatgggctcgacctgcccagtgagacggacttacgcatcctgggctgcgagctcatccaggccgccggcattctcctccggctgccgcaggtggcgatggcaacggggcaggtgttgtttcatcgttttttctactccaaatctttcgtcaaacacaggtttcgaggattgttgctatggcttgtattaatcttgcatcaaaaatcgaagaagcacctagaagaataagagatgtgattaatgtattccaccacctccgccagttaagaggaaaaaggactccaagccccctgatccttgatcagaactacatcaacaccaaacatcaagttatcaaagcagagaggagggtgctaaaggagttgggattttgtgttcatgtcaagcatcctcataagatcattgttatgtatttacaagtcttagaatgtgaacgtaatcaaaccctggttcaaactgcctggaattacatgaatgacagtcttcgaaccaatgtgtttgttcgatttcaaccagagactatagcatgtgcttgcatctacctttgcagctagagcacttcagattccgttgccaactcgtccccattggtttcttctttttggtactacagaagagggaaatccaggaaatctgcatagaaacacttaggctttataccagaaaaaagccaaacctatgaattacctggaaaaagaagtagaaaaaagaaaagtagccttacaagaagccaaattaaaagcaaagggattgaatccggatggaactccagccctttcaaccctggggtgggattttctccagcctccaagccattcattcaccaagagaacgtaaaagctggaaggaggaaatcaccaatcttccatttaatgtggaaggacagttcaaaaaaggaacctggagggtaggacaacaggctttcccaaaagccctttacaatggtgttaaggaaaaggacagccaaggagaagtagaaatagcagaagtgcaagtccgatcgaggtcaagaacacgatcacgttctagatcacatactccaagaagacactataataataggcggagttcgatctgggaacatacagctcgagtccaagaagcaggtccccccagtcacagtgaaagccctcgaagacatcataatcatgggttctcctcaccttaaggccaagcataccagagatgatttaaaaagttcaaacagacatggtcataaaaggaaaaaatctcgttctcgatctcagagcaagtctcgggatcactcagatgcagccaagaaacacagggcatgaaaggggacatcataggggacagggcgtgaacgatcttcgctcctttgaggaggtcccataaaaggcaaggcaccatgggtggccagttcgttcagggacatgggccagggcacagggcgctgacctttcctcttccctttggagccctgccatccagttcttgggttttggccctatctaccagtgtgatggtatgggcctcaatccaaaaaccattaaacgcaaaactggattaggatttgatttcttggaaacccctcctaggtcctcctagaacacctgagggaccagtttcctttgaaaaaagaacctatgttaatttttttgccaccattaaaatgcccctagcagtatcctaattaaaaaccctggtccaggttccaattgtacctttattatagttgtgtattgtttattgcctataagaactggagccgtgaattctgtaaaaatgtatcttatttttatacagttaaaatttgcagacactgttctatttaagtggttattttgtttaaatgattggtgaatactttcttaaccactggtttgtctgcatgtgtaaagatttttacacgggaattaaaatacaaatcttgttttttctaaactgcttcaaataccttatttaaataaattattaaaaaggaaaattttaatagcaaaatggctgtactggttttctgacaaacttattctttcctccattagatggtagtttgagattattaaaatgcaattcttaactgcattgtgagctattgtaagtcttcactgtatatatggaaaaagtaaatgggagtcgcccaacaatgtgacattaaatgttatattttagcactaaaaaaaa

SEQ ID NO: 1466 - DNA, 1569 bp, Homo sapiens
  SIMILAR (1)..(1566): 1001254mologous to Homo sapiens polyadenylate binding protein II,accession number Z48501,Smith-Waterman Score=2684.
atgctctacgagaagttcagcccggccgggcccatcctctccatccgggtctgcagggacatgatcacccgccgctccttgggctacgcgtatgtgaacttccagcagccggcggacgcggagcgtgctttggacaccatgaattttgatgttataaagggcaagccagtacgcatcatgtggtctcagcgtgatccatcacttcgcaaaagtggagtaggcaacatattcattaaaaatctggacaaatccattgataataaagcactgtatgatacattttctgcttttggtaacatcctttcatgtaaggtggtttgtgatgaaaatggttccaagggctatggatttgtacactttgagacgcaggaagcagctgaaagagctattgaaaaaatgaatggaatgctcctaaatgatcgcaaagtatttgttggacgatttaagtctcgtaaagaacgagaagctgaacttggagctagggcaaaagaattcaccaatgtttacatcaagaattttggagaagacatggatgatgagcgccttaaggatctctttggcaagtttgggcctgccttaagtgtgaaagtaatgactgatgaaagtggaaaatccaaaggatttggatttgtaagctttgaaaggcatgaagatgcacagaaagctgtggatgagatgaacggaaaggagctcaatggaaaacaaatttatgttggtcgagctcagaaaaaggtggaacggcagacggaacttaagcgcaaatttgaacagatgaaacaagataggatcaccagataccagggtgttaatctttatgtgaaaaatcttgatgatggtattgatgatgaacgtctccggaaagagttttctccatttggtacaatcactagtgcaaaggttatgatggagggtggtcgcagcaaagggtttggttttgtatgtttctcctccccagaagaagccactaaagcagttacagaaatgaacggtagaattgtggccacaaagccattgtatgtagctttagctcagcgcaaagaagagcgccaggctcacctcactaaccagtatatgcagagaatggcaagtgtacgagctgttcccaaccctgtaatcaacccctaccagccagcacctccttcaggttacttcatcgcagctatcccacagactcagaaccgtgctgcatactatcctcctagccaaattgctcaactaagaccaagtcctcgctggactgctcagggtgccagacctcatcctgctgttcatgtacaaggtcaggaacctttgactgcttccatgttggcatctgcccctcctcaagagcaaaagcaaatgttgggtgaacggctgtttcctcttattcaagccatgcaccctactcttgctggtaaaatcactggcatgttgttggagattgataattcagaacttcttcatatgctcgagtctccagagtcactccgttctaaggttgatgaagctgtagctgtactacaagcccaccaagctaaagaggctgcccagaaagcagttaacagtgccaccggtgttccaactgtttaa

SEQ ID NO: 1467 - DNA, 913 bp, Homo sapiens
  SIMILAR (913)..(158): 1001254mologous to Homo sapiens FAP protein,accession number U63542,Smith-Waterman Score=1396.
ccatattttagtttttcgatgtttagatatttttctttggtgaagcacaagtttcttttcggggtctctgatcaattataaacagaaggaacaccaatggcactgttaactgctttctgggtagcctctttagcttggtgggcttgtaatatagctagctacatgaaccgtagaacagagtgactctggactctcgagcatatgaacatttgcttttgctcttgaggggcagatgccaacatggaagcagacaaaggttcctgaccttgtacatgaacagcaggctgttgcattgtaacttgtggctgtgcattaagatgttgctgaggattgcgaactcccgcagcatatttatactgtggaacggtgcggacagcaggagtagctgcagccagcagataccagggtgataatatttacgtgaaaaatcttgatgatagtattgatgatgaacgtctccagaaagagttttctccatttggtacaatctgaagtgcaaagggtatgatggagggtggtcacagcaaaagggtttgggtttcgtattgtttctcctcccccgaagaagccagtaaagcaggtacagaattgaacggtagaactgtggccacaaaaccatcgtatgtagctttagctcagccgaaagaagagtgccaggctcacttgagtaaccagcatatgcagagaatggcaagtgtacgagctgtgcccaaccatgtaatgaacccctacaagccagcacctccttcaggttacttgatgacaggtattccagagactcagaaccgtcctccaagaccgggcgcggtgggtcacccctgtaatcccagcactttgggaggccaagaggggaagaacacggggtcaggagatcgagaccatcctggctaacacggtgaaacccgtctctact

SEQ ID NO: 1468 - DNA, 2265 bp, Homo sapiens
  SIMILAR (466)..(1962): 841254mologous to Homo sapiens testis-specific poly(A)- binding protein,accession number AF132026,Smith-Waterman Score= 2121.
atgaagcccaagacaagtgaggaggtgtgctcacctcttgtgtggcagtactccctcttcccatctcatactctgggcaatcctgttcatatccaagctctgactaccatgacgttttctaaatctctgtctccaacttcaaccattttcagggtccttggacagaactctgcaaaaacagctcctgtcaagggcatccatgaccatcatgctgtcaagggcaatggccttttctcagcaagctccagcggtgccggggtccagcgcgcaggacggttggggggtcccggagcgggcggccaggacccgcgcagccagttggtgtcagcgagcgccgcggccgttggggactccagctcccagcaggcaccgcttctgcggccgacgcgcgtggcggcggtgccggctgggactcgtagtgcggtccgggtcgcggcctgtggccctgcgggcagccgtgccgagatgaaccccagtgcccccagctaccccatggcctcgctctacgtgggggacctccaccccgacgtgaccgaggcgatgctctacgagaagttcagcccggccgggcccatcctctccatccgggtctgcagggacatgatcacccgccgctccttgggctacgcgtatgtgaacttccagcagccggcggacgcggagcgtgctttggacaccatgaattttgatgttataaagggcaagccagtacgcatcatgtggtctcagcgtgatccatcacttcgcaaaagtggagtaggcaacatattcattaaaaatctggacaaatccattgataataaagcactgtatgatacattttctgcttttggtaacatcctttcatgtaaggtggtttgtgatgaaaatggttccaagggctatggatttgtacactttgagacgcaggaagcagctgaaagagctattgaaaaaatgaatggaatgctcctaaatgatcgcaaagtatttgttggacgatttaagtctcgtaaagaacgagaagctgaacttggagctagggcaaaagaattcaccaatgtttacatcaagaattttggagaagacatggatgatgagcgccttaaggatctctttggcaagtttgggcctgccttaagtgtgaaagtaatgactgatgaaagtggaaaatccaaaggatttggatttgtaagctttgaaaggcatgaagatgcacagaaagctgtggatgagatgaacggaaaggagctcaatggaaaacaaatttatgttggtcgagctcagaaaaaggtggaacggcagacggaacttaagcgcaaatttgaacagatgaaacaagataggatcaccagataccagggtgttaatctttatgtgaaaaatcttgatgatggtattgatgatgaacgtctccggaaagagttttctccatttggtacaatcactagtgcaaaggttatgatggagggtggtcgcagcaaagggtttggttttgtatgtttctcctccccagaagaagccactaaagcagttacagaaatgaacggtagaattgtggccacaaagccattgtatgtagctttagctcagcgcaaagaagagcgccaggctcacctcactaaccagtatatgcagagaatggcaagtgtacgagctgttcccaaccctgtaatcaacccctaccagccagcacctccttcaggttacttcatggcagctatcccacagactcagaaccgtgctgcatactatcctcctagccaaattgctcaactaagaccaagtcctcgctggactgctcagggtgccagacctcatcctaacacatcaacacagacaatgggtccacgtcctgcagctgcagccgctgcagctactcctgctgtccgcaccgttccacagtataaatatgctgcaggagttcgcaatcctcagcaacatcttaatgcacagccacaagttacaatgcaacagcctgctgttcatgtacaaggtcaggaacctttgactgcttccatgttggcatctgcccctcctcaagagcaaaagcaaatgttgggtgaacggctgtttcctcttattcaagccatgcaccctactcttgctggtaaaatcactggcatgttgttggagattgataattcagaacttcttcatatgctcgagtctccagagtcactccgttctaaggttgatgaagctgtagctgtactacaagcccaccaagctaaagaggctgcccagaaagcagttaacagtgccaccggtgttccaactgtttaa

SEQ ID NO: 1469 - DNA, 2873 bp, Homo sapiens
  SIMILAR (506)..(1906): 941254mologous to Rattus norvegicus poly(A) binding protein,accession number AJ298278,Smith-Waterman Score=2234.
ccccttctccccggcggttagtgctgagagtgcggagtgtgtgctccgggctcggaacacacatttattattaaaaaatccaaaaaaaatctaaaaaaatcttttaaaaaaccccaaaaaaatttacaaaaaatccgcgtctcccccgccggagacttttattttttttcttcctcttttataaaataacccggtgaagcagccgagaccgacccgcccgcccgcggccccgcagcagctccaagaaggaaccaagagaccgaggccttcccgctgcccggacccgacaccgccaccctcgctccccgccggcagccggcagccagcggcagtggatcgaccccgttctgcggccgttgagtagttttcaattccggttgatttttgtccctctgcgcttgctccccgctcccctccccccggctccggcccccagccccggcactcgctctcctcctctcacggaaaggtcgcggcctgtggccctgcgggcagccgtgccgagatgaaccccagtgcccccagctaccccatggcctcgctctacgtgggggacctccaccccgacgtgaccgaggcgatgctctacgagaagttcagcccggccgggcccatcctctccatccgggtctgcagggacatgatcacccgccgctccttgggctacgcgtatgtgaacttccagcagccggcggacgcggagcgtgctttggacaccatgaattttgatgttataaagggcaagccagtacgcatcatgtggtctcagcgtgatccatcacttcgcaaaagtggagtaggcaacatattcattaaaaatctggacaaatccattgataataaagcactgtatgatacattttctgcttttggtaacatcctttcatgtaaggtggtttgtgatgaaaatggttccaagggctatggatttgtacactttgagacgcaggaagcagctgaaagagctattgaaaaaatgaatggaatgctcctaaatgatcgcaaagtatttgttggacgatttaagtctcgtaaagaacgagaagctgaacttggagctagggcaaaagaattcaccaatgtttacatcaagaattttggagaagacatggatgatgagcgccttaaggatctctttggcaagtttgggcctgccttaagtgtgaaagtaatgactgatgaaagtggaaaatccaaaggatttggatttgtaagctttgaaaggcatgaagatgcacagaaagctgtggatgagatgaacggaaaggagctcaatggaaaacaaatttatgttggtcgagctcagaaaaaggtggaacggcagacggaacttaagcgcaaatttgaacagatgaaacaagataggatcaccagataccagggtgttaatctttatgtgaaaaatcttgatgatggtattgatgatgaacgtctccggaaagagttttctccatttggtacaatcactagtgcaaaggttatgatggagggtggtcgcagcaaagggtttggttttgtatgtttctcctccccagaagaagccactaaagcagttacagaaatgaacggtagaattgtggccacaaagccattgtatgtagctttagctcagcgcaaagaagagcgccaggctcacctcactaaccagtatatgcagagaatggcaagtgtacgagctgttcccaaccctgtaatcaacccctaccagccagcacctccttcaggttacttcatggcagctatcccacaagattaagaccggtgctgcatactatcctcctagccaaattgctcaaactaagaccaagtcctcgctggactgctcagggtgccaggacttcatccattccaaaatatgcccggtgctatccgcccagctgctcctagaccaccatttagtactatggagaccagcttcttcacaggttccacgagtcatgtcaacacagcgtgttgctaacacatcaacacagacaatgggtccacgtcctgcagctgcagccgctgcagctactcctgctgtccgcaccgttccacagtataaatatgctgcaggagttcgcaatcctcagcaacatcttaatgcacagccacaagttacaatgcaacagcctgctgttcatgtacaaggtcaggaacctttgactgcttccatgttggcatctgcccctcctcaagagcaaaagcaaatgttgggtgaacggctgtttcctcttattcaagccatgcaccctactcttgctggtaaaatcactggcatgttgttggagattgataattcagaacttcttcatatgctcgagtctccagagtcactccgttctaaggttgatgaagctgtagctgtactacaagcccaccaagctaaagaggctgcccagaaagcagttaacagtgccaccggtgttccaactgtttaaaattgatcagggaccatggaaaaggaaacttgtggctttcaaccggaaggaaaatatctaaacatcggaaaaacttaaatattatgggaaaaaaaacattgcaaaatataaaataaataaaaaaaggaaaggaaactttgaaccttatgtaccgagcaaatgccaggtctagcaaacataatgctagtcctagattacttattgatttaaaaacaaaaaaacacaaaaaaatagtaaaatataaaaacaaattaatgttttatagaccctgggaaaaagaattttcagcaaagtacaaaaatttaaagcattcctttctttaattttgtaattctttactgtggaatagctcagaatgtcagttctgttttaagtaacagaattgataactgagcaaggaaacgtaatttggattataaaattcttgctttaataaaaattccttaaacagtg

SEQ ID NO: 1470 - DNA, 237 bp, Homo sapiens
  SIMILAR (62)..(235): 1001254mologous to Mus musculus putative,accession number AK002704,Smith-Waterman Score=302.
tgccaccatggcaactgcaccatacaactactcttacatctttaaatatattattattgttatggctgattgtcctcacacaattggtgttgaatttggtacaagaataatcgaagttagtggccaaaaaataaaactgcagatttgggatacggcaggacaggagcgatttagggctgttacacggagctactacagaggagctgcgggagctcttatggtctatgatatcactag

SEQ ID NO: 1471 - DNA, 1657 bp, Homo sapiens
  SIMILAR (692)..(859): 441254mologous to Dictyostelium discoideum Rab4,accession number U02927,Smith-Waterman Score=112.
gcgagggtgacaggaaaccctgtgcagggagcgccgccatcttggaccagcccgaggaagatactgagggagcacaggagcagtcaccgctgccactgctactgccgctactgctgccggcgcgtctgcacctctcggcctgccagtgtacctgccggcgcctcggtcgaccgcccccgccccctctcccgctgcgtccgcactcctgttcctggtcctgacgcccccctcccgcccggaaaggctgcccagccaccagcaaccccccagtgccaccatggcaactgcaccatacaactactcttacatctttaaatatattattattggggacatggggagtaggaaaatcttgctttgcttcatcaatttacagaaaaaaaatttatgggctgatttgttcctcacacaattgggtgttggaatttgggtacaagaattaatcgaaagtttagtgggccaaaaaataaaactggcagatttggggattacggcagggacagggagcgattaagggctgtttacacggagcgtactacagaggagctgcgggagctcttatggtctatgatatcactagaagaagtacatataacccacttaagcagctggttgaccagatgccaaggaatctcacccaatcccaaatactggtaataattctccataggaaattaaagccagatttggaggccacagagagatgttacatatgaagaaagccaaacagtttgctgaagaaaatggcttattgttcctcgaagcgagtgcaaaaacggggaggagaattgtagaagatgcctttcccttgagggcctgcccaaggaaaatctatcagaacattcaggatgggaagcttggatcttgaatgcttgcttgagtcttggtgttaccaccaccaaacctttccagccccgcagggggggcccggctttaacccagttgaacccccaccccagagaagaaggctgtggctgctaagtgacctctttgctgtgggccctcatttgacctttcacctctgtctgttggaagcagtactttttactgcctcattgtcttctgtacgatcttactgggtttaattaaaaaaaaagaaaaaacttctgttgttaaaaacagttttaacacaatactaaactgctaaacaactagatgtaatcaggttatcaaaggcaagtagagtaataaatctctcctgcatggtaaatctagacttttttttccccccttgtccctcgtggataagtatgtcaccaatatatgatttaaaccgagcactgatgctggacttcatgatttttaccctcccttttggcaaggctttgtctcacttgtacggtttaatttgggtgatatcttaagcctttcttcccatccttaactgttcaagtatgtctgttgtaaccaataagtttattgctgtggaaattacttctgatgggtagaggaagggggttctataactgctttttgttttgttttgggataaatttcctgttgtgtggggtgggcatttttccttaacgagatttgcttctgtcttaggcctcacacaggggaaaatatccatttatcttctctctcgtgcttaattaatagctttatctttttttataccattttatccttttctctttaacagaaagtaaatatg

SEQ ID NO: 1472 - DNA, 1394 bp, Homo sapiens
  SIMILAR (1322)..(306): 841254mologous to Mus musculus putative,accession number AK018315,Smith-Waterman Score=1482.
taaatattgacttaaagaattttgagatacatatattagcaaaacgaacaaaacaacatcagttataggaagcaaatcatctaataaaatataaggaaaacaaagttgtagggcctaatagtgtactcatggtttgaagcatatttactggaaaataataagccctaaacagatcataaaaaaaataataagccctaaacagatcataaaaacattctcctatgcaaaggaattccaattaatatatctgtatattggttatcatggcgtaagcataattaatataggtacgagtacttcatttatattttttgctttcttcttttatgactatggtgtctttccccatccctctctttccttcttctcgactcacagtttttatccttatctttgtttctttttcttttatgtgggcttctactcctatcccttctatgtcgtgaacactcagcatccaaatagcttccaccagactgccgtgaatctactgaagctgatcgcctttcttcattcttttcggcatcatcctctgccttctcttgctcttcttgccaatgattgctgagttcttccatgtgcacatttatcacatctcgaatcacctcagtatatgatttcttggttatgtgaacattcttggctctataggactggcgtcttcttttataatctcgtacttctgccaggatttcaaggtaggattttggactttttcgactattgtcttgattgattttggcagccaagtctacaaagagatcgctgtcattttcaataatttgagaatcagagcgctttttctttgtctcctcaactacgaaatcatagagggcaagacgatcagcttgagttagatcacaaacaaaccgtttgtgattcaaaggaacttcaacaggcaatgaagaataaattctttgattataacaatcactgtctttcccaactgcagttctagcttgtttaattatctggaattgtgagtccttattcaaagtaatcgaaggtatcttcacattttcatagaaaaactcaggattagacatttcatcctcttcttctttggtatagcccattttcctcaatctacaagatgccatgtgctttgccaaaaatgatttaggcatgtgatgattggaatcgtatggacaaatcacatcttcatcctccgccgcctccttttccccgggatccagactatgtaggtcccagcccagggacgcggtcacctcctccaacgtccggcagccgctctccacgaaatcgttcagctcctcctgcaccccccgccgctcctccacaggtgcaggctcgccctccatagcacaagcccacccgacaagaggaagcggccgaactgccggacgcgtgggtcgcccccgtggttccgttcg

SEQ ID NO: 1473 - DNA, 595 bp, Homo sapiens
ttatcctgacgacgtttcagttttagctatggctctctctaaagctgctagttttgtatgggtagctccttccttagaaggaaaatctgcagtatcttttttaagttctgcgtcagaagacggcctggacggagggtggggtgactgatgagttggagctttgctgccacctggtgtccgaccgaggaggatgacgcagttccctagataaagacttgcaagctctagagcctcatctgctttgccgtgggcgtgggtgattgtgcagagttctgggtcacgcgcttggctccacgggcagaaaaacggaggctggcgcctgccgtcccaccccatcaccaggacgaaaggggtgggaccagcactccccatttccacaacctttcccatggcttttgggtgacttttcctgcgctcctcccccaatacgatattctccccctgaattctttcttgcacgagatccaagaaccctctcttggggtctggattgggacccttttcctgtaacacatatttgatatctttctcaagtacctgccatttggctccagttattaatttatgggctttgccaggtgcaagtatcatgtga

SEQ ID NO: 1474 - DNA, 1464 bp, Homo sapiens
tcattctttcccatgttcctctttccagacatcagaccagtctgaggtctgctctgagcaagggatgcattcaatggttcctgtttcgtgctcagggctgaaggcccggggctcgtcctccactcttacggggtgcagaggtaagttccccttggcagccagctcagccaggtgccgtcgcttggtgtagaagtcgtcattgaccttgtcagcttcatattcccggatcagtttcttacctctttctcttggcgcaagtctgccagatgcttccaatgagtaattgtatcttaaccttctttgaagacgattgttggatatacgaggctccttctctgtcttaggaaggagagcacaggacaccatcaatttgtcgtttgtggaccaagggtagttccacatggctggagaggcctcagaatcatggtggaaggcaaagaaggagcaaaaaggtatgtcttccatggcagcaggcaagagagcacgtgcagggataactgcccacgttaatgctgacgtctcgttatcgttagcgcttaaacgtttgccaattggtgaaccgccgactgtgggcgccctagcgctacatatgaccgtgtgcactggttctgccgctgcgcccatatgccaccaaatgaggaatgttgccctggctgctgttaggccatctgcaaagtcgtgcgtttgctgttgctctggaccacatcctgttttaagtactttccatgtatgaattccttcaatcctcacgaaaatcttcgaaaatgggtattttgtgatctctgttttactgatgagaaacatcttgtcctcatctgcattgttatagttggttgctgtcactgtgtaattctggcctgtggccatgaccttatttggaccaagcagcatctttgacagcatgttattaaggtaaagattatgagatgaggttatcctggataagggtgagtcctcaaaccaatgacaagtgtcccagaccaaggaagattttgcacactcaatttcaaatttccaggagaaagaatctgattggtgctccttgtaccaggtgatgctctctggcccaatcaggaatggcatgaagtggggctttttagtataaaaatgacccctgaggtccatttccatgtttgaggagcagttcttagaaaactgggggatggggaaacacccaaaagcctctagtacattttctctgcccaggtgagaagtagtagcctgctccaccttgcctgcatcaaagtcaagtgttggagaaacatcaggagttggcatgtgactctcaggtgggcataactggctcagaccctcattcagttcctttccttttccaacaaaaatgctcagaaggaagccgtgtgcgtgcttgcttggtatgcgcatcacgtaggcttcgtggggctcgagggtagagataacggtgtcgctgtctattgcccgttcagactctctcacgcccat

SEQ ID NO: 1475 - DNA, 1734 bp, Homo sapiens
  SIMILAR (142)..(86): 311254mologous to Homo sapiens unnamed protein product,accession number AK023443,Smith-Waterman Score=43.
  misc_feature (1)...(1734): n = a,t,c or g
tttttttttttttttttaatgaggcggagtctcgctctgttgaccaggctggagtgcaatggcacgatcccggctcaccgcaacaagagcgaaactctgtcttaaataaataaataaataaacaaacaaacaaacaaacaaactatcacagcataaagtaggaggaatatttcgttactgtctatttaaactggttaatgcagaaaggaagtctggaaattccagttttaaagtaaaattttggacattgtaggattgattatttggcatagttgtgatgtttgttcctgcattatggttttgttggcagggcagcctttaaggacctgtatattttcttctagactctatatattccctgtgagtattagttgtatggtcaaactggcaaattttaccataggtataaataatagagaatgtggaagaatagtgaatagtgtcagagatagttaaaagtccatacaatagtagagaaggtaataagtaatagtggcttggactaaatatttgttgaataaatgttttaaaaaacaggctacctacaatttgtgttgaagatatgaatgaatgaagtttccacaccttttatgtgggagacctggataagtaaggcaacaatangggaagggtccccagggttggggaggagccccaagttgaggaaccaataatggaaccaattattgtatgaacaattgttaggagacagctaatcacaaacaacctgcgggcacaatgacctcattccacacggtaggcacccttcagcaggaccctataaaactctcctccagcccttgcctctttgcaaggtagccccttctgtgctgagctgcccattgcaacatatttttataatttctctaataaatctgcccttctttaccctaacaactaatcttggtaaatggctttaccacctgcaaaaactgaccctaggttgttgctacccgatatggtttggctgcgtccccacccaaatttcatcttgaattgtagttcccataatccccatgtgtcgtgggagggacccggtaggaggtaatcgaatcatgggggcaggtttttcccatactgttctcgtgatagtgaatacatctcactaaatctgatggttttataaagggcagtttcccctgcacgtgctctcttgcctgctgccagggaagacatacctttttgctccttcctttgccttcccaccatgattctgaggcctctcccagccttgtggaactgtgagtacattaaacctctttttctttataaattacccagtttcccagtatttcttcatagcagtatgaaaagtaactaatacactacccgagacatcttaggagatttgtaatagctgtaatgccaggtccaccatatttttagcataaagcaaatgtttacgcgtgatatgactgcacgggctttctttcagctggagccatagcaactcaagtagtaaccctatcttagtctgattaaaagtaaatattagtctgggcatggtgggacatgcctgtaatcccagtactttgggatcacaggagtgagccacggtgcccctcatcctttactttcttaataaacttgctttcacttcacactgtggcatcaccctgaattctttcttgcacaagatccaagaaccctctcttggggtctagattgggacccctttcctgtaactatcatgctactgcactccagcctgggcaacagagcaaggccctgtct

SEQ ID NO: 1476 - DNA, 508 bp, Homo sapiens
  SIMILAR (162)..(506): 981254mologous to Homo sapiens CaSm,accession number AF000177,Smith-Waterman Score=560.
cccgaaagctgagggacggaggtcagtgactctggggtctcgggaacccggagacgaaggaagacaccgtgttccttaagagggagtatacgtttcctcgccatttatccaatggagtttcctcttacctacttaacaggaacagggaaagggtgtcccccaacgaaaagcacttggttctgcttcgagatggaaggacacttataggctttttaagaagcattgatcaatttgcaaacttagtgctacatcagactgtggagcgtattcatgtgggcaaaaaatacggtgatattcctcgagggatttttgtggtcagaggagaaaatgtggtcctactaggagaaatagacttggaaaaggagagtgacacacccctccagcaagtatccattgaagaaattctagaagaacaaagggtggaacagcagaccaagctggaagcagagaagttgaaagtgcaggccctgaaggaccgaggtctttccattcctcgagcagatactct

SEQ ID NO: 1477 - DNA, 1186 bp, Homo sapiens
  SIMILAR (404)..(760): 401254mologous to Homo sapiens CaSm,accession number AF000177,Smith-Waterman Score=141.
aaccccgaaagctgagggacggttgttagtgactctggggtctcgggaacccggagacgaaggaagacaccgtgttccttaagagggagtatacgtttcctcgccatttatccaatggaggttcctcttacctacttaacaggaacagggaaagggtgtcccccaacggtacggctgccccgcctcttcctgggggcccacacgtgttacaggaagtgggtaagggtaatatggaggagcttccggcaggccccgccggcggctgaaagccggcgcagaagtgctggtctcggtcgggattccgggcttggtcccaccgaggcggcgactgcggtaggagggaagaggttttggacgcgctggcctcccgccgctgtgcattgcagcattatttcagttcaaaatgaactatatgcctggcaccgccaaccctcatcgaggacatttgacaaaaaagcacttggttctgcttcgagatggaaggacacatataggctttttaaagaagcattgatcaatttgcaaacttagtgctacatcagactgtggaaccgtattcatgttgggcaaaaaatacgggtgatattcctcgagggatttttgtggtcagaaggagaaaatgtgggtcctactaggagcaaatagacttggaaaaggagagtgacacaccccctccagcaagtatcccattgaagaaaattcctagaagaacaaaaagggtggaaccagccagaccaagctgggaagcagagaagttgaaagtgcagggccctgaaggaccgaggtctttccattcctcgagcagatacttttgataaggacctattcttttgcccagaggctgttggctcttgaagagtaggggctgtcactgagtgaaagtaacattcttggccccctcacgcatttgatccacagactgtagagtttcggaaaagtcacttttattttttaattattttacatatgcaacattgaagaaatccgtgtaggtgggttttttttttaaataacaaaatcactgttttaaagaaacagttggcatagactccttcacacaatcactggtggcaccagcaactacttctttatattgttcttcatatcccaaattagagtttacagggacagtcttcatttacttgtaaataaaatatgaatctccaaagtaaaaaaaaaaaaaaaa

SEQ ID NO: 1478 - DNA, 1079 bp, Homo sapiens
gaacacgtagagacaaacggtgcactggtgcctcccctctaaccgccaatcagaaaccggacctcacagctgactgggaactggacatgcggaggagctgctggctgcttctgggaacaggcggaggattagggtcagggtggagaggaagaccaatcagtgggcacaatacaggcaaatgggcaaggcctgcctcggggaactataaccttccaggatctggagcccgggagagccacactgtgggcttaatgcgaatcgaggaacaagtgggtatctctgccaggcaccccactttctcctactaacatgggctcaggggactcagccctggacagagagcctccatagagtgaacagtcttccagatctgggccaatcatcctggacagaggcccgcgaggcagctttgccctgtccacctgttgggtgggcagagccaccaggaacccagacaccacctccaactctgagccttccagagcttcagcctctcttcgtcgtcttaccccactgaaaccaacagggatcgggccaggctcccagattcttgaggacagggactttcgggcatttacttaatggggggactacttttggggtaagggggcgcctgcttgcctgatacaggatggggtcaagggacagtgggcaggtcctcactcaggagtggggggtgtaggctggccagcccccagggcttgtccaccagtcttctccccgcaaggccctcagagcagcgcctgtgggtgtcagtattacctgagccctaggcccaaagcctacccccaaggctggggaaggggaggagaccccccaggtcagaatgtgaggtcctcagtctgtgatttaaggtgttgcatgtggactcttaactgtacgtgtagtttctagtggagaaatcaaggctctgatcattttgtttttagtatgaaaatgtgatttcctttctgtttgtaactcatcatagaaacattgtggtgggaggagaggggatagtctacagctaatgagggaaacaccaaagatcacatcattaaaatgatgacatgcccctcaaaaaaaaaaaaaaaaagggc

SEQ ID NO: 1479 - DNA, 566 bp, Homo sapiens
  SIMILAR (446)..(565): 971254mologous to Homo sapiens Human secreted protein dn740_3,accession number AAW79092,Smith-Waterman Score=202.
aattgccccagcgagttggattactagcacacacacggtgagtgcaatcgagggggcttttgtgcatgtgttcttattggcagttacaagcgtgtcattttcagggggtgggttttaaatcagtctgctgcgtcagaatcccgtacgcctgaaggatttaagttgcatgtgcacctgaaactcgtatatgagtattttctgtctgtgcttttagagaggaggaattctgtaacgacttttgtttctggttaggaagagaatgatctctttcagtgcaccgccacttatgttacctttttccttttatttctttgtgtgtccagctgcaagaacagcaaggaaaaggaagccctctccagaaccagaaggtgaagtcgggccccctaagatcaacggagaggcccagccgtggctgtccacatccacagaggggctcaagatccccatgactcctacatcctcttttgtgtctccgccaccacccactgcctgacctcattccaaccggaccacaccgcctgaagcggcccagaatggccagtcccccatggcagccctgatcttag

SEQ ID NO: 1480 - DNA, 702 bp, Homo sapiens
  SIMILAR (499)..(702): 601254mologous to Homo sapiens Human secreted protein dn740_3,accession number AAW79092,Smith-Waterman Score=185.
  misc_feature (1)...(702): n = a,t,c or g
catccattagccgcggtgtccggaaccgcgctgccagccntgggctccgcgcagcccactgatctgggcgcccacaagcggccggcatccgtgtcgagcagcgctgccgtggagcacgagcagcgtgaggtggcagccaagcgagaaacaaccgccgccgcctgcgcaccggggcccggccgacagcctgtccaccgcggccggggccgccgagctgagcgcggaaggtgcgggcaagagccgcgggtctggagagcaggactgggtcaacaggcccaagaccgtgcgcgacacgctgctggcgctgcaccagcacggccactcggggcccttcgagagcaagttttaagaaggagccggccttgactgcagttgcaagaacagcaaggaaaaggaagccctctccagaaccagaaggtgaagttcgggcccccttaagatcaacggagaaggcccagccgtggctgtccacattccacagaggggctcaagatccccatgactcctacatcctcttttgtgtctccgccaccacccactgcctcacctcattccaacccgggaccacaccgccttgaaagcggcccaagaatgggccagttccccattggcagccctgatcttagtagcagacaattcagggggcagtcatgctcaaaagatgccaaccaggttcactccactaccaggaggaatagcaac

SEQ ID NO: 1481 - DNA, 1853 bp, Homo sapiens
  SIMILAR (516)..(1094): 521254mologous to Homo sapiens Human secreted protein dn740_3,accession number AAW79092,Smith-Waterman Score=374.
tccgcgcttcccaccgatctgggcgcccacaagcggccggcatccgtgtcgagcagcgctgccgtggagcacgagcagcgtgaggcggcagccaaggagaaacaaccgccgccgcctgcgcaccggggcccggccgacagcctgtccaccgctgccggggccgccgagctgagcgctggaaggtgcgggcaagagccgcgggttctggagagcaggactgggtcaacaggcccaagaccgtgcgcgacacgctgctgggcgctgcaccagcacggccacttcggggcctttcgagagcaagtttaagaaggagccggccttgactgcaggcaggttgtttggggttttcgagggccaacggggccaaccgggtcttaaagcagtttgcaagaacagcaagggaaaaggaagccctcttccagaaccaagaaaggtgaagtcgggcccccttaagattcaacggagagggcccagccgtcggctgttccacatccacagaggggctcaagatccccatgactcctacatcctcttttgtgtctccgccaccacccactgcctcacctcattccaaccggaccacaccgcctgaagcggcccagaatggccagtcccccatggcagccctgatcttagtagcagacaatgcagggggccagtcatgcctcaaaagatgccaacccaggtttcacttccaactaccaggaaggaatagccaacagtcggcccttcttccgtcctcttatgaaccaaagaaaggctgggccccaagagaggtggggggccaagggagcaggcaacacaggaggactgggagccagtgcaccctgccagcctcccggacttcctctttgggcaaccagttgccccgctgtgctgcaccctctgccacgagcggctggaggacacccattttgtgcagtggcccgtccgtcccttcggcacaagttctgcttccccttgctccagccaaggcatcaaacagcagggaagctagtggagaggtctatttgtcccagtggcggacaaatgcccctcttgtgggctcccaatgtccccctgggccctttatgcaaggggaaattgcaaccatcccttgctggagatgtgaaagtgaaaaaagagagagactcgtgacttttcccggtttccaggaaaaaacccccaaatgattacccctttaatttaaaaactgccttggaattggtatatatatcccccatatatatatatatcccaggacaaggggaaaatgtagaccttccataaaacatggctggtataaatttggattgattttggaatacatacgagtgtgtttctatatttttttttgaccgacaaaagggtatgtacttataaagacatttttttcttttgttaacgttattagcatatctttgtgctttattatcctgggtgacagttaccgttcctatgtaggctgtgacttgctgctgcttttttagagcacttgggcaaatcaggaaatgcttctaggctggtatttgtatgccacttattttaaaaagaaaaaaaaagccaaatacattttctgacattgtaagattgccttactgtctgtcattccttattgctggcccctttgtcaggccggaggccaagtggtggagaaggaaaggaaatgatcgaacgggcgtgttgtcaagtgggcatgccactggggaaataccaccagtttaccctggaaacatttgtcctcaggagggagtagggaaagtgggatttttgaattcttctattttgctcaaaagttcagttcctgagatactggatgactgagagtgctgctgggaaattttcaggattgtgtggtcttttggggttttttg

SEQ ID NO: 1482 - DNA, 412 bp, Homo sapiens
  misc_feature (1)...(412): n = a,t,c or g
cccacgcgtccgaggacatcttatgaaaaacagggatatctgcttctaccacctgtattcagcattgtactagaggttcttgccagggcaattagtcaagaaactgaaataaaaagtgtccaaatgggaaaggaagaagtaaaactgtctttagtttgtgtgtgtgtatatttatgcatgagaaaatcctgtggaatccaccaaaannnnnnnnnnnnnnnnnnnnnnnnnnnnnnnnnnnnnnnnnnnnnnnnnnnnnnnnnnnnnnnnnnnnnnnnnnnnnnnnnnnnnnnnnnnnnnnnnnnnnnnnnnnnnnnnnnnnnnnnnnnnnnnnnnnnnnnnnnnnnnnnnnnnnnnnnnnnnnnnnnnnnnnnnnnnnnnnnnnnnnnnnnnnnnnnnnnnnnnnnnnnnn

SEQ ID NO: 1483 - DNA, 512 bp, Homo sapiens
  SIMILAR (438)..(512): 681254mologous to Homo sapiens NAG13,accession number AF194537,Smith-Waterman Score=78.
  misc_feature (1)...(512): n = a,t,c or g
cgacgccatatttgagcctcttacggaaactgctcgcangnncnnaccangcgnncgcaggtccatgtctaaactaatcagcaaaattcattccattggtttcagngattattttgtgggtgtgcacatgaaccaatttggatcaatgagaacctgaccctgacttttagtgtactgttggggtgaggtgtactgtctttcctacagaacacaaacttccagctgtagaaagtcatctcatagtgtcaagaagtgagtctgtcatcaacaaaatataggcaaaccaaatctgggaacatataaaaagataatacatcatgaagaagtgggatttattctaggaatgcaaggttggctcaacataagaaaagcaccaactgaaatataccatattaatagaataaggacaaaaaccacatgatcatcttaactgttaggaaaaagcatttgacaaaatctaacattatttcatattaaaaacactcgacaaactaggaatataagggaacttt

SEQ ID NO: 1484 - DNA, 1203 bp, Homo sapiens
  SIMILAR (696)..(1184): 521254mologous to Rattus norvegicus proline-rich proteoglycan,accession number L17318,Smith-Waterman Score=384.
tcatcccagtctgcggacagacaccccggatcccggacagcccgtgcagccgttgtcgagggaatgtggccttgagtgcaggggcttctcggcgccaagaccggccttggacctcacagcgccctgcaaggcccctgccaccccctcctttggtccttgggctgtgctgccgtttctcctcggctggtcccagtgactggtggggctgtgggcgggcggcagggccaggccgttgagcaggggtgaggcgtagggccggcgcggcgagtggaagcaggggtactggtagaggccggtgcgtaaccagggtaggcacctagtagctggaggctgcaagtcgcatagtcgcctggatccacgcccactctcagccaatataaccttaatgctgccaattacacctgccaaggccccgcttccgaacacgctcacgtcccacaggcacactggggtgaggaccctaacagctctactgagatgtgattcacacagcacgccacccagccacggaagcacgcagctcgaggggcctttgccgtattcgcagggctgtgcgaacgtcttcactgtcgatttttgttgttgctcttccccaagccacacggtgtgagaacggcttctgcgcgtgtgcctggcattggggtcagcagggactgcagatgatgtaaagttacaccctgtttcatgtgcggacaccgcacgctccacaccagggacctcagcaccctccacatcagggacctcagcacccttcacaccagggacctcagcaccctccacaccagggacctcagcaccctccacaccggggacctcagcaccctccacaccggggacctcagcaccctccaagccggggacctcagcaccctccacaccggggacctcagcaccctccaagccggggacctcagcatcctccacacctgggacctcagcaccctccaagccggggacctcagcaccctccacaccagggacctcagcaccctccaagccggggacctcagcaccctccacacctgggacctcagcaccctccaagccggggacctcagcaccctccacgccggggacctcagcaccctccaagccggggacctcagcaccctccaagccggggacctcagcaccctccaagccggggacctcagcaccctccaagccggggacctcagcacccgcggaccctggtgtcctcat

SEQ ID NO: 1485 - DNA, 1523 bp, Homo sapiens
  SIMILAR (531)..(887): 781254mologous to Homo sapiens Human ORFX ORF3046 polypeptide sequence SEQ ID NO:6092,accession number AAB43282,Smith-Waterman Score=474.
ccataaaaagcactttgtttaattttatcaaatcgatctgtacaaaagttagcgttgcttggtcagaaaggagtgaaggcagcaggggagtgagggtgcgtcctccgaacgcggtgccaagggagacgctgcatgaaacgggtctgcgacggctcccggcccccacccccacccccagagaaatagaagcagaggcattatctttttttttctacaaaaaagtaggaaaagtagaaaaagtacaaagaaggcaacttcttcggctgtgtttaagtttacaaagtttaaagggcacaagtttccgtgaagtagggcgctattgtatgctctatgtcttcagcacacggggggaaggcagtgcagggtgatttcaggtttgactcgtctagaactggaggccctaacgacgtttagtgggagaaggtttagtttcaaaagcttggtaaggttggcactggttccttgcgagccaaaaatcacttctgaagccaccactttccaggaatccctgtgtcctggtgtcctgccacatggcacagtcatgggcaaggacccaggaattcctgtgtcctatgtgtcctaccacgtggcacagtcggggacagggacggagtcctgcttcccaaaccccaactgagtactgggtgctggggcaccccaacctgatcagagatgtcacaaggcaggtcccttctcctccctcgggttttcggttgccaagctcgaggcatgaggggcccagtcctcccagggactttgggacctccgggccctccagggcggcctccccataagccgagcaacgagcaacgtgatgccggccaacagctgcaactcccacctcctgcctgccctcaagggaagcttccccagcttccgttttgtcttaaattctactctttgcccgaattacctcattaattaaagataaaataacacagaacataaatacatctttaacagctttcagaagaaacacatttaagctttaaaaaataaaaattatcaaaaacataaaaataaaagagaagatgtgttcatcaacagccagccctcgcgtgagcgcactctgccagcaaggagacacctcagatctgacaggcaggtcccggagatgctcgagtagactcatcccaggctgcggacagacaccccggatcccggacagcccgtgcagccgttgtcgagggaaggtggccttgagtgcaggggctctcggcgccaagaccggcctggacctcacagcgccctgcaaggcccctgccaccccctcctttggtccttgggctgtgctgccgtttctcctctaccgagatgcaaagcgaaggtgctggtgccgccagtcctcacagaagagggaccaaacggcagcccttctttgtggaataatcccaccacctcaaaaagaaagatagaagggagagggagctggtccgtcgtcggcagaggtgtggccatctggaggccgagggccacgggcagcaagcgtgtttccctgcagacttcagcaggcacttggagct

SEQ ID NO: 1486 - DNA, 374 bp, Homo sapiens
  SIMILAR (195)..(374): 831254mologous to Rattus norvegicus gamma- glutamyltranspeptidase-like protein,accession number AF244973,Smith -Waterman Score=231.
ctgcgcaaggatgacacgcaaattcgtgaagcgttccatatttttgtccagtcctggcgtcccgccctgcccagcctcccgtccctgcccctagcccgtgccctggcagagaccctgaaccagccctttggcagcggccttatcaccccctcggggatcctgctcaacagccagatgctggacttctcctggcccaaccggacagctaaccactctgcacccagcctgtggtccgacccgcggaggggctctgtggaacctacctcgctctgggggccaatggagctgcgcggggcctcagcggcctgacacaggttctgctgaatgtcctgaactagaaccggaacctgagtgacagcctggcccgcggccgc

SEQ ID NO: 1487 - DNA, 480 bp, Homo sapiens
  SIMILAR (438)..(479): 921254mologous to Homo sapiens dJ18C9.2.1 (novel gene similar to Gamma-glutamyltranspeptidase isoform 1),accession number AL049709,Smith-Waterman Score=60.
gctgcccaggtgctgatcatgggacctgatgacttcattgtggccatggttagctccctgaaccagccctttggcagcggccttatcaccccctcggggatcctgctcaacagccagatgctggacttctcctggcccaaccggacagctaaccactctgcacccagcctggagaattcagtgcagccagggaagcggccactctctttcctgctgcccacagtggtccgacccgcggaggggctctgtggaacctacctcgctctgggggccaatggagctgcgcggggcctcagcggcctgacacagggctgttaggaggctcagatgacacccggtgtaagaattctcaagactaaggagcctggaccaagggtgagagctgaggaatcctggaccatcacccctgggacagccctgatttttctgtaccttggctaccacaggttctgctgaatgtcctgaccttgaaccggaacc

SEQ ID NO: 1488 - DNA, 2392 bp, Homo sapiens
  SIMILAR (1382)..(2026): 731254mologous to Homo sapiens dJ18C9.2.1 (novel gene similar to Gamma-glutamyltranspeptidase isoform 1),accession number AL049709,Smith-Waterman Score=717.
ggaattctcgggtcgacgatttcgtggcgcgggcgaggatggcggcggagaacgaggccagccaggagagcgccctgggcgcctactcgccagtggactacatgagcatcaccagcttcccgcggctgcccgaggacgagccggcgcccgcggccccgctgaggggccgcaaggacgaggacgcctttctgggagaccccgacaccgacccggactccttcctgaagtctgcacggctgcagcggctgccatcgtcgtcgtcggagatgggcagccaagacgggtcgccgctacgcgagacgcgcaaagacccgttctccgccgcagcggccgagtgctcctgccgccaggatgggctcacggtcatcgtcacggcctgtctcaccttcgctaccggtgtcaccgtggcgttggtcatgcagatctacttcggggacccccagatcttccagcagggtgccgtggtgaccgatgctgcccgctgcacttcactgggcatcgaggtgctcagtaaacagggatcttctgtggacgcagcggtggcagcagccttgtgtttgggtatcgtggctccacacagttctggcctgggcggtgggggcgtgatgctggtacatgacatccgacgaaatgagagccacctaattgatttccgggagtccgcaccaggggccctcagggaagagaccctgcaaagatcctgggagaccaagcctgggctcttggtgggggttcccggaatggtgaaggggctacatgaagctcaccagctctatggcaggctgccatggtcccaagtcctggcctttgcagcagctgtggcccaagatggcttcaacgtgactcatgatctagcccgtgccctggctgaacagctgccacccaacatgtccgagcgcttccgggagacgttcctgccattcggcccgcccgccactacctggctcgttgctgcatcggcccgacctggctgaggtgctggatgtacttggcacctccggcccggctgccttctacgcaggtggcaacctcacactggagatggtggccgaggctcagcacgcagggggtgtcataaccgaagaggacttcagcaattacagcgcccttgtggagaagcctgtgtgtggcgtgtacagaggccacctggttcttagtcccccacctccgcacacgggccctgccctcatcagtgctctcaacatcctggagggcttcaatctcaccagcctggtatcccgagaacaggctcttcactgggtggcagagaccctgaagattgcattagccctggccagcagactgggagatcccgtctatgattctaccatcactgagagcatggatgacatgctcagcaaggtggaggccgcctacctccggggccatatcaatgactcccaggcagcccctgaccccactccggcctgtctatgaactagacggagctcccgcggctgcccaggtgctgttcatgggccctgatgacttcattgtgcccatggttagctccctgaaccagccctttggcagcggccttatcaccccctcggggatcctgctcaacagccagatgctggacttctcctggcccaaccggacagctaacctctctgcacccagcctggagaattcagtgcagccagggaagcggccactctctttcctgctgcccacagtggtccgacccgcggaggggctctgtggaacctacctcgctctgggggccaatggagctgcgcggggcctcagcggcctgacacaggtgaggtttacgccatggttggcctttttcagccgggagccaagctgtggcctagactgcagatgcctgtcatagcagtccaacctcctgcaggtggacagtgagtgcagagcagagacctcgtggggcgggcacagggacaggtagagaaaggactcctcccaagggtgcccatgggtccatggcagccgaaggaccaacaacttcatcatcgctgttaaggaccctcggagcccagatgcagctggagccaccatcctgtagagcagcggggtggggcggggtctctgctcccccactttgcatgttcccagagtccctccttctcccaggtttggtctcagggggaccccagggatgccccagatcaggggccagaggggatgcttagcatacccaatcccagagtaactggaaaattctccatcaggatgcctgaggtggtggcggagatgctactctatgcttgaatgtcctacatgacataagttctgccgacctttgagttccagtcattccaccttttattggagcgtagtagattgtagtcttactgggctgttgttctgagagttattagactgagtattatatttggtactgtttagttgatacgtgtctctcctg

SEQ ID NO: 1489 - DNA, 362 bp, Homo sapiens
  misc_feature (1)...(362): n = a,t,c or g
tttttttttttttttttcacgcacacagtctggtttattggctcatcatacacacacacatcaaatatgtacacaaacataaatattccaatgtacaaagtttacatgggactcacagatcacccctcgtctctttcatccagcacccccaacttggtgccgtcctcttcctgtttcaggatgaaggcgtgtgaggggctggcactangaggcagggatctggaggagggagaggtcctgctcccctctcctcacaggcacctccgaagggtcctgtcccttttcaatggcaccttagggcagagggctaaatccctcatccctgcttctccatctctgtgtctgttcccacagtgcccctc

SEQ ID NO: 1490 - DNA, 1836 bp, Homo sapiens
  SIMILAR (506)..(321): 901254mologous to Homo sapiens Human PRO1555 protein sequence SEQ ID NO:49,accession number AAB24037,Smith-Waterman Score=286.
atgggactggccatgtttgcagtgccccctggccataccacgccagctggtgccccccactcggccagcagcgcatccctgcactctgagcgccccctcagcagctcggcctgggctggcccgcgccctgaggggctgcaccagcgctcctgctccgtttccagcgccgaccagtggagtgaggccaccacttccctgcccccaggcatgcagcaccctgtcctcccagctgacatcaagcttagggagggtcaggattctgaacttgagcagaaaacagctgtttgtgctgctcaggcatccttggctggggaaaagggaaggctgggggtctctgcccctggggcctcccctctcatgctgtcggtagctgccaacgctgcgctgggctgggatggcgttggggtccctgacggctggggcagtgggtccccgccctcagccgtgtgcgtccagacccaggcaagggccagcaccagacggcaggctagcaccgtgacccggacgcactttgagatgcgccccccttggagccctccaggagctgagaatcagaagagatcctgtggggagagcagctggccggcggccccccagcagttcgcgctctccaactccgcggccatccgggccgagatccagcgcttcgagtccgtgcaccccaatatctacgccatctacgacctgatcgagcgcatcgaggatttggcgctgcagaaccagatccgggagcacgtcatctccatcgagtgggcgcgaaggtggtgtcgcctgggggggccgggaccagatctgtccaggcctggccggggacaggtgggcgcggcaaagtggctttcatgctggggaccttctggaattccctcgcagcagctggccggcggccccccagcagttcgcgctctccaactccgcggccatccgggcgagatccagcgcttcgagtccgtgcatcccaatatctactccatctacgacctgatcgagcgcatcgaggatttggcgctgcagaaccagatccgggagcacgtcaactccatcgagggtaagcggaccgggggctgcgggaacgggccgcagtggcctctccggcgccggccgagggctccacaggccgtgctggccatgctctccctgtcgggggtccttgcgcgcttgaggaccaggccacgaggtttgccgatctgtgttgcagaaccggcgggcagcttcgccatatctcgttcggggacactttggggttgggggtattatgctgactgtgttccagggcgcgaaggtggtgtcgcctgggggggccgggaccagatctgtccaggcctggccggggaagaggcagaggagtcgtttgaatttgtggtggtgtccctcactgggcagacgtggcacttcgaggcttcaacggcggaggagcgggactcgtgggttcagagtgtgcaggcccagatccttgccagcctgcaaggtgcctgcagtgccaaggacaaggtggttattagcgttggtgaagacggcttcttcctgtatgggatgcatgttccccccacaatggaagtaccagcagaggggcccttcccaggcagatctgatatcatcgcactgtggtggaattcgcacattgcccagggctcgtctgctacgcccattgccctggcgatctgcaaggagtccaggaaacaggacaaggagtccagaaaacaggacaaggagtccaggatggggacagggaggagttccggggagtggaaagagaaacggtgtggggagggtgaagaggatggccaggaatgccggtacctgctcctgacactggcgagacaattttcggaggcctga

SEQ ID NO: 1491 - DNA, 4164 bp, Homo sapiens
  SIMILAR (3333)..(67): 611254mologous to Oryctolagus cuniculus nitric oxide synthase,accession number U91584,Smith-Waterman Score=3564.
tcaggggctgttggtgtctgagccgggagggtcgaacgcccagggcactgcgccccgcaactgacgctcctgcaaggaaaagctctgggtgcgtatgcggcttgtcacctcctgggtgcgcagcgtgagcccgaaaatgtcttcgtggtagcgttgctgatcccgcagcacgccgatgacgtcgccggcctcgtccagctccatgtcgccctccgtcgccaggatgcgctgcacggtctgcaggacgttggttgccatggtaacatcgccgcagacaaacatgtggccccgctcgaggcacagcacgcggtgcacctccgcagccagctccgtcctcaggatgtcctgcacgtaggtcttggggttgtcaggttcccgggagaaggcggtgaggactcggccaaacaccccgcgctgctgggcgttctgcacctcgtcgcggtagagatggtcaagttgggagcatcggcagccgaacaccaaagtcatgggagtgggctgcagccctttgctctcaatgtcatgcagccgctcctgccagaatccccggaagggggcaatgccagtgcctggacccaccaggatgcagggcaagctgggatcgggtggcagccggaaggagggagccccccggatgaagcagggcacagggtctccgggcttgagctggcttagccacgtggagcagactccatagtgcagggggcccagcccatcctgagtcctgtatgccagcacagctacagtgaggtggatctctcctgggtgggtgctgggtgccgagctgactgagtagtaccggggctggagcagaggcagctgggtgaggagcagtggggcaggcagcgccaccgacgggaactgctccagcacctccagcagcgtggggcagcggaaccacttccactcctcgtagcgtcggggatcctggctgagggcctccagctcctgctgttccctgggctcttctgccaaggtgctgagcagccgcaagagctgagggctgggtggggaggtgatgtccaggaagaaggtgagagcctggcgcagcgtgcacgggggcagccgggggtcccgcacccagccggggggagggccaccagggctgcccttctccagctgctctactgccacgggctcagtgggcgccggcgggtcctccacgcggctcagcagcgcctccacaaggccgggccggttgggcgggcagacacctatgtggtcccccggctggtactgcagcccctcctggcctccggtgtccaggcgcaccaggatggtggccctcgtggacttgctgctttgcaggttttccactgagcggattgtagcctggaacatcttccgcctgtgcacgtggatcagacctggcagcaactgcaggccctcggcctgggcgctcagccggtacctctggcgcttccagctccgtttggggctgaagatgtctcgggcggcggccttggcatcctctcccacacagaaggtctcacaggcggcctggaaggcagcctgggcccagcctcggaaggcctcctcctggccgcacagctcgtcgccctggcccagctgcagcagccgctccccgcccagttcctccagccgtgtgtccacggcacgagcaaaggcgcagaagtgggggtatgcccgggagccgagcccgaacacacagaacctgagggtgcccagggcccctgcactgtctgtgttactggactccttcctcttccgccgccaagaggacaccagtgggtctgagcaggagatgctgttgaagcggatcttataactcttgtgctgttccggccgaggggagctgttgtaggggccggacatctccatcagggcagctgcaaagctctctccattctccgggggatccccattcccaaatgtgctggttaccaccagcaccagcgtctcgtgttcgagggacaccacgtcatactcatccatacacaggacccggggatcaaaagccttccggaagagtctccccagctgctgtgcgtagctctgggcccggccggtctcggagccatacaggattgtcgccttcactcgcttcgccatcaccgtgcccatgagcgaggcggagatcttcacggcgttggccacttctttaaaggtcttcttcctggtgatgccggtgcccttggcggcactccccttccaggggtctggctggtagcggaaggccggggacaggaaatagttgaccatctcctgatggaaaacaggagtgaggctgcccgagatggggggcacgatccaggcccagtctgcagggcagccccccctggccttctgctcattctccaggtgcttcatgaaagaggccgtggcggcgtggtggtccacgatggtgactttggctagctggtaactgtgcagcacggccacgttgatttccactgctgccttgtctttccacagggacgaggtggtccgggtatccaggtccatgcagacagccacatcctccaggatgttgtagcggtgagggtcacacaggttcctcgtgccgatctcagtgctcatgtaccagccactgaagggggctgcggggaactccaggcccccaatttccagcagcatgttggacactgccgggagggcgtaccagcgcaggcccagggctgcaaaccactccagcgtggggtgctccaggggcacctcaaggaccagctcggggggcagaaggaagagttctgggggatcatctggggcctgcagcagcaggggcagcacgtcgaagcgaccgtttcctggggtccagccgtgctgaatgcagagctcggtgatctccacgttggctgggtccccccgcacagagccatcctgctgccggtagcccgcgtagcgcaccagctggctgttccagattcggaagtctcctcggccagggcagcgctgcgggaacactgtgatggccgagcgaaggttgccccggttggtggcatacttgatgtggttgcagatgtaggtgaacatttcctgtgcagacctgcagtcccgggcatcgaacacctgcagcttcccccactggatccggcccacgcagcggggagcgttgcgccaggcctgcttagccccgaacaccagctcgctctccctaagctggtaggtgcctgtggctgccacctcggcttccacctcttgaagccgctgttcgtgggcctgggagccgctcctcttaatggagctgtagtactggttgatgaagtcccgggcctgactcagcagctgctcaggggccggggggccgggggagggccggccctgtagtttccgtggaaataccagggagcccaggcagcgtcttggggtgcagggcccatctgcccctcgtagcgggcaacccggccgccgtgtgatggatccaactccgcggccatccgggccgagatccagcgcttcgagtccgtgcatcccaatatctacgccatctacgacctgatcgagcgcatcgaggatttggcgctgcagaaccagatccgggagcacgtcatctccatcgagggtgagcggagccgggggctgcgggagccggggcgcagtggcctctccggcgccggccgagggctccacaggccgtgcctggccatgctctccctgtcgggggtccttgcgcgcttgaggaccaggccacgaggtttgccgatctgtgttgcagaaccggcgggcagcttcgccatatctcgttcggggacactttggggttgggggttttctgctgactgtgttccagggcgcgaaggtggtgtcgcttgggggggccgggaccagatctgtccaggcctggccggggaaggtgggcgcggcagagggcttcagggggatccgcggctcctcggtctggaggcagctgctgggcacgcgggtgctgaccgaccgccagggacaccgcacccggagtcgggaccggaaacccccggccactgcgctgcctagcgctattttctctgggcccttaggccctgactttcgaccgctgagggcacaggaagtggtggcacgctgctggcagatgcctcgcaagccctgcagtgagcgctccctgacagcttgggtttcctggctgagtcctggggttttagtgtttgtgtctgtttctgttcgtcctgtgacttgatcctggaggactggcatgatggtccccat

SEQ ID NO: 1492 - DNA, 975 bp, Homo sapiens
  SIMILAR (645)..(4): 621254mologous to Mus musculus putative,accession number AK008109,Smith-Waterman Score=648.
ctacgggcggtacatggcaaaggccaggagactgaggagcagggtgaagccggccaggcccagagtggcggtcaggggaaagaagggccggtactggatctggcagtaccagagcagcagcaacagcaggagcagcaggggcagcagcaggctgccgatttccagcccggaggggccgggctcggaccccggcgggcaggggggatttgggggaccgactctcgtggacacgtggcagtggagaacgcagttgggagggaggtgaaggctgcccagggtctgggtgtcgtcgcctagcagctgcccttggtagatgagtcgcacctgctgttcccggccgggaaactgggtccggccctggcctgggaggggccgtctgccaggggaacaagtacagttgtgatctggggcgctcagcgcctccagtataaaggagggctgggtcttaggtgtctctgggggccttctgcgaccactctcccaacccctgtctttagcattgctcctgcctcttgacctacttacctgctctgaatcattgaggaatttcagccgtagcacgaggggctcctgcggggagtccggggctggcggtgttgctgtgaaccccgtgctgggctctggctgtgcagcttgacctctgtgtctcaggctgggggtctctgcccctggggcctcccctctcatgctgtcggtagctgccatggctgcgctgggctgggatggcgttggggtccctgacggctggggcagtgggtccccgccctcagcggtgtgcgttgagacccaggcaagggccagcaccagaaggcaggcaagcaccgagaaaaggacggtcacctcatcacccaccccttcaatcagggtcatggcgcctgccttgcccgccgcgctaccgagcttcccgccccccgaagccgcagagggcacggcgatcccggcccgaccgggcccgcccggctcccccagctccat

SEQ ID NO: 1493 - DNA, 801 bp, Homo sapiens
  SIMILAR (532)..(795): 891254mologous to Homo sapiens SLNAC1,accession number A82597,Smith-Waterman Score=404.
gcggccgcttctcatctgagagcagtcccagggcccggcccgcctccggccccgcacagggggcatgtccagaggtgctgtgtgtcaccaactggtcttctaatttggaaggagttggaaaggcctttttgttgatgaaaagttggaaacagtggcacatatctgcaaatatcgaaagaataaagattttggcaagttatactcaagccccgcacaagtcggtcagcaccggtgagggcagagacccaggcgcctggggagcggcggcagcgggatgaagaggaggaggaggaggaggagaaggacgaggaagaggagaaggacaaggaggaggaggagaaggaggaggaccaggaggaggaggaggcggcggcggcggcgggcggcagcggcacctgctgggcagacacaggccaagcgtccacctcagcacggaatgggttcttgaaaggagtgggagaacccacagctgcttcttgccagcagtgggcaccaggcggtggccagcccacatttgaggccattcttgtcctcagggagaacgtgctggccctggacatcttctttgaggccctcaactatgagaccgtggagcagaagaaggcctatgagatgtcagagctgcttggtgacattgggggccagatggggctgttcatcggggccagcctgctcaccatcctcgagatcctagactacctctgtgaggtgttccgagacaaggtcctgggatatttctggaaccgacagcactccccaaggcacttcagccggacactggctgaaaccggtctactgtag

SEQ ID NO: 1494 - DNA, 499 bp, Homo sapiens
  SIMILAR (100)..(23): 651254mologous to Homo sapiens Human myelin oligodendrocyte glycoprotein gene,accession number AAZ29204,Smith-Waterman Score= 101.
tttttgagatggagtctcgctctgtcacccagtctggagtgcagtggtgcgatctcagctcaccgcaaccttgcctcccgggttcaacaaatctccctgccctcaacctcccgagtagctagcactgtagggatggccactgcgcctggcctaaacttttgtattttcagtagggaagggtgagtcaagcatgttggcccaggctgtcttgaactccctgacctcaagtgatccactccccttggtctccccaaagttaagggattacaggcctgagccactgtgcctggcctaaaatttttcatttttcatgtaaattaaagctaataagggccagttttattctctaaccaagaccttttaagttaaattgatctttaactacacacacacacccctggcccaaggggtacagttctactttctactagtagtaactctccttttccactttaattttgaggaaaattatttacacagctgacccttgaacacaggt

SEQ ID NO: 1495 - DNA, 1734 bp, Homo sapiens
  SIMILAR (338)..(556): 591254mologous to Drosophila melanogaster Centaurin Gamma 1A,accession number AF254741,Smith-Waterman Score=198.
  misc_feature (1)...(1734): n = a,t,c or g
cacagatctgaagcggtgcacctactatgagacgtgcgcgacctacgggctcaatgtggagcgtgtcttccaggacgtgggtataattgactctgctgtcccctgcagtggcccagaaggtagtggccttgcgaaagaagcagcaactggccatcgggcctgcaagtcactgcccaaactcgcccaagcaactgggccgtgtccgccgcctccatcccggccgtgcacatcaacccaggccacgaaatggcggcggcaaggccttcagcgactactcgtcctcagtcccctccacccccagcatcagccagcgggagctgcggcatcgagaccatcgctgcctcctccacccccacacccatccgaaagcagttccaagcggcgttccaacatcttcacgtctcggaagggtgctgacctggaccgggagaagaaggctgccgagtgcaaggtggacagcatcgggagcggccgcgccatccccatcaagcaggggatcctgctaaagcggagcggcaagtccctgaacaaggagtggaagaagaagtatgtgaccgctctgtgacaacgggctgctcacctatcaccccagcctgcatgattacatgcagaacatccacggcaaggagattgacctgctgcggacaacggtgaaagtgccagggaagcgcctgccccgagccacacctgccacagccccgggcaccagcccccgtgccaacgggctgtccgtggagcggagtaacacacagctgggtgggggcaacagaggcagaggagtcgtttgaatttgtgggtgggtgtccctcactggggcagacgtgggcactttcgagggtttcaacgggcggagggagcgggagctgttggggtttcagagtgtgcaggcccagatccttgccagcctgcaaggctgcctgcagtgccaaggacaagacttcgacttggggaaccagaacgcagctctggctgtgcaggccgtccgcaccgtccgcggcaacagcttttgtatcgactgcgatgcacccaatccagactgggccagcctgaacctgggtgccctgatgtgcattgagtgctcaggcatccaccgacacctgggggctcacctgtcccgggtgcgctcccttgacctcgatgactggccgcctgagctgctggctgtcatgactgccatgggcaatgccctcgccaacagcgtctgggagggggccttgggtggctactccaagccagggcctgatgcctgcagagaggagaaggaacgctggatacgggccaagtatgaacagaagctcttcctggccccactgccaagctcagatgtgccactgnggcagcagctgctccgggccgtggtggaagatgacctgcggctgttggtgatgctcctggcacatggctccaaagaggaggtgaatgagacctatggggacggggacgggcggacggctctacatctctccagtgccatggccaacgttgtcttcacgcagctgctcatctgggtgagtcacgtgcctctagcctgccctgacctcgctcttcttagccttgttctttgaaagcaacctcttctttcctcccctacaaccaatctctctcctcccatgtcttgccaactgtcaacatgtgttttctcctacagtacggggtggacgtgaggagccgggacgcccggggcctgactccactggcatatgctcgccgggccggcagccaggagtgtgcaga

SEQ ID NO: 1496 - DNA, 3816 bp, Homo sapiens
  SIMILAR (586)..(1848): 351254mologous to Drosophila melanogaster Centaurin Gamma 1A,accession number AF254741,Smith-Waterman Score=431.
  misc_feature (1)...(3816): n = a,t,c or g
tcctcccagctgacatcaagcttagggagggtcaggattctgaacttgagcagaaaacagctgtttgtgctgctcaggcatccttggctggggaaaagggaaggctgggggtctctgcccctggggcctcccctctcatgctgtcggtagctgccaacgctgcgctgggctgggatggcgttggggtccctgacggctggggcagtgggtccccgccctcagccgtgtgcgtccagacccaggcaagggccagcaccagacggcaggctagcaccgtgacccggacgcactttgagatgcgccccccttggagccctccaggagctgagaatcagaagagatcctgtggggagagcagctggccggcgggcccccccagcagttcgcgctctccaactccgcggccatccgggccgagatccagcgcttcgagtccgtgcatcccaatatctacgccatctacgacctgatcgagcgcatcgaggatttggcgctgcagaaccagatccgggagcacgtcatctccatcgaggactcgtttgtgaacagccagggagtggacgctgagccgctccgtaccggagcttaaaagtgggcatagtggggaacctgtctagccgggaagtcagcccctggtgcaccgctatctgaccgggggacctattgtccaaggaggaagtcccctgaaggggggcgggttaagaagcgagattgcggcggatggccatagttacctgctgctgatccgagatgaaggaggcccccggtgagctccagtatgctgcctggggtggatgcaatggtgttttgtggtcaccctgtgaggatggaattacattttcaaagacggtgtacaactacttcctgcgtctctgcagcttccgcaacgccagcgaggtgcccatggtgcttgtgggcacgcaggatgccatcagcgctgcgaaatccccgggttatcgacgacagcagagcccggcaagctctccacagatctgaagcggtgcacctactatgagacgttgcgcgacctacgggcttcaatgtgggagcgtgtctttccagggacgtggcccagaaggtagttggcctttgcgaaagaagcagcaactgggccatcgggccctgcaagtcactgcccaacttcgcccagccacttcggccgtgtccgccgcctccattcccggccgtgcancaatcaaccagcatcagccagcgggagtgcgcatcgagaccatcgctgcctcctccacccccacacccatccgaaagcagtccaagcggcgctccaacatcttcacggtgccgctgccgcccgccgccgccgccgcctcctcctcctcctggtcctcctccttctcctcctcctccttgtccttctcctcttcctcgtccttctcctcctcctcctcctcctcttcatcccgctgccgccgctccccaggcgcctgggtctctgccctcaccggtgctgaccgactttctcggaagggtgctgacctggaccgggagaagaaggctgccgagtgcaaggtggacagcatcgggagcggccgcgccatccccatcaagcaggggatcctgctaaagcggagcggcaagtccctgaacaaggagtggaagaagaagtatgtgacgctctgtgacaacgggctgctcacctatcaccccagcctgcatgattacatgcagaacatccacggcaaggagattgacctgctgcggacaacggtgaaagtgccagggaagcgcctgccccgagccacacctgccacagccccgggcaccagcccccgtgccaacgggctgtccgtggagcggagtaacacacagctgggtgggggcacaggccccatgctcttccagggtccgtccttccacacccgtttccctcgcttccagagcccctggctcccgattgctttcccccaagacttcagtatccccagtgttgtcctagaccattggatctcatgttccctgggcccagtaacagctgccctgctggtgccattcctgtgccctgtcccagcagtcagcgcttggcagcacaggtctgcagctggcgcccacacgcaggagctcgcggacggtgcccacccagcccgcgtcccgctgccgcatgccgacgccgacaccgaccctcgtgccccccactcggccagcagcgcatccctgcactctgagcgccccctcagcagctcggcctgggctggcccgcgccctgaggggctgcaccagcgctcctgctccgtttccagcgccgaccagtggagtgaggccaccacttccctgcccccaggcatgcagcaccctgccagtggcccagctgaggtactcagttccagccccaagctggatcctcccccatctccccactccaaccggaagaagcaccggaggaaaaagagcaccgggaccccccgaccagacggccccagcagtgctactgaagaggcagaggagtcgtttgaatttgtggtggtgtccctcactgggcagacgtggcacttcgaggcttcaacggcggaggagcgggagctgtgggttcagagtgtgcaggcccagatccttgccagcctgcaaggctgccgcagtgccaaggacaagactcgactggggaaccagaacgcagctctggctgtgcaggccgtccgcaccgtccgcggcaacagcttttgtatcgactgcgatgcacccaatccagactgggccagcctgaacctgggtgccctgatgtgcattgagtgctcaggcatccaccgacacctgggggctcacctgtcccgggcgcctcacaacaacgggccctttctgagcgttatcagcagagaggagaaggaacgctggatacgggccaagtatgaacagaagctcttcctggccccactgccaagctcagatgtgccactggggcagcagctgctccgggccgtggtggaaagaatgaactgcggctgttggtgatgctccctggcacatggctccaaagaggaggtgaatgagacctatggggacggggacgggcggacggctctacatctctccagtgccatggccaacgttgtcttcacgcaacttgtcattctggaccgggtggaactgaggaaccccggacgcccggggcctgactccactggcatatgcctcgccgggccggcagccaggagtgtgcagacatcttgaatccagcatggctgccctggggagggctgtggcttagcgcctacccccaacagagagcctgccaatggcaccaacccctctgctgagctgcaccgtagtcctagcctcctataaggcccaggaagagggcagaggggccagaaggactccatggcccaaagaccctccctccctgcaggcactgtgggaacagacacagagatggagaagcagggacatgctgagaggacgaagccaaggaaatttaggggaggagagtcaaagggatcaaggagagttggggatttgagctgcagccatagagggatgagggatttaagccctctgccctaaggtgccattgaaaagggacaggacccttcggaggtgcctgtgaggagaggggagcaggacctctccctcctccagatccctgcctcctagtgccagcccctcacacgccttcatcctgaaacaggaagaggacggcaccaagttgggggtgctggatgaaagagacgaggggtgatctgtgagtcccatgtaaactttgtacattggaatatttatgtttgtgtacatatttgatgtgtgtgtgtatgatgagccaataaaccagactgtgtgcgtggcagacagaaaaaaaaaaaaaaa

SEQ ID NO: 1497 - DNA, 1117 bp, Homo sapiens
  SIMILAR (678)..(767): 631254mologous to Homo sapiens Human secreted protein sequence encoded by gene 112 SEQ ID NO:282,accession number AAB56188,Smith-Waterman Score=84.
aaatgttctatgtgaacagtggccccaaaattatgcaaagtagagaccctgtacccatcaacccctacctattcctgcatccagagataactcttaccaacagttgggtctatgttcctccatactttctatacccatataaacatgccacaattctgccacatccctactgacagacatctatttggtttccaactgttcactattaaaaacaatgaggctctgagcctctgtggacatttatagctgcacacttctacaagtatttctgttggctagattcatagaagcggagttgctggctaagcatctgcacatcgcatattttgatgagtactgccaaagtgccctacaaaaaggctgcaatgatttatattcccacccccagagtatgaaacatacagacaactttgaaaggtacatttcacataaaccactaaatacattcaagggcagacggggcgagtccccattcattccacatctacctgaactctgtgtacctatatattaataagtgaagtcatttcattacctgggacagcattcatccagaggaaaggtctggggctcagaccgtcacagaacaatgcctactcacttagtcaaacatctcccggcctaattatttttcttagggtacagggaaaatttgatttgaatttagcccttgttctttttttttccggggggacagagtctcgctctattgcccatgctggagtgcagtggcatgacctcggctcactgcaacctccgcttcctgggttcaagctattctcctgcctcagcctcctgagtagctgggactacaggtgcctgccaccacgcccagctaatttttttagtatttttagtagagaaagggtttcaccgtgttagccgggatggtctccatctcctgacctcgtgatccgtccacctcagcctcccaaagcgctgggattacaggcatgagccaccgcgtccggccctcattttttattttcaattgaattagaattcaaatcaaagcataattctacttgattatagctcttgtgaaaagattcttagggaaaagaataacatgaacgttaggatggcctttggtttgtagattggattttcatgaatt

SEQ ID NO: 1498 - DNA, 1079 bp, Homo sapiens
  SIMILAR (172)..(462): 461254mologous to Xenopus laevis cytoplasmic myosin II regulatory light chain,accession number U31118,Smith-Waterman Score =151.
acagtctgctggaattcgcggcagcgaggggctcggagaggtgctcggattctcgtagctgtgccggcccacaatgattctgagctaaaacacaaaataaaaaccagattcattgccaccagcgctcacctcgcctgacttaaaaaaaaggacttaaccaccaccatgtcgagcaaaacaacaccagaccaagaccaagaagcggccctcagcgtgcaacatccaatgtgtttgctatgtttgacccagtcacagattcaggagttcaaagaggccttcaacatgattgatccagaccaagatgggtttcatcgaccagggaagatttgcatgatatgcttgcttcattgggggaagaatccaacttgatggagtatcttagatgccatgatgatgagggctccaggccccccatccaatttcaccccatggttccctcaccatggttttggtgaggaagtttaaatggccaccagatccctgaagatgtccatcggaaaatgccctttgcttgctttgaatgaaagaagccactgggcaccatacggggaagattacttgaagagagctgctgacaacccatggggggatcggttttacagatgaggaagtggatgagctgtacagagaagcaccctattgaccaaaaagggggaatttcaattacatccgagttcacacgcatcctgaaaccatggagcccaaagacaaagatgactgaaataacttcaaattcccagccaaacgttccttggttggccacttttggggtattcctgagatttttctcttgcatggcccttaggctttagcagccttttgcaattccctgttggtatttattctcagccattttgggcatatgtatctttataatcagactggaaacgggactttctattaatatcattttcgagaataaaaaataggataatttaacctaccagcccttctcccccaataactggtgggtctatacagagtcaatatattttttcagagaaagttagttcggctcgattttttccggaatcataattaaactttatgataaaataaaaaaaaaaaaaaaaaagcgg

SEQ ID NO: 1499 - DNA, 5015 bp, Homo sapiens
  SIMILAR (2998)..(3240): 641254mologous to Homo sapiens Human myelin oligodendrocyte glycoprotein gene,accession number AAZ29204,Smith-Waterman Score= 258.
attcaccaagtttcacgcatctgctggcctccccctgtatttcctctaagccccagcctcagtttctctttctgcccacatactggccacacaattctcagccccctcctctccatctgtggtctgtgtgtatctttctctctgccctttttttttttttagacggagtctggctctgtcacccaggctagagtgcagtggcacgatcttggctcactgcaacctctgcctcttgggttcaagcgattctgctgcctcagtagctgggattacaggctcacaccaccacacccggctaatttttgtatttttagtagagacgagctttcaccatgttggccaggcaggtctcaaactcctgaccaagtgatccacccgccggcctcccaaagtgctgagattacaggcctgagccaccatgcccggcctctgcccctctttcttttttagggggcagggaaaggtctcaccctgtcacccgccatcacagctcactgcagcctccacctcctggactcaagtgataagtgatcctcccgcctcagcctttccagtagctgagactacaggcgcataccactaggattaatttgggggggggtggtgtgtgtggagaatggggtctggctttgttggccaggctgatgtggaattcctgggctcaagcgatactcccaccttggcctcctgagtagctgagactactggctagcaccaccacacccagctttttattattatttgtagagacaaggtctcaatatgttgcccaggctagtctcaaacccctgggctcaagagatcctccgccatcggcctcccaaagtgctgggattccaggcatggggctccgagcccggcctgcccaacttaataatacttgttcctcagagttgcaactccaaatgacctgagattggtgcctttattctaagctatttttattttttttctgctgtcattattctcccccttctctcctccagtcttatctgatatctgcctccttcccacccaccctgcaccccatcccacccctctgtctctccctgttctcctcaggagactctggcttcctgttttcctccacttctatcttttatctctccctcctacggtttcttttctttctccccggcctgcttgtttctcccccaacccccttcatctggatttcttccttctgccattcagtttggtttgagctctctgcttctccggttccctctgagctagctgtcccttcacccactgtgaactgggtttccctgcccaaccctcattctctttctttctttctttttttttttttgagacagagtcttgctctgttgcccagcctggagtgcagtggtgcaatcttggttcactgcaacctccacttcccagattcaagcaattctcctgcctcagcctccagagtagctgggattacaggcgtgtcccaccacacccgactaatttttgtatttttggtagagacaaggcttcggcattgttggccaggcaggtctcgaactcctgacctcaagtaatctgcctgcctcaccctcccaaagtgctgggattacaggcatgagccacctcacccggaccatccctcattctccatcctttcctccagttgtgatgtctacccctcatgtttcccaacaagcctactgggtgctgaatccaggctgggaagagaagggagcggctcttctgtcggagtctgcaccaggcccatgctgagacgagagctggcgctcagagaggggaagcttggatggaagcccaggagccgccggcactctcttcccctcccaccccctcagttctcagagacggggaggagggttcccaccaacgggggacaggctgagacttgagcttgtatctcctgggccagctgcaacatctgcttgtccctctgcccatcttggctcctgcacaccctgaacttggtgctttccctggcactgctctgatcacccacgtggaggcagcacccctcccctggagatgactcaccagggctgagtgaggaggggaagggtcagtgtgctcacaggcagggggcctggtctgctgggcctgctgctgattcaccgtatgtccaggagctggagcagcaccctctcagagcctcagtttccccagatgtcaatgagagaatcagcatcagccacatctcccacctgaagaatcgaaccttgagttctcacctttaagaattttttttttttttgagacagtgccttgctcagtcgaccacgctggagtgcagtagcacgatcatcaatcactgcagcctccaactcaagcaaccctcctgcctcaacctcctgagtagctggggccacaggcacccaccaccatgcctggctaattctttcttttttgagatggagtctcactctgtcgcccaggctggagtgcagtggcacgttctcagctcactgcaacttccgtctcctgggttcaagcaattctcctgcctcagcctcctgagtagctagaattacaggcgcacaccaccacaccaggctaatttttgtatttttagtagaaacgaggtttcaccacggtggtcaggttggtctcaaactcctgacatcaggtgatccacccgcctcggcctcccaaagcactgggattacaggagtgagccaccatgcctggccatattttaaacttttttgtagagatggggtcttactatgttgcccaggctgatctcaaactcttgggctcaagcagatcctcctgccaaagcttcccaaagtagttggattacaggtgtgagccaccacgccccaccaacctatgaagatgtctaagcagacagggtgccctacctcaccacatccccagtcagatccagaggtgggacaaggatgggaaggaggttccagaacaaaggctggcagggagtcgtatgggacaggagctgacccagcaaccatccacagagacatcctggagcctgggaaggagaaggacaaagagcccccttttttaaattttttttatgtttttgagacggagtctcactctgtcacccaagctggagtgcagtagcacaatcttggctcactgcaacctccacctcatgggttcaaacgactctcctgcctcagcctcctgagtagctgggaccacaggtgcacaccaccatgcctggataatttttgaatttttggtagagacggagtttcaccatgttggccaggcaggtctcgaactcctgacctcaagtgtccgcccaccttggcctcccaaagttctgggaatacaggcttgagccactgcaaccagccagtagcccccatctttgcccctcgctgagccctactggatgttcttggttatgcgacagtttccccatctattaaagagaaacccctatagcagaggggaggatgaggttggaaaagcaggagcattgttatgctattcttgtggggtctgggaagcagacatctgggtggatgtttggggggtgctgggcttagttggggaagtaggggggccccctggggcttacagggactggaagctctgagctggccagagggatgttgcaatcctgccagggtcttgtctatgctgtccttttcacaaccatccccctactgccaggctgacacgtggttgcgggggcacaaggccagccaacctagagtctgaggctaggcggaggacaccctccccaccagctgccagggtcactggcggtcaaaggcagctggtggggaaggcattggactccagccttgggggacggatgtagtgatggtgggaagcaggcttggtgccaggaggggcgtcagagggtgaataagagcagatagagtgtttgggggaggtagccaaccaaagggggtgaggcccggtggaagggaagaagggacatacacgcagagctttgcagctgagggttttaattttttgagatggggtctctgtcccaccaggctggagtgcagtggcacaatcacagctcactgcagcctcgaactcctgggctcaagcaatcttcctacctcagcctcttgagtagctgggactacagcatgcgccaccacgctcggctaatttttgaattttttgtagagatgaggtctccctatattgcccaggctggtctcgaactcccacgctcaagtgatcctccctcttcagcttcccaaagtgctgggattacatgcatgatccaccatgcctggctaatgcaggtgaggtttttgcagtgtcatccagctaaggcgacccgttcccctcccaaaaaagggagactgagaaccatgaagttaagagcccagagaatatcacggtggtctggggtgcttcaagggctggtctggaataaattggaggtggcacgcagggtaggagcgccgggccaactgggagacccagcaacataaaggaaaagttgttggggctgaggaggcttgctgagagaggggaagtgagggaaagaggtgatctagggacacggtgtgaatgagggggggatgagatcacagggttattactgggagacccctgagggaaggtggccacagggacaggacaaggctgtcttcttaagggaggagaccacccctcatattgtcttatgcccaatttctgcctccaaagaaagaaaaagtaaaaactaaaaggcagaaatgaaatccacaagcagacaccccaggtgccacaccctgggcctggtggttaaagattgacccctgacctaatccgttaggttatctatagattacagacattgtatagaaaagcactgtgaaaatccctattctgttttgttccgatctaattactggttgcatgcagccttcagtcacttatctccctgcttgcttcaatcgatcacgaccctctcatgcaaacccccttagagttgtaagcccttaagagggataggaattgctcactcagggagctcagttttttttatcgtgattcttgccaatgctcccggccgaataaagcctttccttctttaaaaaaaaaaaaaaaaa

SEQ ID NO: 1500 - DNA, 1037 bp, Homo sapiens
  SIMILAR (854)..(976): 1001254mologous to Homo sapiens Human secreted protein, SEQ ID NO: 7507,accession number AAG03426,Smith-Waterman Score=209.
  misc_feature (1)...(1037): n = a,t,c or g
gatggtcttgatctcctgaccttgtgatccaccagcctcagccccaacaaagtgctgggattacaggcgtgagccactgtgcccggccaagaatttttttatcgataacatagtgagctctctgcctcttcggaacgatgtccactttgcttatgatcaacccaagcaggactcttctctccctgggacgcctctcccctgggtctgggaatcttccagttctgccagaattggccttttcccaggatgttggcaaactttccagttggaaccccttttttctgtgtgggccctgggggtttgcggaggaccaaaatccatggagtttttgtggttaccctaggaccttttgggaagggtgaggagcagggccctggaggaaaagggcagccacctcctctccctggggtggaacccttgccaccctgattccttcaccagaattgttcagtgggccttttcaccacagtgggttcctttctggcctggaggccctggcactgttcccaggaccacacaggaagtctgggtcaactctgggcgcctggggatggtcaccgaagnaggaagcacgctgtccccgtctcttcctggcttctgcccagaaaattcgaacaagtgcaaatttaacacactgttaactgccgaaagcttgaaactcccccaggacttgtcctttgatccttcccagaaacccacccaggtccggcacttgggagcccccccggagagggacctccccagccgagcccctcaaaagaactcccatgaaatcagggaattgtttgatggaaatgtatcttcttgtaactggggaggatgaaggcccaaacacccacacttttgtttttccccagggctcgggatgtctccagcagcccggccacgcagcttcccaggtgggctcggggaggtgggagcagggaccatctctgtcccctccaccctcactccatccacctcggagaccaccctcccccagcccagatacggaatgaaacttgcagacgcagacgtcggaaaaaaaaaaaaaaaaa

SEQ ID NO: 1501 - DNA, 956 bp, Homo sapiens
  SIMILAR (748)..(290): 441254mologous to Homo sapiens T3 gamma precursor (aa -22 to 160),accession number X04145,Smith-Waterman Score=195.
ttttttgttatttgatcttttcattcttcttttacaattttccccaataggtggcgcttctgaaacacagtatttgtttttatttttattttatttgagaaacccccaaatttgctctgatggcctttcttctccatttgtcatctctgggaaccttgagtctagatttagggctgaaagtctctctgctaggggctttccaaaatgcattgctttgattctgggaactgaataggaggagaacacctgggactactctgagtcctgagttcaattcctcctcaactgggtttccttgaaggtggctgtactgggtcatcttcctcggatccttgaggggctgggtaggagctgggtcattggggcaacagagtctgcttgtctgaagctctcggactggcggaactccatccctgtccaggcaatgaagtaggaccccaaaggcaaggacgaaaaaggctgacggttttcagccaaagaggaaagccagatatggtggctgcatttaagttcaaatgcaagttcctgaacacattcctgtaaataacacttgggaagtggttttggacttgttcctgtgatccctttaacactgatacatcccctcgagggtcccttggcattacttccccagattcccatttttttttatcttcagttaggaagccgatcatcttcccatctttaaaccatgttgatagttttgggcttctgcatcacaagtcagaagtaccgaaccatcttcttgaccagtcatacaccttaaccaagtggtttcctttgattgactgggccaaagtaccttgaagaagaatgatagccaggatgaggacagccaggccctaaccctgaatacatgtcagtctctgtcctccggcaaaagcgtggagcagcccttagcagccagccagccagccagcctgtgcagcagctagactggcgtcgacgcggccgcg

SEQ ID NO: 1502 - DNA, 532 bp, Homo sapiens
ggacaagggctatggccaagcagagggtcctgtttaattccttaagcaaatattgattacatgcttatcatacaccaggtactgtggtaaggttttgtcctatggggtcgaagttagatattgaaatatatgtctataatcactgtgatatgctgagggaagaaagattccaaatgctattggagcctggaagaagggcaggtgagccagtgatcagggaagattccagagaaggtgggatttgacctgagactgaaagatgggtatgagtttacctggtggataggggaaggcattttagaaagcatgtgcaaaatagaaacagtatatttgaggactcctaaatagagtatgatggacagggggtaagaagaaagcaggttggatgccaaagaaagagaggtgaagctggcacagtagtgcatgcctgtaatcccagctactcaggaggctgagacaggaaaattgcttgagcccaggagttccagatcagcctgggagacatagcaagaccctgtctcttaaaaaaaaa

SEQ ID NO: 1503 - DNA, 574 bp, Homo sapiens
  SIMILAR (65)..(355): 981254mologous to Homo sapiens tumor protein (AA 1 - 172),accession number X16064,Smith-Waterman Score=493.
  misc_feature (1)...(574): n = a,t,c or g
gctcgctcgagntttcaggctcgtgtaaagctagcgccgtcgtcgtctcccttcagtcgccatcatgattatctacggggacctcatcagccacgatgagatgttctccgacatctacaagatccgggagatcgcggacgggttgtgcctggaggtggaggggaagatggtcagtaggacagaaggtaacattgatgactcgctcattggtggaaatgcctccgctgaaggccccgagggcgaaggtaccgaaagcacagtaatcactggtgtcgatattgtcatgaaccatcacctgcaggaaacaagtttcacaaaagaagcctacaagaagtacatcaaagattacatgaaatgttaacaaatgtggcaattattttggatctatcacctgtcatcataactggcttctgcttgtcatccacacaacaccaggacttaagacaaatgggactgatgtcatcttgagctcttcatttattttgactgtgatttatttggagtggaggcattgtttttaagaaaaacatgtcatgtaggttgtctaaaaataaaatgcatttaaactcaaaaa

SEQ ID NO: 1504 - DNA, 675 bp, Homo sapiens
  SIMILAR (102)..(485): 981254mologous to Homo sapiens tumor protein (AA 1 - 172),accession number X16064,Smith-Waterman Score=644.
  misc_feature (1)...(675): n = a,t,c or g
cgtccgcccacgcgtccggccgctccggctgcaccgcgctcgctccgagtttcaggctcgtgctaagctagcgccgtcgtcgtctcccttcagtcgccatcatgattatctaccgggacctcatcagccacgatgagatgttctccgacatctacaagatccgggagatcgcggacgggttgtgcctggaggtggaggggaagatggtcagtaggacagaaggtaacattgatgactcgctcattggtggaaatgcctccgctgaaggccccgagggcgaaggtaccgaaagcacagtaatcactggtgtcgatattgtcatgaaccatcacctgcaggaaacaagtttcacaaaagaagcctacaagaagtacatcaaagattacatgaaatcaatcaaagggaaacttgaagaacagagaccaganagagtaanaccttttatgacaggggctgcagaacaaatcaagcacatccttgctaattcanaaactaccagttcttattggtgaaacatgaatcagatgcatggntgtctatggactaccggaggatgtggacccataatgatttcttanggatgttanaaaggaanatgtaacaanggtgcattatttggactatactgcatatactggtttgctgtctccccacaccgggcttagacaatggatg

SEQ ID NO: 1505 - DNA, 743 bp, Homo sapiens
  SIMILAR (98)..(3): 871254mologous to Homo sapiens Human colon cancer antigen protein sequence SEQ ID NO:789,accession number AAB53249,Smith- Waterman Score=134.
aggtttttttttttttttttttttttttttttttttttttttttttttttttttttttttttttttttttttttttttttggaaacagagagacatttaatgcttcaaaaactggggtaaggaatggaaagagtactgtgggaaaaacaaaacaaacaaaaggaaatcattgaaaatgcaaactttacctggagcaattataattttctctaccagtaataagaataagaacatcatgattctcaactggaacccattccttttatcatgtttgcccttctttcaggccggcgactgagcaagggcaggtctatacataggaaacaccactacagcagtgagatcaatggcaccttctgagtctttggagtgaccaaagtaatagaattaaattccctgacctcttagcctttatctattggactagagtttttggattaatgtagaccataatctgctgcttaacttaatcatgctgttcaggaaatgatagtcaagatagaattaacacagcatatgtacatcaacttccatggaataaaactagaaatcaataagggaaagaaatttgggaaactcatacatttgtggaagttaaacaatacagttttaagtgaccagtgagtcaaagcagaaattcaaaagggcaacaaggaaattgttttgaggtggaacaaaaaggaaggcatgatgtaccaaaacacaggatgtagccaaaccagtgctcagagcggacgcgtggg

SEQ ID NO: 1506 - DNA, 2204 bp, Homo sapiens
  SIMILAR (124)..(579): 1001254mologous to Homo sapiens calmodulin,accession number X52606,Smith-Waterman Score=776.
gcggcgcgcgctgcgggcagtgagtgtggaggcgcggacgcgcggcggagctggaactgctgcagctgctgccgccgccggaggaaccttgatccccgtgctccggacaccccgggcctcgccatggctgaccagctgactgaggagcagattgcagagttcaaggaggccttctccctctttgacaaggatggagatggcactatcaccaccaaggagttggggacagtgatgagatccctgggacagaaccccactgaagcagagctgcaggatatgatcaatgaggtggatgcagatgaccttccagggaacgggaccattgacttcccggagttcctgaccatgatggccagaaagatgaaggacacagacagtgaggaggagatccgagaggcgttccgtgtctttgacaaggatgggaatggctacatcagcgccgcagagctgcgtcacgtaatgacgaacctgggggagaagctgaccgatgaggaggtggatgagatgatcagggaggctgacatcgatggagatggccaggtcaattatgaagagtttgtacagatgatgactgcaaagtgaaggccccccgggcagctggcgatgcccgttctcttgatctctctcttctcgcgcgcgcactctctcttcaacactcccctgcgtaccccggttctagcaaacaccaattgattgactgagaatctgataaagcaacaaaagatttgtcccaagctgcatgattgctctttctccttcttccctgagtctctctccatgcccctcatctcttccttttgccctcgcctcttccatccacgtcttccaaggcctgatgcattcataagttgaagccctccccagatccccttggagcctctgccctcctccagcccggatggctctcctccattttggtttgtttcctcttgtttgtcatcttattttgggtgctggggtggctgccagcctgtcccgggacctgctgggagggacaagaggccctccccaggcagaagagcatgccctttgccgttgcatgcaaccagccctgtgattccacgtgcagatcccagcagcctgttggggcaggggtgccaagagaggcattccagaaggactgagggggcgttgaggaattgtggcgttgactggatgtggcccaggactgggtcgagggggccaactcacagaaggggactgacagtgggcaacactcacatcccactggctgctgttctgaaaccatctgattggctttctgaggtttggctgggtggggactgctcatttggccactctgcagattggacttgcccgcgttcctgaagcgctctcgagctgttctgtaaatacctggtgctaacatcccatgccgctccctcctcacgatgcacccaccgccctgagggcccgtcctaggaatggatgtggggatggtcgctttgtaatgtgctggttctctttttttttctttcccctctatggcccttaagactttcattttgttcagaaccatgctgggctagctaaagggtggggagagggaagatgggccccaccagctctcaagagaaacgcacctgcaataaaacagtcttgtcggccagctgcccagggacggcagctacagcagcctctgcgtcctggtccgccagcacctcccgcttctccgtggtgacttggcgccgcttcctcacatctgtgctccgtgccctcttccctgcctcttccctcgcccacctgcctgcccccatactccccagcggagagcatgatccgtgcccttgcttctgactttcgcctctgggacaagtaagtcaatgtgggcagttcagtcgtctgggttttttccccttttctgttcatttcatctggctccccccaccacctccccaccccaccccccaccccctgcttcccctcactgcccaggtcgatcaagtggcttttcctgggacctgcccagctttgagaatctcttctcatccaccctctggcacccagcctctgagggaaggagggatggggcatagtgggagacccagccaagagctgagggtaagggcaggtaggcgtgaggctgtggacattttcggaatgttttggttttgttttttttaaaccgggcaatattgtgttcagttcaagctgtgaagaaaaatatatatcaatgttttccaataaaatacagtgactacctg

SEQ ID NO: 1507 - DNA, 1243 bp, Homo sapiens
  SIMILAR (106)..(699): 381254mologous to Homo sapiens Sequence encoded by clone 34,accession number AAR05882,Smith-Waterman Score=215.
atccctccttccctcagaggctgggtgccagagggtggatgagaagagattctcaaagctgggcaggtcccaggaaaagccacttgatcgacctgggcagtgaggggaagcagggggtggggggtggggtggggaggtggtggggggagccacgatgagatgtttctccgacatctacaaagatccggggagatcgcggacggggtttgtgcctggaaggtggaaggggaagatgggtcagtaggacagaaaggtaacattgatgactcgctcattggtggcaaatgccctccgctgaaaggccccgaggggcgaagggtacccgaaaggcaccagttaatcactggtgttcgatattgtcatgaaccatcacctgccaggaaacaagttttcacaaaaggaggcctccaagaaggtacatcaaaggattaccatgaaatcaatccaaagggaaactttgaagaaccagagacccagaaaagagtaaaacctttttatgacagggcgctgcagaacaaatccaagcacatcccttgcctaatttccaaaaacttaccagtttctttatttggtgaaaacatgaatcccagatgggcatgggtgcttctattggactaccgtgaaggatgggtggtgccccccataatatgattttcttttaagggatggtttagaaatggaaaaaatgttaaccaatgttggcaattattttggatctatcaccctgtcatccataactgggcttctgccttgtcatcccacacaaccacccgggacttaggaccaaatggggactgatgtcatcttggagctcttcatttattttgactgtggatttatttggaggtggaagcattggtttttaaggaaaaacatgtccatgtaaggttgtctaaaaataaaatgcatttaaactcatttgagagaatgccttttagtttaatgcatatttaaactaaattgatcctgtagtgttcctggagaagctagagcctgattgtaggctactactcatcaattaacttctacagtggagactacttctgggactggaatataaaaaagaatcaaaggttctgattttgagttgcaataaagggaaagaccatgctcatagcagtgccaacatttgaagtgtggagccttacccatttcatcacctacaacggaagtagttaactggaagagattaccaagagaataaaaagagactcattcagtggaaaaaaaaaaaaaaaaaaca

SEQ ID NO: 1508 - DNA, 431 bp, Homo sapiens
  misc_feature (1)...(431): n = a,t,c or g
agcagctgtagtggagccacctcctaagaatgctgcagcttatagctcttgtcgcgtctgatgagaacgtcgcggtctgatccgaacatatggccttgatatgtgcagccagagtttctgtcagtacgcgaaggatatcggtttcattaagttggactaaatgctcttccttcagaggattatccggggcatctactcaatgaaaaaccatgagaattctttgtatataaaataaacatttgaaaaaaccnnnnnnnnnnnnnnnnngggggggctgtttaaaagaatcctttggggggccaaagattacgcgggcatgcaacgtaaaaattttttccttatagggggacaaataataacctacctgggaatctttgaaaagaacccttactttgggggggggacaaaattggacaacctacctacaaaaa

SEQ ID NO: 1509 - DNA, 603 bp, Homo sapiens
  SIMILAR (271)..(297): 1001254mologous to Mus musculus putative,accession number AK002939,Smith-Waterman Score=51.
acccgcgaaaattcggccagggttctcgctcttggtgagaaatagtttgtgattttggggaagcgttgccgtggagcgctaggctgcttaaaatctcaagtagaggaggccacgggcggcacgagggagcacgccgactgggagtcgctggtgccgccattacaggcctgtactgtggcttgggagtcccgggatgcgggtagtagccgtctgagtgcggagtcttgtaatttctatgacctgcaaaaccgctgtctcttttcttacagtcgtgtctgttcaaaccggcacggtcttgatccggaaatatggcctcaatatgtgccgccagtgtttccgctcagtacgcgaagtatatcggtttcatttaagttggactaaatgctcttccttcagaggattatccggggcatctacttcaatgaaaaaaccatggattaattcttttgtatatataattatacattttgaaaaagccactgaaaaaaaaagaaaaaaaaatgaaattaagagggggcccttttgttttaaggggcccctttaaaccccgtgaaaaaccctgggggggtcttttaatgccgcacccttttgtggttgcccccc

SEQ ID NO: 1510 - DNA, 591 bp, Homo sapiens
  SIMILAR (390)..(590): 981254mologous to Homo sapiens Human Rab4b protein sequence SEQ ID NO:4,accession number AAB23761,Smith-Waterman Score=334.
ggtcttctccaagctgaagggccgtggcggtcttctggggaggcagcgttcagggagattactatggagatctggctgctcgcctgggctatttccccagtagcattgtccgagagcacagaccctgaaacctggcaaagtcgatgtgaagacagacacttcctcttcaaattcctggtgattggcagtgcaggaactggcaaatcatgtctccttcatcagttcattgagaataagttcaaacaggactccaaccacacaatcggcgtggagtttggatcccgggtggtcaacgtgggtgggaagactgtgaagctacagatttgggacacggctggccaggagcggtttcggtcagtgacgcggagttattaccgaggggcggctggagcctgctggtgtacgacatcaccagccgggagacatacaactcactggctgcctggctgacggatgcccgcaccctggccagccccaacatcgtggtcatcctctgtggcaacaagaaggacctggaccctgagcgggaggtcactttcctggaggcctcccgctttgcccaggagaatgagctgatgttcctggagacca

SEQ ID NO: 1511 - DNA, 495 bp, Homo sapiens
  SIMILAR (18)..(239): 701254mologous to Mus musculus putative,accession number AK005314,Smith-Waterman Score=238.
  misc_feature (1)...(495): n = a,t,c or g
gcggccgcgaccgagtcatggctgagacctacgacttcctcttcaaattcctggtgattggcagtgcaggaactggcaaatcatgtctccttcatcagttcattgagaataagttcaaacaggactccaaccacacaatcggcgtggagttttggatcccggggtggccaacttgggtggggaagaacctgtgaagctacaagatttgggaacaccgctggccagnagaccggtttcgccgggaagacatacacctcactggctgcttggctgaccggatgcccgcaccctggccagccccaacatcgtggtcatcctctgtggcaacaagaaggacctggaccctgagcgggaggtcactttcctggaggcctcccgctttgcccaggagaatgagctgatgttcctggagaccagcgctctcacaggcgagaacgtggaggaggcgttcctcaagtgtgcccgcactatcctcaacaagattgactcaggcga

SEQ ID NO: 1512 - DNA, 2025 bp, Homo sapiens
  SIMILAR (1510)..(2022): 831254mologous to Rattus norvegicus cytochrome P- 450,accession number M31931,Smith-Waterman Score=773.
atgttgctcaggctggttcagggagattactatggagatctggctgctcgcctgggctatttccccagtagcattgtccgagaggaccagaccctgaaacctggcaaagtcgatgtgaagacagacgaaggagccggggctgtagccggagtggagcggctgccagccgaggagcaggcgcggccgcggcgccatattgcggccctcagcggccgcgaccgagtcatggctgagacctacgacttcctcttcaaattcctggtgattggcagtgcaggaactggcaaatcatgtctccttcatcagttcattgagaataagtgtgagtttcccgcagtggtcctgggaaccctgagctgtgtttatgcgcatgtcaaacaggactccaaccacacaatcggcgtggagtttggatcccgggtggtcaacgtgggtgggaagactgtgaagctacagatttgggacacggctggccaggagcggtttcggtcagtgacgcggagttattaccgaggggcggctggagccctgctggtgtacgacatcaccagccgggagacatacaactcactggctgcctggctgacggatgcccgcaccctggccagccccaacatcgtggtcatcctctgtggcaacaagaaggacctggaccctgagcgggaggtcactttcctggaggcctcccgctttgcccaggagaatgatggtgctagagacacagtgttggagacagccctaggcccaaccttcatggagctcacagttcagtgggtgagggtggaaggacagacccacttccagacagtgacacctcaggaagcccacgtgcaggaggagatcaaccttgtggtgggacacgtgcggctgccagcgctgaaggaccgcgcggccatgccttacacagacatggtgatccacgaggtgcagcgctttgcagacatcatccccatgaacttgccgcaccgcatcactagggacacggcctttcacggcttcctgatacccaagggcaccgatgtcatcaccctccttaacaccgtccactacgaccccagccagttcctgacgccccaggagttcaaccccgagcattttttggatgccaatcagtccttcaagaagagtccagccttcatgcccttctcagctgggcaccgtctgtgcctgggagagtcgctggcgcgcatggagctctttctgtacctcaccgccatcctgcagagcttttcgctgcagccgctgggtgcgcccgaggacatcgacctgaccccgctcagctcaggtgtagctctggccaatggagaacgatggaggattctccgacgcttctccctgaccatccttcgggacttcgggatgggaaagcagagcattaaggagcgaattcaggaggaggccagctacctactggaggagttccagaagaccaagactttatgtaatgtttacaactctatgaccttgtccaaacagcacactcattttgaagatgatgaaacaagttcagaagctaagattcacgaagagattaaccaggtgattggaccacaccggctcccaagggtggatgaccgggtcaagatgccctacacagatgtcgttatccatgaaatacagagactggtagacatcgtgcccatgggtgtcccccacaacatcatccaggacactcagtttcgaggttaccttctgcccaagggcacagacgtatttcccctgcttggctctgtcctcaaagaccccaaatacttccgctacccagatgccttctatccccagcactttctggatgagcagggccgcttcaagaagaatgaagcctttgtgcctttttcctctggaaagcgcatctgcttgggcgaggccatggcccgcatggaactctttctctacttcacctccacccttcagaacttctctctatgctcgctggtgccacttgtggacatcgatatcacccccaagctctcaggctttggcaacatcaccccgacctatgagctctgccttgtggcccgctga

SEQ ID NO: 1513 - DNA, 1101 bp, Homo sapiens
  SIMILAR (256)..(312): 891254mologous to Mus musculus putative,accession number AK013410,Smith-Waterman Score=91.
  misc_feature (1)...(1101): n = a,t,c or g
cgagggagcaggcgcggccgcggcgccatattgcggccctcagcggccgcgaccgagtcatggctgagacctacgacttcctcttcaaattcctggtgattggcagtgcaggaactggcaaatcatgtctccttcatcagttcattgagaataagttcaaacaggactccaaccacacaatcggcgtggagtttggatcccgggtggtcaacgtgggtgggaagactgtgaagctacagatttgggacacggcctggccaggagcggtttcggtcagtgacgcggagttattaccgaggggcggctgggagccctgctggtgtacgacatcaccagccgggagacatacaactcactggctgcctggctgacggatgccctgacccctgtgcaaccccaaaaaacgggtgcatttctctgtggtgaacaagaaatgacctggaccacttgagcgggaggtcactttcctggagggccctcccgctttgcccaggagaatggagctgatgttcctggagaccaggcgctctcacaggcgagaacgtgaagaaggcgttcctcaagtgtgcccgcactatcctcaacaagattgactcaggcgagctagaccgggagaggatggggctctggcattcagtacgggattgcgtccctccgcaagcttcggcagcctcggagtgcccaggccgtggcccctcagccgtgtggctgctgagctctgtggagccagctcacctgttctccaggaccagccctgctggggcccaggcccaggctctgagaggccgtgtcctaacctgccctggccccggagaagctacgtttgcncacctgtccccccttccctggcctggtggggcctggctttggggcaagactgagccacgggggaagggggaatcccgtacctgctgctgcttcctctgtcttgggtaaacgtttgtccccctgaacccctaaccatatcccaagagctcccaaagcctgagaccagggtcatttgtccccaactccccatctggccctgctgttgctagtacctgttatttattacctggaggcctgtcccccccccaccctacccccataaagcaatgttta

SEQ ID NO: 1514 - DNA, 1043 bp, Homo sapiens
  SIMILAR (310)..(951): 481254mologous to Homo sapiens dodecenoyl-CoA delta- isomerase,accession number Z25820,Smith-Waterman Score=350.
cggtcaagatggcgctggtggcttctgtgcgagtcccggcgcgcgttctgctccgcgcgggggcccggctcccgggcgcggccttcgggcggacggagcgggcggccggcggcggagacggcgcagcggccgcttcgggagccagcgggtgctggtggagccggacgcgggcgcaggggtcgctgtgatgaaattcaagaaccccccagtgaacagcctgagcctggagtttctgacggagctggtcatcagccgtggagaagctggagaatgacaagagcttccgcgatgtcattctgacctcggacccgcccgggtgtcttctcggccggcctggacctgacggagatgtgtggggaggagccccgcccactacgcttgggtacttgaaaggccggttcaggagctgtggctgcggttgtaccagtccaacctggtgctggtctccgccatcaacggagccctgccccgctggagggctgcctggtggccctgacctgtgactaccgcatcctggcggacaaccccaggtattgcaaagggattcaaataagacccaaggttgggatcatttgccccttttggggttgaaaagaaacccttgggaaaaacctattggggcccggggggggggagtctgcccctgcaggtgggggctgctttttcccccggccggaaggccctgcaaggtggggcatagtggaccaagtgtggtccccggagaagcaggtgcagagcattggggctgtcagcgatagcccagtggatggccattcccaagccaatggctcacaagtttgaccaaggccataatgcgaaaaggccagggcccacccgcctggtcacgcaagggctatgcggacgtgcagaacttcggtcagcttcatctccaaagactccatccagaagtccctgcagatgtacttagagaggctcaaagaagaaaaaggctaacgattgggctgccacaggcttacggccacacgtgcccctgtgggtcccagggaggtcttaaacaaggtatttttcaacttaaaagtaaa

SEQ ID NO: 1515 - DNA, 2797 bp, Homo sapiens
  SIMILAR (785)..(1231): 641254mologous to Mus musculus putative,accession number AK016659,Smith-Waterman Score=557.
atgaaggaagtggtttattggtcacccaagaaggtggcagactggctgctggagaatgctatgccagaatactgtgagcctctggagcatttcacaggccaggacttgatcaacctaacccaagaggatttcaaaaaaccccccttgtgccgagtctcctctgacaatgggcagcggctcctggacatgatagaaaccctgaaaatggagcaccatttggaagcacacaagaacggccatgccaatgggcacctcaacattggcgtagacatccccacccccgacggcagcttcagcatcaagattaaacccaacgggatgccaaatgggtataggaaagagatgataaagatccccatgccagaactggagcgctctcagtaccccatggagtggggcaagacttttctggcctttctttatgcactttcctgtttcgttctcaccacagtgatgatctcggtcgtccacgaacgagtacctcctaaggaggtgcagcctccactaccggacacattttttgaccattttaaccgggtgcagtgggccttttctatttgtgaaattaatggcatgatccttgtaggactctggttaattcagtggctgctcttaaaatacaagtctattattagcagaagattcttctgcataataggtacgctgtacctgtatcggggtattacaatgtatgaaactacactcacagcacctggtatgctttgcaactgttctccgaagctttgcggagactgtgaagcccaactgcgatgaataatgaagcatcattgctggatgtggcttgtctatcactggctctcacaacatgtgtggggactatctgtacagcggccacacggtcatgctaacacttacctacttatttatcaaagagtattcccctcggcgactctggtggtatcactggatttgctggcttctcagcgtagttggaatcttctgtattctcttagcgcatgaccactacactgtggacgtggtggtggcatattacatcaccacgagactcttctggtggtatcacactatggccaatcagcaagtgctaaaggaagcttcccagatgaacctcctggccagggtgtggtggtacaggccatttcagtactttgaaaagaatgtccaaggaattgtacctcgatcttaccattgggcctttcccctggccagtagtcccaccctcagtaggcaagttaaatacagccggctggtgaatgacacataacagctgtacaaagtggggaaaagacaaattgtccgaagtgctaagaactccatgagagaagatgccataaaataaacacctccctaatcctattatctttcaatggttaccttgacttaacctattgagttacctggtcagcactgtgatctttttttctctccaaagggacctgcgttggacaacaataaagaaaaatttaacctatcatgcactgtacacatttcctgttcataagtttgggatttacataacccgcaaccaccatgttcctttgtatatgatgcagcagcataaatgtaagcttttatatcataagttctggtctttccagtcacatctggaaataaagcgtattattttcttgggaaaacatacttttcatatctcttgccccaaagattgggctgtaagccattttctagcaaatgtctctatgaaggtttctaagtacctgaatggggtttgattctgaaatctttctacctgttgcaccgatattcaaataaaaatgatagacacagaaaggtttggtaactttgggttttgtaaaatcagcaaaggcagtgtttcaaaaagtgcaaaaaaaaagattctgttataaagggatggggtaaggtccctcctcaactttatttttcaaaatgatgttatgaacaccaaatttacagatttttaacatgtcacagagaacagagttaaaatttaaaaatgcatcttgggagagaaatttgtctatgtttctagtgcctttcttgtcttgattgtatggtcagcaggcaatcttaaatgtttttatttaaaataaagcattccttgaagatataaatatatgtatacactactaaattttgcatttatagctaaattgaatcagaagactgcttatggttttaaaattgccctgacttacataatgagggtggttaatttaagagtccagagcctgttcacatattgtgatcaggtagcattgacaggtaccacttaaattattttatcgtcgatttggtagttcgattttaactactcaatgaaaacagccatgaatatcttttccttaaagagagttttgaaaatgatcacttacctaaaacttgaaagctatgaattagttatccatactctcatgacaattttgttggtgaaccaccaaaaaagagatctatttctttaaaagatatttgtgcagaaactgcatgtaactataagttttactcataacatacatatgtttggggaagtattctattctatacttgccaatgtggagaccaaaatagtttttttaagaatgaagaagtatatatatccatatctgtattttacgtgcagcagaattatcttccgtagattttttttttgtattcacaaggtgatatttgtattgtaaaccaataatggtgaaggaaataaaaaggcttttaaatttttgtttcttttaattcctttgtaaagttattattccagagagtatactgatatcttacaacttacctaaatcataaattaatcaaaatgcactttttaataaaaactgatacttaaaat

SEQ ID NO: 1516 - DNA, 981 bp, Homo sapiens
atggttgagaagaatgtaggaaactgctgcgggcaaagtctcccagctctgtacagccgcaggccacctagaagtggcctcggggaggaagcagccggctttgtgcttccagagtacggtgtacccacaaggcagaagggagttggactagatctctctaaaatctcttccagctctgtcatgctgcaattctcagcaagtccagagctcaaattacgcatttgccgaagaccttccgttaaattccagtcggggagctgtatcccctccttgaagacggcattgctgctttcattgagtggaaccctacccatgaagcgctttgggagcctcaggagcaacaagaaacacaaggaccaaaatcgaagcacggagaggcgccagtcggagcctcatggccttttcgccgtggatttggtgaggcccgcccgccaccccctgtccgccccactctcatccatgcctggaaaagctcataacccatctgcctgttctccctacgtcactgtcaccaagcgctgcctggtggaaccctggacaagtggcccagctctcccagaggtgctgctccccgaggactcccggagtcactcagcaggccaggcggctgtcacctcacagggtggcagggtagcaaagcagctctggtgcgtgtccttggatgtcacggtcaagtgcccctttcccttttctgaccccatcccagtcacccagagctgctgctctaagtcaggaagactaaatccccaggaacaggtgagcatcgcctgtggacggggctgggcgctggtggggtgtcagcgaggcccgtggtcaaacactctgctgggcctggagggatccacggaggacgggcccccggagctgagcagcgcagtggcctctggaaagcaggctgctgggggagtgtccgggcgtccgccccagggccctgaggctaagagcatgactgcaggaggaggaaggggatacagggcctga

SEQ ID NO: 1517 - DNA, 1126 bp, Homo sapiens
  SIMILAR (354)..(617): 471254mologous to Homo sapiens NADH-ubiquinone oxidoreductase subunit CI-B12,accession number AF047183,Smith-Waterman Score=138.
  misc_feature (1)...(1126): n = a,t,c or g
ccaagcaaggacaacatattatcttccccgcccttctcttttctacagaatctgttacctcagtcagattgaggcctgcacatatactgggaaaataatcgacttccagcgtccctcatgtagtctctacctgattcaggaatctctaacccagtatcggaacgttaagcncgcttctccgcttccctgcccgtgagaaactcgaggtgaccaaccctcccgttcccggttggctcccggttgcagagttgagtgtccctgagaggtcagattgctgtccagaccatggccccatgaacatgaacatggaccatggcccttgaccatcataaaatgggactttccagattataagacaatggaagatagaaggggacaccatttaggaaaactattccagaagaagcttggctgcaaaaagggcttaagggattccatggggcccgcaatgaagctttggagatacatgggtggctttgcaaaagagtgtttccttttcttgatgtattctttttaaaggattcaaatggggggatttgcttgcatttgtggtagctgttagggagcttgaatatttacctggggagtccccttgaattaaagataagaagcatcactgaagataatacctggaagcatcatagttggtttctttaactctccaaaataagatttcttctctgtagcctacttgtctgggtttatcccttacagaatacttagtaaagatttaatcaattaaaatatatatatatatgccaaaaaaaaaaaaaaaaaaaaaaaaagtacagtgtgttacttctctgagaactatatattccattaccttgctgacattcctatttggatacttttcagtcacctgagattcagcgctaaaactgaactcctgtggtcctctcacagcagttcttacagttctctcccttagtgaaaggtaacaccatcttcctagacctggagacctagggactgagagccatccttgactctacgctccctcatcccatagtccagcaattgttaagtcctgctcactttatctcttcaccatctctcaattctacttacttttttcccagtgccactatttgaaagtccagggtgttattcatttatcaggagt

SEQ ID NO: 1518 - DNA, 399 bp, Homo sapiens
  SIMILAR (1)..(222): 781254mologous to Rattus norvegicus kinesin light chain KLCt,accession number AF166267,Smith-Waterman Score=274.
agctcactctccaagatccgtgagtctatcaggcgaggaagtgagaagctggtctcccggctccgaggcgaggcggcggcaggagcagccggaatgaagagagccatgtcactcaacacactgaacgtggatgctccaagggctcctgggactcagtttcccagctggcacctggacaaggcccctcggaccctcagcgccagcacccaggacctgagcccccactaacgtccagtgaactgcgctggccgcagcttcttgggaacagtgcaggagggatgggctggtggggtgagagggggtctatcatctcctggcccccccttgcctctgggtacctggtggatagctgccttctcctgcgattaaaggctgtggacgtgacagtgagaaatgtca

SEQ ID NO: 1519 - DNA, 493 bp, Homo sapiens
  SIMILAR (87)..(284): 591254mologous to Rattus norvegicus kinesin light chain KLCt,accession number AF166267,Smith-Waterman Score=162.
gtgccccacccaggcacacttgtgcgcaaatcaagtgagaatggcttgtgatcgccctcctggggtggcgtgggaactgcatgggccagggggattgaacagcatccccggcccctccccaggcctttcgccgcagcagctcactctccaagatccgtgagtctatcaggcgaggaagtgagaagctggtctcccggctccgaggcgaggcggcggcaggaccagccgggtgagtgttgatcaggtcggcaaagagccctgacatcagcagaatagacagcccaccccacccccacccccattttgctcaagaaccttccatggctcccatctcccctgtgatacacacagatcaaaccctgtgctggaaaggtccctcgtggaggggggccactcctggattcactcatttcctccctgctgccctctttgcagaatgaagagagacatgtcactcaacacactgaacgtggatgctccaagggctcccggg

SEQ ID NO: 1520 - DNA, 436 bp, Homo sapiens
cagatctgcacgcagcactgttccgctagcgagaaaatggcaacagggcaagcgtccagcaatgggtaagcggtggggtcggtgcacgcaggcgtccagcaatgggtaagcggtggggtcggtccacccagggagcgctggtccccctggaaggaaacccaggctctaacgcggtccctctgaggaccctgctaggcgaaacgcgccggccatagaaagactgtcccgcaggagagggcggtgttcggcccggggtttgaggggtcgggaccaggaggagggacagcccggccgaacctgaacgcacttcaggccgcttgaacagcacacgcaggaactgcgccgacggaaaactttacttcgtgttccgccaccaaaaaaatatcgtttaaacaaacctgcggcagcttcccagctcccttaaaccaggatccca

SEQ ID NO: 1521 - DNA, 644 bp, Homo sapiens
  SIMILAR (3)..(476): 951254mologous to Homo sapiens RII-alpha subunit (AA 1- 404),accession number X14968,Smith-Waterman Score=777.
  misc_feature (1)...(644): n = a,t,c or g
aagatacagatccaagggtgattcatcctanaactgatgaacagagatgcagacttcaggaagcttgcaaagatattctccttttcaaaaatcttgatcaggaacagctttctcaagttctcgatgccatgtttgaaaggatagtcanagctgatgagcatgtcattgaccaaggagatgatggagacaacttttatgtcatagaacggggaacttatgacattttagtaacaaaagataatcaaacccgctctgttggtcaatatgacaaccgtggcagttttggagaactagctctgatgtacaacaccccgagagctgctaccattgttgctacctcagaaggctccctttggggactggaccgggtgacttttagaagaatcatagtgaaaaataatgcaaagaagaggaagatgtttgaatcatttattgagtctgtgcccctccttaaagcactaaaggatgggcagaggttcaacccacacctccactttgcttttgaaggcccattcattagaccacttgtaaagattactccaacccagtttttatatctttggttcaaaacggcatgtctctccaacaatttaagtgcctgatacaaagtccaaagtataaacatgcaaaaaaaaaaaaaaaaa

SEQ ID NO: 1522 - DNA, 1875 bp, Homo sapiens
  SIMILAR (209)..(874): 821254mologous to Homo sapiens RII-alpha subunit (AA 1- 404),accession number X14968,Smith-Waterman Score=910.
agtgacagcggcggcggtgccaggtcggccgtggtagcgtagggttgcgcggcccggaaacgcagagccggccaaagagcggcgcgacgtgagccggggccgtgcgcgaagagacctcgcgggcgcggagcgaaaggccggcgtgagtgagcgcggagacagtggccgccggcggcccaacccgtctatcccttcggccgccgccggcatgagccacatccagatcccgccggggctcacggagctgctgcagggctacacggtggaggtgctgcgacagcagccgcctgacctcgtcgaattcgcagtggagtacttcacccgcctgcgcgaggcccgcgccccagcctcagtcctgcccgccgccaccccacgccagagcctgggccaccccccgccagaacccggcccggaccgtgtcgccgacgccaaaggggacagcgagtcggaggaggacgaggacttggaagttccagttcctagcagatttaatagacgagtatcagtctgtgctgagacctataaccctgatgaggaagaggaagatacagatccaagggtgattcatcctaaaactgatgaacagagatgcagacttcaggaagcttgcaaagatattctccttttcaaaaatcttgatcaggaacagctttctcaagttctcgatgccatgtttgaaaggatagtcaaagctgatgagcatgtcatttgaccaaagggagattgatgggagacaacctttttattgtcatagaaccgggggaacttatgacattttaagtaacactagataatcaaacccgctctgttgggcaatatgacaaccgttggcagtttttggagactagctctgatgtacaacaccccgaggagctgctaccattgttgctacctcaagagggctccctttggggactggaccgggtgacttttagaagaatcatagtgaaaaataatgcaaagaagaggaagatgtttgaatcatttattgagtctgtgcccctccttaaatcactagaggtgtcagaacgaatgaagattgtggatgtaataggagagaagatcataagagaatggagaacgataaatcactcagggtgaaaaaggctgatagcttttacatcatagagtctggcgaagtgagcatcttgattagaagcaggactaaatcaaacaaggatggtgggaaccaggaggtcgagattgcccgctgccataaggggcagtactttggagagcttgccctggtcaccaacaaacccagagctgcctcagcttatgcagttggagatgtcaaatgcttagttatggatgtacaagcattcgagaggcttctggggccctgcatggacatcatgaagaggaacatctcacactatgaggaacagctggtgaagatgtttggctccagcgtggatctgggcaacctgcgggcagtaggtgtgccacaccccacgagccttcttagtgtgacaccaaaaccttctggtcagccacagaacacatacagaaaacagacatgacagaactgttcctgccgttgccgccactgctgccattgctgtggttatgggcatttagaaaacttgaaagtcagcactaacgcgatgggcagaggttcaacccacacctccactttgcttctgaaggcccattcattagaccacttgtaaagattactccaacccagtttttatatctttggttcaaaacgggcatgtctctccaacaatttaagtgcctgatgacaaagtccaaagtataaacatgctcctttcctctcttgctgctactcttgcttttgggaagttaccacaggggtctggcaggaaacctgttgtataactgtagacactctctaatggttctcaaagg

SEQ ID NO: 1523 - DNA, 1746 bp, Homo sapiens
  SIMILAR (845)..(729): 531254mologous to Homo sapiens Human PRO4400 protein,accession number AAB50971,Smith-Waterman Score=91.
tcactgctgacacgcctccttggtgacattaggcagtgggtaggcaaagagggagaagtccaggatatacttaggcagcacatcctgcagcagggcccggggggcactgcacaagtggtaatgcaggctttcggggctggctggccggtaccaggcctggcgagctggaaatcggacgtgaggtggtgcccgtacccactccagcacctgatttgcatcagcctccagcctctcataggagcccacaaagtcatagtgcacggcacaaggctggcacaggtggtacacgggcatccaatgctcattcatgcgctcagggtcctcatccaccaggtatctcaggaactcggggaatgtgacatcgtcgcctgcagggctgggccccgctccagccctgtaccgcctcactatctcagccccatagcgttgctggtactctcggatctcgccaaacttgttgcggtaggcagagaggaggcgttccaagggctcccgcacaaacaggaacttaaagtagtgctgcaggcggtagcgaatctcctcaggccgcaggtcggccaggaacaccaggtcactgcggtggtccatcttgaggcggacgtccacgctgtccaggacgcctgccagcaccttcatcacccgcttccagttagagcaggccaccttggggacgtagcagtagaggaagcggtaacggtcacttacgaggatgtggcgcagcagggtgcgcgcctgccccaccggcaagtcccaggggtcccggggcatgcctggctgtccgcacaccgcccgcaggtcctgttccggacgtcctgccgcacttgcaagtccgcgtccccagccctgccggtcccgaacctgctcgtgaattctctcagagactgcagctgtcttggcaaacataagcacccctgaggtaaggcggtcaagccgatgcaaggggtgtagctccttgagttggtgctccttgcctaggatgaagataactgtgttgtgtcggaagcggccacaggggtgaacgggaatggaggaaggcttgtctacaaccaccacatcttcgttctcagctagcaggcgaatgggctctgctgtgactggtggctcatgcctgtgcactgtgttccgcaagaaatcattgtccttgagcacgatgttgaggtcctgcaccggcttctcgttgagttgcaggcggcccgcccggacggcggcctcatagtaggccaggggctgagctcggaactcggtactgaagacgtgcagcaagctgtggcccacccagcgacctttgcagtaggtccggaagtcaaagtaatagggccgcaccttacgcaggccgccctcgaagtaataactggtttctgcaaagtgctcatctccgaagctcaccccggtccgccgcttcttcgggggcggcacgacacgctccctggttgcgccccgccgcttcttatgcttgcccgggcctggggctgcagccgagggatgctccccgcctactggggccggctccacttcccggccagccggcttcgggggcccgggggacagctcaaccttcgcgtcgccaccagcgtcaccgttttgctgatgcgaagccctcagcccgccctctgtcccaacctgggtagacactgtttctgccattgggcccttatcgccactccaagtcctggtaaagctagggcgcctaaggtcgtagcgccaatgtccaagaaccctgagccatccgcggcggtccagccacat

SEQ ID NO: 1524 - DNA, 1048 bp, Homo sapiens
  SIMILAR (368)..(730): 471254mologous to Homo sapiens 44.9 kDa protein C18B11 homolog,accession number U67934,Smith-Waterman Score=249.
gggaggaattcgctgcagtctctgagagaattcacgagcaggttcgggaccggcagctggagaatgagtacgtgtgccgggtggaaggggagttccccactgaggaagtgacctgtaaagaacccatcttagtggtgtcttacaaagtaggggtgtgccgtgtagatccccggggcaagccctgtgagacagtgttccagaggctaagctacaatggccagtccagtgtggtacggtgccggccactcacaggccgcacacaccagattcgagtccaccttcagttcttgggccatcccattctcaacgaccccatctacaactcagttgcctgggggtccttctcgaggccggggcggttacattcccaagacaaacgagggagttgctatttgtacctgggtaggcagagcaccaggccaaacagagcctggatgtgctagatctctgtgagggtgacctgtccccagggacttcacagactctacggccccctcctcagagttgggcaaggacgacctgggaagagttggctacagcttgcccagaagatgggaggaaagtaagctgaggcagcccctcaggagttggacacaatagccttggcatcaagagaaggcagttgaaacagatgttcatgaatcaagagacagaccccactctgtgcaaaatgccggctggtgcgacaggatcccttgccccaagaccttgtgatgttcctacatgccctaacgctataaagggccaggctttgagtacttttcacccaatgcctgcctgggcacaggatgactggcaaaaggactgagggtgtggcccaatggagggattgcttcttggggttttgacaaggatgggctattagggcaagggcttgaccccatgggctaatacttggggcttctattggaatgaggacgggcttctaaagggacctgctcatacttgctacctccttccagtgggaatttggagactttttggtttgtaaatatatccctttttctaacatcaaaaaaaaaaaaaaaaaaaaaaaaaaaaaaaaaaa

SEQ ID NO: 1525 - DNA, 863 bp, Homo sapiens
  SIMILAR (299)..(559): 341254mologous to Peromyscus maniculatus reverse transcriptase,accession number U43360,Smith-Waterman Score=136.
cttaatttgataaaggttatttataaaagacttctaggtagtatcatacttaatggtgaaatattaaacacatgtccttaagttcagaaacaaggcaaagatattcacattcatttctgttcattattctaaagaaataaggcaagaaaaataagcaaaaaataaagtttagacgttaggtaagactttcttttattggtattaacaggattatatatatatagaaaatccaaaatccacaaagtattggaataaataattgaatttataaatgtcaccagctataaagtcaatatacaaaaagatattgcaattctacgtactagccaaaaacattgaaaaacaaattaaaaatacaaagcaaaatatactagaaataaattaaacaaatcaagatttctacaatgaaaactataaaacactcttgagaaaagttaaagacaacctaggtaaatggacaattataccatattcatcaactggaaaactcgatattgtaaagatgtcaattatcctcaggttattttataaaaccaatgcaattacaggcatagtaccaaaaattcatttgtgaaaattaatcctgagattccaaaattaatttaggaaacatggggaacagagaaggcaagacaatcttaaagaataaaaaagttggaaggctttcactaccagatttccaaaaatattacaaagcaacataaattaagatagtatggtattgatgcaagaaaagacaaatgaaccaagaggcagagatcacctcagcaaagaggaaaccatggtctctttgataaatctatatacacacaccttgatcctacctcacacgctacaaaaaattattcaaagtagatcacaga

SEQ ID NO: 1526 - DNA, 456 bp, Homo sapiens
acagctttttttgttttttttttttttaaattaatagcttgtttattagtaatatgttacattattaaagtgcattgagaagaggtgcaggggccaaagctggaaggccactggccccagccactgccctgggtggccagacacagccggagaagggcccagctcccccctgaaatggatggacagggctgggggcagggccgcctgcctggagagctcggcccaggccatccccaccggaattttcacagtttagcctaagttataacatgtcctgagcgaaggtgggaggctaggagcatggaagcacagcccctggggaaggggggcttagaggaagggaggaggccccccgccccccaaccctcaacgccaagggcagagtcctggaacctccccctgaggacccggctcgtccttccaaatgaacacggtgaaactagggctcagttttct

SEQ ID NO: 1527 - DNA, 413 bp, Homo sapiens
ctataaagcaattacacaactgagatcacaaagcaagtagcgagcaacactgtgacaggaacaaaaccctcaaatatcaatattaaccttgaacagaaatggcctaatgctacacttaaaagatatagattgttaaaccagataaaaatttttgtaaaaaagaccaaaccatgtgctgcctacaagagacctacctaacatgtaaagacacccacaggcccaaagtaaagggatagaaaaatatataggcaactatatatttttacctctctgagccccaattttctcatccctacatgagaaaatccctttctcatatggtcttccagtgagatgacccttaattaattaagcaggtaaataataaagagatagagtttctagagatgaatccaacttgacagctgcaattg

SEQ ID NO: 1528 - DNA, 880 bp, Homo sapiens
  SIMILAR (878)..(846): 811254mologous to Homo sapiens PRO2738,accession number AF116712,Smith-Waterman Score=46.
ctgaactctcccttccaaaaagtagaagtcatccctgtcgagaaggaccaacactgtgcactggtcagctcacagcaccaagaggcccccttcctgcttttctgtcatgtgttcccccagtaatcattttctgaccaccctgaaagcaaagcctgggtgggtactggcagtgcaaaggccagtaggccaccatccctggccccaagctgcacaagcccacagacgagggtcctgtagaacaaacgctttgatgtgcttctcaggtagcctgcggcccagtccagggctttggggaggatcagctgcatggaagagtgaatgccaggctgaggtcatcagggccctgaggaacttggacgtggggtcttcactctcatggaactgcccttctaactggagacatagacaatataccagtggttctcaaccagagtcaattttacccccaggagacatttgacaatgtctggggaaaatttctggcctatcacagcttattgaaggaggttgcctactggcatcctagcaggcagagtgagtgctgctgttaaacccacccacaggacacagaacagtctcctgcaacaaagaattaccccaaggccctggcgcggtggctcacacctgtaatcccagcactttgggaagccaaggcaagcggatcacttgagcccaggagttcgagggtcagccctgggtaacgtggtgaaacaccatctctgcagagaatacaaacattagcccaggtgctgtgctgtgcacctgtggtcccagctactcgggaggttgaggtgggaggatcgcctgagcctgggaggtctagactgcagtgagccatgatcattgccactgcattccagcctaggcaacagagcaagac

SEQ ID NO: 1529 - DNA, 425 bp, Homo sapiens
  SIMILAR (150)..(218): 951254mologous to Homo sapiens leucine carboxyl methyltransferase,accession number AF037601,Smith-Waterman Score= 130.
gtgaacatgcgtgatcggtttgggcagatcatgattgaaaacctgcggagacgccagtgtgaactggcgggagtggagacctgcaagtcattagagtcacaggatagaatcacttgaattcctggatgaaatgtgactctggagcagctcatgcgcattactgcctttgctgggcaaccaaaggaggaaatgagcttgggctgaaggagataacttattaatctgtcgaatgcttatgccgagccagaagccgaagccacttgccctcctggaggagacctgcaagctccctgagcggtgggcgggcctcgtccgcaggtctcatcccacactcttgagaagccttggtcactacagtggtcgcacatgttcctcttcctgttcctgttgacatgtcgttgtttaaataaatctcacttgccacc

SEQ ID NO: 1530 - DNA, 516 bp, Homo sapiens
  SIMILAR (209)..(343): 861254mologous to Homo sapiens leucine carboxyl methyltransferase,accession number AF037601,Smith-Waterman Score= 206.
tcaatgagcgactcggaagaggagccaataagcggagaggttgctggggtagccggcgtgggcggcgtcactgagccgcgccagctgagccaggtagggccctaccctcttctgttgctttctccctgtggctcgcgccgtcccccgccgcccgtcgaccccgcttccatgtccctggcggacacagctcccaggaacctccacgcccatggccactaggcagagggaatcctctatcacctcctgctgttccacctcgagctgcgacgcagacgacgagggcgtgcgcggcacctgcgaagatgcttccctgtgcaagaggtgcctgtcgggcgcggggttcggggccggcatctggggcgcgggcctaggtgggaggtgggcctgcatctgaagaatacgctcaaggctggcagggatgcagcccccgcctcgcacgaccctcgcttcccacagacaagatctagcttctgttaaatgttctcgtaacaccctgttcatcttcttggtggtcat

SEQ ID NO: 1531 - DNA, 384 bp, Homo sapiens
  SIMILAR (121)..(360): 951254mologous to Homo sapiens leucine carboxyl methyltransferase,accession number AF037601,Smith-Waterman Score= 389.
atgacggcagggctaagacagcggccttgggcggtgactgggaagaacgttgaacaccgtgtttgggctgaagaaaagagcaagggaagaggtgaggaacttcaggtgagggttgatgtagatgttacttacacagatggacacatactggattcaaagagatatgccgttattggagcagatctccgagacctgtctgaactggaagagaagctaaagaaatgtaacatgaatacacaattgccaacactcctgatagctgaatgtgtgctggtttacatgactccagagcagtccgcaaacctcctgaagtgggcagccaacagttttgagagagccatgttcataaactacgaacagaatgttaagagccaaatcttctga

SEQ ID NO: 1532 - DNA, 648 bp, Homo sapiens
  SIMILAR (359)..(646): 541254mologous to Homo sapiens ORF1; MER37; putative transposase similar to pogo element,accession number U49973,Smith- Waterman Score=212.
atggagagttttggggtgctacctctatttcttggtgcggatgctggctacgtgggtgtcatcgcgggtgtgcgatgcttgttgtccggagtcgttccagtggatctagaggagttcaccggggacgtgttgttctccgcctgtgggccacggtcctttgaatccggatcaaagaagacagtcgtccagctattatttcgtgttatgccctctcgtgtagttagattggctacgacgtgtcgttgggatcccaagccttcgttggacctgtgccactttggtgggaacgaggcgtgctgccagacaccgttgtgtgaatgtgtgggagtgcggagggctgaaggagataacttattaatctgtcgaaggcttatgccgagccagaagccgaagccacttgccctcctggaggagacctgcaagctccctgagcgccaagttgtgaatgcaaaggaaaagttcttggaggaaatgaaaaagtgctactccagtgaacacatgaatgataagaaagcgaaactgtattattaccgatatggagaaagtttgagcggtctgtatagaagatcaaaccagccacaaccttcccttaagccaaagcctaatcgagagcagggccctaactctcttcaattatgtgatggctga

SEQ ID NO: 1533 - DNA, 1457 bp, Homo sapiens
  SIMILAR (177)..(1226): 441254mologous to Homo sapiens CGI-68 protein,accession number AF151826,Smith-Waterman Score=501.
  misc_feature (1)...(1457): n = a,t,c or g
cgtcactgagccgcgccagctgagccaggtagggccctaccctcttctgttgctttctccctgtggctcgcgccgtcccccgccgcccgtcgaccccgcttccatgtccctggcggagcacagctcccaggaaccgtccacgcccggtggccagctaggcagaggggaatcctctattatcctcctgctgttccacctcgagctgcgacgcagacgacgagggcgtgcgcggcacctgcgaagatgcttccctgtgcaagaggtttgcagtaagcattggctaactgggcatgacccttacatacaggaccttggtgagactgtctaaacagagagaaagcccctgaaatcaacagaggatattttgctcgagtccatgggtgttcagttcagcttattaaaggcatttttacgggaagacagaatgtcattgttcaaattgttccaaccttggggggcagggcatgggatnaccacctttctgggagattaaaggatgaagatctttcttcccaagtaaatatttttgaggttgactttccaatgattgtcacggagaaagctgcacagtatcaaatggctagccttccccttatccagccccattctagaactgcattcagaggacacacttcagatggcctctgattgcatttgcagatggacacatactggattcaaagagatatgccgttattggagcagatctccgagacctgtctgaactggaagagaagctaaagaaatgtaacatgaatacacaattggccaacaccttgaatagctgaatgtgtgctggtttacatgactccagaggcagtccgcaaacctcctgaagtgggcagcccaacagttttgagagagccatgttcatattactaccaacaggtgaacatgggtgatctgtttgggcagatcatgattgaaaacctgcgtggacgcccagttttgacctggcgggagtggagaccctgcaagtcattagagtcacagaaagaacggctcctgtcggaatgggtgggaaaacaagcatcggcccgtccgaacatgattggagtttgtaccaccagggttaccctcgaagctgaagtgaagcaggatagaatcacttgaaatccctggatgaaaattgggagctgctggagcagctcattgcgggcattactgccttttgctgggcaacccaaaggaggaaatgaagccttgggctgaaggagataacttattaatctgtcggaaggcttatgccgagccagaagccgaagccacttgaccctcctggaggagacctgcaagctccctgagcggtgggcgggccctcgtccgcaggtctcatcccacactcttgaagaagccttggtcactacagtggtccgcacatgttcctcttcctgttcctgttgacatgtcgttgtttaaataaatctcacttgccaccagtcaaaaaaaaaaaaaaa

SEQ ID NO: 1534 - DNA, 509 bp, Homo sapiens
  SIMILAR (3)..(203): 1001254mologous to Homo sapiens PGP 9.5 (AA 1-212),accession number X04741,Smith-Waterman Score=355.
gatttgaggatggatcagttctgaaacagtttctttctgaaacagagaaaatgtcccctgaagacagagcaaaatgctttgaaaagaatgaggccatacaggcagcccatgatgccgtggcacaggaaggccaatgtcgggtagatgacaaggtgaatttccattttattctgtttaacaacgtggatggccacctctatgaaaatatatacccccccatgcagtctaaaatgcttcagtacttgtgaaacacagctgtttttctgttctgcagacacgccttcccctcagccacacccaggcacttaagcacaagcagagtgcacagctgtccactgggccattgtggtgtgagcttcagatggtgaagcattctccccagtgtatgtcttgtatccgatatctaacgctttaaatggctactttggtttctgtctgtaagttaagcccttggatgtggtttaattgtttgtcctcaaaaggaataaaacttttcaactgataaaaaa

SEQ ID NO: 1535 - DNA, 1211 bp, Homo sapiens
  SIMILAR (240)..(767): 481254mologous to Homo sapiens Similar to ubiquitin carboxy- terminal hydrolase L1,accession number BC000332,Smith-Waterman Score=298.
atgcagctcaagccgatggagatcaaccccgaggtgagcgccaggtgcaccgctacccggagagcgcgaggccgagggagggggagccgagtcgctgatcggttcggttttgcctttttctttgcatttgcctttcagatgctgaacaaagtgctgtctccggctgggggtcgccggccagtggcgcttcgtggacgtgctggggctggaagaggagtctctgggctcggtgccagcgcctgcctgcgcgctgctgctgctgtttcccctcacggcccagcatgagaactttaaggaaaaagcagattgaagagctgaagggacaagaagttagtcctaaagtgtacttcatgaagcagaccattgggaattccttgggcccattgggccctaattcaacgcaggggccaaatatcaaagaccaactgggatttgaggatggatcagttcttgaaacagttttctttctgaaacaaaaaaaaatgttcccctgaaagacagagcaaaatgcttttgaaaagaatgaggccatacaggcagccccatgaatgcccgtgggcacagggaaggcccaatgtcgggtagatgaccagggtgaatttccatttttattctggttaaccaaccgtggatgggccaccttctatgaacttggatggaccgaatgccttttccccgtggacccatggcccccagcttcaggaggacaccctgctgaaaggacgcttcccaaggtctgcaggaggaattcaccggagcgtgagcaaaggagaagtcccgcttcttctgcccgtggcttctcctgcaaaggcagccttaatgctctgtggggagggatttgctggattttcccctctttccctttcaaacatggaaaatatattacccccccatgccagtctaaaatgcttcagtacttgtgaaacacaggctgttcttctgttctgccagacacgcccttcccctcagccacaccccaggcacttaagcacaagcagagtgcacagctgtccactgggccgattgtggtgtgagcttcagatggtgaagcattctccccagtgtatgtcttgtatccgattatctaacgcctttaaatggctactttggtttctgtctgtaagttaagaccttggatgcgcgtttaattgtttgtcctcaaaaggaataaaactttttctgctgataagataaaaaaaaaaaaaaaaaaa

SEQ ID NO: 1536 - DNA, 435 bp, Homo sapiens
ccataaagtggtattaaaactggatctcttttcttccatggcactactctcattttgaagtttatgaacggtacgacagtgtattgtaaattccctttagtttgttacagtagccaattgaaaatgtatatcccaaaatttaaaaaaaaaagtactagcagcaataaaattgcactagttttatctggtacatacaaaaacagcctggagcctagatctggtgcttcttctgtgctgtggtttaccccaaacctttaggttgtttattcattcagattagatagactggagccataaagttaatttgcacctagctttttggagaatagccatgattaactgctattcgtggtgggggtgggggggaaccctatgatttactatgcagatgaagagggtaggaactaaataaaggactttgtaagccaaaaaaaa

SEQ ID NO: 1537 - DNA, 438 bp, Homo sapiens
  misc_feature (1)...(438): n = a,t,c or g
cgggcccttgcagtatccatgctgggggcctggcctggtccctgggctctggactggggtccatacagtatgaccgctaggcacggcaccttctctctgtaggctccttacccagacccctgccctgcagggcctcccccagccccaagacagcaggggaaggcgccctcaggctgtgggggccggagcatctgctcaggccgcctcccctctgttgtttggcctctgatgcctgcatggcaaaggccctcctgagaggcggtctccactcagctccaaatgcaaggaaggcacaagcctatccaggttgtctgccattttaccttccttctgcctgggctcctgagcgggtggagtgctggcttcctttgctaggatacagacaaatatccaaatacgtgaactcaagttgcaaccttccaaatctctccaagctcn

SEQ ID NO: 1538 - DNA, 2487 bp, Homo sapiens
  SIMILAR (135)..(518): 421254mologous to Homo sapiens sin3 associated polypeptide p18,accession number U96915,Smith-Waterman Score=181.
ggaacgagggaggaagatggcggtggagtcgcgcgttacccaggaggaaattaagaaggagccagagaaaccgatcgaccgcgagaaaacatgcccactggtgctacgggtcttcaccacaaataacggccgcccaccacgaaatggacgagttctcccggggaaaatgtcccgtccaccgagttgcaaatcttcccactgggatggatgcaactttgaaagaactgacaagcttagtaaaaagagtcttacccagaagctagaaagaagggcactcacttcaaattttgcaatcgtttttacagatgttaaaagacctggctatcgttgattttctttcttacagagttaaggaggattggccagcacccatgtctggcagaaaggggactggatgattcccatgaacccctgcagtcgcaagaagttcccagataggagattacttgagacatagcgaattaccccctcccaaatcggggcacccaccctccttccagggcgcatgagacccatattaaatttctatttactatttgttgaatttatttttccgtcagttatgtaaaataaaacatactcttcttcctcccctgattattgccattaagcctttaaattctaaacgaaattataatgcgatcgatctatttaggagttagatttggatgtgctattgtatgattacgaatagtctggtatgtttcaagcccttctgtaaaatatgaagaaaagtgctcttagcattctgtgtaaaactgtactgttaaatatatgtgtgtaatcagcctgagtgtgaaagttaatggaggcctgggaacagggtttatactaagtagtggaggagcgtatggttaagcccaaaggggcaggaacaagaaagccacgggattgtatggaaatccaaacatgagtttgtgggtgtaggactgctgtatgcagttgggaaaggacacgtgagagtgagctcaagtggcagcagaggcagtttggaataagctgcggcaagttgaagaagctgtgttggacgagattgccccgccttgatcagggtaccatgacataaaaggttaaagaacaggcaacacaatgagcacttaagtttttaacatgtggggaatagggccattttaaaggctggaacccagttcagaggaaacaagggtttgggtagaggtagaaaggtttaattaaccctggagatctgccaaatggagggaggggtgaaaggaggaatccaagacccgagggaagaagagcccaaggacaaggtccaggttgaatgaagtaggaggtgttcacacatccctcttgtgtgcctaggtagtggcgtgccatctgatcctgagaggcagtaaagcagtgatgaagacagtgcagcagaacattgaagtcctgattgcagcgagtgactctgcaaccttggataaattatttcaatctttattttgtaaaacggagataacggcctataggattgttaagactgaatattttaaaagagcttagaatggtgcctgacaaatgagaaacaataaatactgattattggccataaagtggtattaaaactgggatctcttttcttccatggcactactctcattttgaagtttatgaacagtacgacagtgtattgtaaattccctttagtttgttacagtagccaattgaaaatgtatatcccaaaatttaaaaaaaaaaagtactagcagcaataaaattgcactagttttatctggtacatacaaaaacagccatttaaaatctgatgattctgtggaattggtgtccctgttagcaatggcagagaccaccctggagcctagatctggtgcttcttcctgtgctgtggtttaccccaaacctttaggttgtttattcattcagattagaatagactgggaccccaaaaagttaaatttgccaccccagctttttgggagaaatagccatgattaactgcctattccgtggtgggggtgggggggaacccctatgatttaactatgccagatgaagagggtaggaactaaataaaggactttgtaagcccaaagtggttgggctgcctttgtcaaattcccaccctttgccttggttcccaacatggaatttcttgtttaaagatttcagtatcccatcaaaagtacagttagagaatacctagtgaatttattgaatataacgctaagaatcaaaagacttgtactagtttacctctggctttggtaagcgtggctttgagtaataactgagctgtttccccgcatataaaatacagatatgtatgtagtcatcatgacagcaaaaataaaaaaaggggggggccctttaaatgactccctaaggggcccaagtttaacggggggctggaaagttttatctttctttcttattagggagccaattaaaacctccttgggattctttgggagggaaccttttttcgggggggggatatatgggcacactcccttaagaatt

SEQ ID NO: 1539 - DNA, 506 bp, Homo sapiens
tttttttttttttttttttgaaaacatccactttaagctttattacaacacattgtctccaaatacaaagggaggggccgggagcagaaggtgcggctgtggcgggaggggctccaaggggggctgaagggccggcagccacgtctacagagactggaggctcagcgggggacctgcaccctctcctccgctggacttcccagcaaataacaggaggggccgggtccattttggggcgatcccaatgccaggcagtggccaggtgggaggggccggagagaggcttggagaggactcagggctgggtcaggtgaaagccaccaggtggggccctggcccgcctcccgcagcactggaggaggcagtggccaggtgggaggggccggagagaggcttggagaggactcagggctgggtcaggtgaaagccaccaggtggggcctcagcccgcctcctgcagcactggaggaggcagtggccaacacaggaccttcgcccccctgctg

SEQ ID NO: 1540 - DNA, 768 bp, Homo sapiens
  SIMILAR (75)..(524): 521254mologous to Homo sapiens beta-globin,accession number L26462,Smith-Waterman Score=243.
ccgccccggaattcccgggtcgacatttgcttctgacacaactgtgttcactagcatcgctcatacagacacgcatggtgcatctgactcctgaggagaagtctgccgttactgccctgtggggcaaggtgaacgtggatgaaagttggtggtaaggccctgggcaaggctgctgggtggtcctaccctgggaccccaaaaggtcctttgaagtcctttgggggaatctgtcccaactccctgaatgctgttaatggggcaaacccctaaaggtgaaaggctcaatggcaaaagaaaaagtgctcgggtgccctttaagtgatggcctggctcacctgggacaaccctcaaagggcacctttgcccacactgaagtgagcttgcactgtgacaaagctgcaccgtggatccctgaagaacttcaggctccttgggcaacgtgcttggtctgtgttgcttggcccatcacttttgggaaaagaatttcaaccccaccagtgcaagcttgcctaatcaagaaaattggttggcttggtgttggctaaatgcccttggccccacaagtatcacctaaagctcgcctttcttgctgtccaatttctatttaaaggtttcctttggtccctaaagaccaactactaaactggggggatattatgaagggccttgagcatcttggattttgcctaataaaaaacatttattttcatcgcatacaagaataaaacaagcgcggccgattaagaggatacttcaggggcgcaagat

SEQ ID NO: 1541 - DNA, 420 bp, Homo sapiens
  SIMILAR (167)..(238): 911254mologous to Homo sapiens dJ470L14.3 (novel protein similar to the Arp2/3 protein complex subunit p21-Arc (ARC21)),accession number AL133174,Smith-Waterman Score=116.
  misc_feature (1)...(420): n = a,t,c or g
accggaagcgctccgctgtacctggatcctgctcctctgggttgaaacccgggcgccgccaagatgccggcttaccactcttctctcatggatcctgataccaaactcatcggaaacatggcactgttgcctatcagaagtcaattcaaaggacctgcccccagagagaaatgaagctgataggaccttgatatatataactctctacatttctgaatgtctgaagaaactgcaaaagaagtgatgagagcctatttacaacagctaaggcaagagactggactgagactttgtgagaaagttttcgaccctcagaatgataaacccagcaagtggtggacttgctttgtgaagagacagttcatgaacaagagtctttcangacctggacagtgaagggagcccgggcagccaccgtct

SEQ ID NO: 1542 - DNA, 974 bp, Homo sapiens
  SIMILAR (97)..(639): 431254mologous to Homo sapiens p21-Arc,accession number AF004561,Smith-Waterman Score=233.
tttcgcttccgcctacctcgcccaggctgccagaccggaagcgctccgctgtacctggatcctgttcctctgggttgaaacccgggcgccgccaagatgccggcttaccactcttctctcatggatcctgataccaaactcatcggaaacatgggcacctgttgcctatcagaagtcaattcaaaggacctgcccccaagagagacacaaggataccagatattgtggatgaggccatctttttaccttcagggcccaatgtcttctttcaaaaactatgaaattaagaatgaaagctgataggaccttggatatatataactctctacatttcttgaatgtcttgaagaaactgcaaaaagtgccaattcccaaaagcccaaggtggaggaaaggaaatgttttacgctggggaatccactaatttttcccatttcctgggagagcctgggtttttcccactttaaccgccattttatgcccaaacctggccaaccacccaggaagatgaagtgatgagagccctatttaccacacagctaagggcaagagactggacttgagactttgtggagaaagtttttcggaccctccagaatggataaaccccagcaaagtgggtggacttgctttgttgaagagacagtttcatgaacaagagtctttcaggacctgggacagttgaagggagcccggggcagcccaccgtcttcccagaggccctggggcagcatttttccagcaagatgttacacaatctttttgcctttatctcgtaaagttttatagagacgagagaagagcatgtctttacttgaaaaactcttgatcaagaatttgggtgggagaacacagaaactgggttatccaagggtgatttgaaattttgtgcgagcattaaaactggcgcctccataagaataagtaataataaagaaatttctaacattccaaaaaaaaaaaaaaaaaacatt

SEQ ID NO: 1543 - DNA, 471 bp, Homo sapiens
  SIMILAR (16)..(333): 1001254mologous to Homo sapiens ceramide glucosyltransferase,accession number D50840,Smith-Waterman Score= 559.
ccggcgggccgggggatggcgctgctggacctggccttggagggaatggccgtcttcgggttcgtcctcttcttggtgctgtggctgatgcatttcatggctatcatctacacccgattacacctcaacaagaaggcaactgacaaacagccttatagcaagctcccaggtgtctctcttctgaaaccactgaaaggggtagatcctaacttaatcaacaacctggaaacattctttgaattggattatcccaaatatgaagtgctcctttgtgtacaagatcatgatgatccagccattgatgtatgtaagaagcttcttggaaaatatccaagatactatatctctgccaatgtaactggtttcaaatgtgtgacaggaatgtcttgtttaatgagaaaagatgtgttgcatcaagcaggaggacttatagctcttgctcagtacattgccgaagattactttatggcc

SEQ ID NO: 1544 - DNA, 1527 bp, Homo sapiens
  SIMILAR (427)..(849): 911254mologous to Homo sapiens ceramide glucosyltransferase,accession number D50840,Smith-Waterman Score= 663.
atgattgataagattgatgcataccacaagactgtgttcatgagaatggaaatagttcagacctttccttctgaagtttatcaggatctagtgcttgagttatttatttattcatttcaagttatagtttacgaccatatcaagttcatttcggtgaaaagaaagcaaaccgcaaaatgtgatatattttctacagtgagagacaaaggggtgggactttcaaagacagaaattgctcctgaccctgagagcacccatatgactctgatgccaaggaaacagtttaagaaaggcagctcccaggaagccagttcatcagagtggaagaagcagaagtcagatgctttaggtttggctgcgtgtgaaaaagacatgaaagcgatgggcacagatatttggaaactgcaacaacgatgcatttccacccaagtaattccagatacgcttactgacatggtgaatcaaatgacagaaaaagtaggcttggttcacgggctgccttacgtagcagacagacagggctttgctgccaccttagagcaggtatattttggaacttcacatccaagatactatatctctgccaatgtaactggtttcaaatgtgtgacaggaatgtcttgtttaatgagaaaagatgtgttggatcaagcaggaggacttatagcttttgctcagtacattgccgaagattactttatggccaaagcgatagctgaccgaggttggaggtttgcaatgtccactcaagttgcaatgcaaaactctggctcatattcaatttctcagtttcaatccagaatgatcagaaaaacaattacaagaatggtgacccagattaattgtgaatttgaggaagttgttccaagttcaaatccagactcccaaattgaagtagaggaggtcagtttatacacccacatggactacaatgaagtctttacccctgtcagttgtttagaaaaatgttcagcacttcaaaaccagaaccaagagaaagtgaagagtgttggtgaatcctacgaattaagtggaggtttgattaagaaagcatctatttcaagtagagatgaagttcgggtgttttctgccttcattgactctactggacaaatggtacttgtcagcgtaacaggtagagatgcagggtccagggggctacaagcagggcttgctgccaacttgattttgcgcttccagcctctggcagccaaaagatataaccatgacttcccagaacaagaaagtcccaatcctcttagcttaccgatcaagacagtggagcccagagagatctacagacttattcaagagcagtgggtttccactctgatttgtaaacttcctgaccttcccatcagagaattacaatcagagaacacaggtctgcttcctagaacaaacagtacctctgtggaaataagaaaaaggtctgcaattgtcagacaatgctttagtggacgtgcttggcacctgagagatacgaacacatcatttaataatatgctttccgtgcatgatgcttga

SEQ ID NO: 1545 - DNA, 721 bp, Homo sapiens
  SIMILAR (41)..(280): 1001254mologous to Homo sapiens ceramide glucosyltransferase,accession number D50840,Smith-Waterman Score= 414.
gcggccgcagcgggccgggccggtccggcgggccggggtgatggcgctgctggacctggccttggagggaatggccgtcttcgggttcgtcctcttcttggtgctgtggctgatgcatttcatggctatcatctacacccgattacacctcaacaagaaggcaactgacaaacagccttatagcaagctcccaggtgtctctcttctgaaaccactgaaaggggtagatcctaacttaatcaacaacctggaaacattctttgaattggattatcccaaacctttatttttctcggtagcaccaatgaaaagaatagagaagacacagatgtgatagccttaatgcagcacttattaatatgaagtgctcctttgtgtacaagatcatgatgatccagccattgatgtatgtaagaagcttcttggaaaatatccaaatgttgatgctagattgtttataggtggcaaaaaagttggcattaatcctaaaattaataatttaatgccaggatatgaagttgcaaagtatgatcttatatggatttgtgatagtggaataagaggaacaatggagatgccaatgagtcttgaacagtcttatgaccctaatgtcagagaccctatctataggaacaatggggatgcagatggtcagcatctagtgctgcatgacttttaccaacaaggaagtggaccaaagtgcagcctgattaatgcttaa

SEQ ID NO: 1546 - DNA, 981 bp, Homo sapiens
  SIMILAR (200)..(367): 1001254mologous to Homo sapiens ceramide glucosyltransferase,accession number D50840,Smith-Waterman Score= 304.
cggcacgagggttattttaatgcttcattaacaattagcattttcttgaacggtataacatggcagttaaattacataaggaagcagacttgattttacatagtatacttagaaaagtgaaatccaagaatttaattttttaaccttgtctttagtttgacagtgagtgaaattaaaaaatttttttttccattcctagggtggcacactgtgtttttcaaaacttgattatgcagtcgcctggttcatccgcgaatccatgacaatatacatttttttgtctgcattatgggacccaactataagctggagaactggtcgctacagattacgctgtgggggtacagcagaggaaatcctagatgtataactacagctttgtgactgtatataaaggaaaaaaagagaggtattataattatgttttatataaatgcttttaaaaatctaccttctgtagttttatcacatgtatgttttggtatctgttctttaatttatttttgcatggcacttgcatctgtgaaaaaaaaaaaaaatacacatctgtagtcttggccaaatgatacactttattttgtggaagtagagaatcaagagaattggttctaggaacctgggttcgttcatcattgttgtttatttttttaaaataaataaataaatatatatatagatgctctgcaacaaactctgtgacagtatccttcagtagagaaagtttcttacttgtgagtacactcttttagaacatttacgggtggcagcagctttgctttagagtttagaagataatagaaggaatgactattcatgtccaaagtgaatggttttgtgcagtgaacaacacatggcgaggtactaactgagaaactttttcatgctttatgcctacctcttgtagttgttgcagagcaaatacaaattgtaataagatagctaggccttgcagaaacaaacagaaaaacttaaaaaaaaaaa

SEQ ID NO: 1547 - DNA, 1742 bp, Homo sapiens
  SIMILAR (301)..(480): 501254mologous to Homo sapiens ceramide glucosyltransferase,accession number D50840,Smith-Waterman Score= 101.
  misc_feature (1)...(1742): n = a,t,c or g
gaggcgaaccggagcgcggggccgcggtcgccccgaccagagccgggagaccgcagcacccgcagccgcccgcgagcgcgccgaagacagcgcgcaggcgagagcgcgcgggcgggggcgcgcaggccctgcccgccccttccgtccccacccccctccgccctttcctctccccaccttcctctcgcctcccgcgcccccgcaccgggcgcccaccctgtcctcctcctgcgggagcgttgtccgtgttggcggccgcagcgggccgggccggtccggcggggccggcgatgatgtgtgctgctggacctggccttggaggggaatgtgcctgtcttcgggttcgtccctcttcttggtgctcgtggctgatgcatttcatggctatcatctacacccgattacacctcaacaagagggcaacggacagacagccactatagcaagctcccaggtgtctctcttctgaaaccactggaaaggggtagatcctaacttaatcaacaacctgggaaacattctttgaattggattatcccaaaaatttaatttacatacaatgctttttgactagtatgaagtgctcctttgtgtacaagatcatgatgatccagccattgatgtatgtaagaagcttcttgggaaaatatccaaattgttgatgctaagattgtttataggtggcaaaaaagttgggcattaatcctaaaattaataatttaatggccaggatatgaagttgcaaagtatgatcctatatgggatttgtgatagtgggattagaaatatttccagatacgcttactgacatggtgaatcaaatgacagaaaaagtaggcttgggttcacgggctgccttacgtagcagacagacagggctttgctgccaccttagagcaggtatattttggaacttcacatccaagatactatatctctgccaatgtaactggtttcaaatgtgtgacaggaatgtcttgtttaatgagaaaaagatgtgttggatcaagcaggagactttatagcctttgcttcagtacattgcgaaagattactttatggccaaagcgatagctgaccgaggttggaggtttgcaatgtccactcaagttgcaatgcaaaactctggctcatattcaatttctcagttcaaatccagggatgatcaggtggaccaaactccgaattaacatgcttcctgctacgataatttgtgagccaatttccagaatgcctttgttgcccagtttaattaattgggatgggcaggcccacccatgtgttcagatgggatattatggtattttttcanggggccattgcctgggcatggtttatatttgactacattccaactccaggggtgtcccagggtggccacactgtgtttttcaaaacttggattaatgcagtcgccctggttcatccgcgaatccatgacaatatacatttttttgtctgcattatgggacccaactataagctggagaactggtcgctacagattacgctgtgggggtacagcagaggaaatcctagatgtataactacagctttgtgactgtatataaaggaaaaaagagaagtattataaattatgtttatataaatgcttttaaaaatctaccttctgtagttttatcacatgtatgttttggtatctgttctttaatttatttttgcatggcacttgcatctgtgaaaaaaaaaagaaacacatctgtagtcgaggccaatcaggg

SEQ ID NO: 1548 - DNA, 2877 bp, Homo sapiens
  SIMILAR (2877)..(2197): 351254mologous to Homo sapiens MSTP030,accession number AF113210,Smith-Waterman Score=176.
  misc_feature (1)...(2877): n = a,t,c or g
cccctccaaactgactcttaaggcccatccagatccacatatcctgattttgaactatgtgaaagtgggactgttaagtgcaagactaaaataaattatagcagactttttagtaataactttccattttcaaacagtatatcctgtgggccaaagggctatttcttaaagaggcatgtaaatgtatttatttatctaatgtttttttccccatgtaaacttgatatacaaggtttagtatttgctcctctttcatattattttcacacgtatactcagatttggcatgtacctttcaacatctccataaaattaaacaccttttggagaaaagatccactattttctgctcaaaggtttcgcctacctaaagtggaacatgttaaaaatctatgttgaccatcactggacagctttctctcaaaacttcccttcaacgccatggattagcaccagttttgtttactttaaggtacttttcccattcatcatcctggttataataaatggatggaagaatatttcccactgatggttggtctgttgcttgccaaatttttagggagagctgttcatcatacaacataagggataatgactcctgtcaggtaaaacagaagcccaagaaataacaactttttttcttaaaaagttagttacacttgttttcttggagaaaaaaacctgtcaactcctttgcttttccaaaatatttcagggtatttcctataaggttcataagaataagagcttaacacagaaatagttgctgttcataagtttattatctatatctgaaaaaatcatagaaaattgctgggtttagctctcagcagcccgctcctgagctctgaggaagcttgccttcttttgagctacccgatccttcttctgagcaagggacattttgggacggttccacctacaaaagataggaatatatattttttaaactataactgaagagaatagaatatttaatttaaaattttaataaaatttaattttgatagagaatatttaagactttgcaatcagaaggttaaataatccaagttcaaatacatttacttatgtatgatcttaagctaactttcccaaaccccaacttctgtgatgtcctactaccatagggccaaaagtcaaatagaagacatgttagattcagtaataccacttctaggtatttgcccaaatgttttgaaatcagtttgtccaagagagtggcactcccatgttcattgcagcactatatattaatagcaacagataaatggataaaggaaatgtggtatacatatacataatggattattacccagtctttaaaaatgatggaaattctgtcatttgcaacatgaatgaattggagaatattgtgctcagtgnaaataagccaggcacaaaaagacaaatacttcatattcatatagaatctaaaacaatggaactcacagaagcagagagcagaatggtggttacagaggctggtgggtgcaaagaatgggcagatgatagtcaagtataaaatctccaacaggaggagtagggaggagtatgattttgtttttagttctattgcgcagcatgatgaatatagaatatcgtacatttcacaattaagagaataaatttcaaatgttgttgccacaaagtgttaagtatttgaggtgatatgttaaatacattgatttaattactatacattgtatttgtgggccatcacatcactttatgcttacatgttcattaattattactttctattccatttaaagattcaaaacatgaaaattcaacaaaaagcaacttgtcagccaataaaaaaatgcagtaaccagtacttagactgtactaagatagaaagaaccncctccgttatgtctgaggtaacacattccatccccacagttacttttgcaaacctggttcccttcgcttctgccacatcacgcagagctagtgatcgagtttgcacaattacaccaacagtctgccccacgtgggaaccattcccaaccgttttcttgaaaagacaaaaaaaaagacgacatacctcttctttttaacttcttttcttgggcttcttttcatagacctggattctctcggtatagcagcatgagcttttctaataccatctcctccatcatgtctggagttacgctgttctttacgtattgacgcacgaactgtttcttgtaaggcatcttcatcttcttccattaaggtaggcgcatgtaatcctgcaacaattctgggcccatggatgtggcttccgatggtactttctgcattaaaattcctttgcttttcagaaatcataaaccagggggaatcggtttgggtactgtggagggaataggacaagccctccatccacaggctccccttcagggcaaccaaaaaactttaatggccagtgggtaggttctgggcaagggcctggcatcccaataggcagggtgaaggcaccctggctgaccatcaatgctttccacattgtattcatcaccagtcaactccaacttggcctttcatagatcttgttcatgccaaacctatggaagaagcctgcgggcccagccagcaggccagtacaatatggctgcagcataatttgtcaggccaacccttcacacccatatttttggcagttcgggtgcatacggntgcgcagactatcatataccccctctatacggggcataagcaatctgacaaatgaatatctctgtttgtcacacgaactatcacctggaatttgggggtggtggaattaatttaatctggtatcaccaagcgtttccgagcagattaatcgggtttaccctctggtcggcttccaaatttcccttggaatcccctaaagagagc

SEQ ID NO: 1549 - DNA, 682 bp, Homo sapiens
  SIMILAR (116)..(421): 441254mologous to Homo sapiens Human myelin oligodendrocyte glycoprotein gene,accession number AAZ29204,Smith-Waterman Score= 158.
ttttttttttgaaacggatcctcactccggtcaccaaggctcaggtgaagtagaacaatccctcaatcctcctgagtagctgggattacaggtgcccaccaccatgcccggctaatttttttttttttttttttttttgagacggagtcttgccgtgtctcccaggctggagtacagtggcgcgatcttggctcactgcaagctctgcttcccgggttcacaccattctcttgcctcaccctccagagtagctgggactacaggcacccaccaccacgcccggctaattttttgtatttttagtagagacggggtttcaccgtgttagccaggatggtcttgatctcctgatttcgtgatccacccgcctcggcctcccaaagtgctgggattataggcgtgagccaccgcgcccggcctagaggaaggttattagccccatcttatatttgcagaaacagagggttagagggttgaggttactcagctaaaaaaatgatggagccaggtttccaacatccagagcctgtgttcttattttttatttttattgaaaagataatacagtacaaaagagtacatattaaaaggtaaggctctgttctactccagactcctagctgtttcccttctcagaggacatcattcatatgaagacattttctaagtgtttacaagcaca

SEQ ID NO: 1550 - DNA, 2358 bp, Homo sapiens
  SIMILAR (940)..(2355): 991254mologous to Cloning vector pBACe3.6 levansucrase,accession number U80929,Smith-Waterman Score=2471.
atggtgcgatcttggctcactgcaacctccgcctcccaggttcaagcaattctcctgcctcagcctcccaagacacagctgaacttcacagtagccattgacttcacggcttccaatggtgagacacggatgagtgaaaaagtcggagggaatcctctgcagcctacctccctgcactacatgagtccctaccagctcagcgcctatgccatggccctcaaggcagtgggagagatcatccaggactatgacagtgataagctcttcccagcttatggctttggggccaagctgcccccagagggacggatctcccaccagttccccctgaacaacaatgatgaggaccccaactgtgcgggcatcgagggtgtgctggagagctatttccagagcctgcgcacagtgcagctctatgggcccacctactttgctcctgtcatcaaccaagtggccagcaattcctggagctctgtgactctaggtactgactcagagcctgctgtggaggtgcctcaatatgtgggcatccggctcctggtagagggcttcaccatcaagaagcccatggcgatgtgtcatcggcggatgggggtccgcccagcagtccctctgctgacccagcgaggctctggggaaggcaaggactcggggacccctacccacagcctccacaccaaggcccagctgccttctccccatgtactccgacaccagggccaggtcctcagacgacagcacagcaagctggtgggcactaaggccctgtcgaccacaggcaaggccttgaggactctacccacggctaaggtcttcatttccctcccaccgaaccttgatttcaaggtggcacccagcatcctgaagccaagaaagtcaattcgggaggatcgaaacggcagatcgcaaaaaacagtacatacagaaggagacatgaacatgaacatcaaaaaaattgtaaaacaagccacagttctgacttttacgactgcacttctggcaggaggagcgactcaagccttcgcgaaagaaaataaccaaaaagcatacaaagaaacgtacggcgtctctcatattacacgccatgatatgctgcagatccctaaacagcagcaaaacgaaaaataccaagtgcctcaattcgatcaatcaacgattaaaaatattgagtctgcaaaaggacttgatgtgtgggacagctggccgctgcaaaacgctgacggaacagtagctgaatacaacggctatcacgttgtgtttgctcttgcgggaagcccgaaagacgctgatgacacatcaatctacatgttttatcaaaaggtcggcgacaactcaatcgacagctggaaaaacgcgggccgtgtctttaaagacagcgataagttcgacgccaacgatccgatcctgaaagatcagacgcaagaatggtccggttctgcaacctttacatctgacggaaaaatccgtttattctacactgactattccggtaaacattacggcaaacaaagcctgacaacagcgcaggtaaatgtgtcaaaatctgatgacacactcaaaatcaacggagtggaagatcacaaaacgatttttgacggagacggaaaaacatatcagaacgttcagcagtttatcgatgaaggcaattatacatccggcgacaaccatacgctgagagaccctcactacgttgaagacaaaggccataaataccttgtattcgaagccaacacgggaacagaaaacggataccaaggcgaagaatctttatttaacaaagcgtactacggcggcggcacgaacttcttccgtaaagaaagccagaagcttcagcagagcgctaaaaaacgcgatgctgagttagcgaacggcgccctcggtatcatagagttaaataatgattacacattgaaaaaagtaatgaagccgctgatcacttcaaacacggtaactgatgaaatcgagcgcgcgaatgttttcaaaatgaacggcaaatggtacttgttcactgattcacgcggttcaaaaatgacgatcgatggtattaactcaaacgatatttacatgcttggttatgtatcaaactctttaaccggcccttacaagccgctgaacaaaacagggcttgtgctgcaaatgggtcttgatccaaacgatgtgacattcacttactctcacttcgcagtgccgcaagccaaaggcaacaatgtggttatcacaagctacatgacaaacagaggcttcttcgaggataaaaaggcaacatttgcgccaagcttcttaatgaacatcaaaggcaataaaacatccgttgtcaaaaacagcatcctggagccaggacagttggcagtcaactaa

SEQ ID NO: 1551 - DNA, 1328 bp, Homo sapiens
  SIMILAR (114)..(245): 601254mologous to Homo sapiens Human secreted protein, SEQ ID NO: 7871,accession number AAG03790,Smith-Waterman Score=120.
  misc_feature (1)...(1328): n = a,t,c or g
ttttatttttttgagacagagtctcgctgtgtcacccaggctggagtgcagtggtgcgatcttggctcactgcaacctccgcctcccaggttcaagcaattttcctgcctccagccttccaagtagctgggactacaggcgtgcaccaccacacctggctaattttttgtatttttagtagagacgtttttttcgccatgttgcccaggctggtctctcctgagctcaggcaatcggccaccttggccttctgaaagtgctagaattacgggcatgagccaccgcatccagccagaaagatacatatctaattctagaaataggcatggcagttattcagttcattagttaacaggccatgtgctggacctaaattaaaatttcttggatattgtgtatttaacctgaagtattgaggctagtttttttgttttgttttttgggtgctgaacattatgggtctaattctttgggcttcttaggaacattttaaaaaatctatggttttgctatcagccaaaggtaaatggtgttccacactaaccatataaggttactaaccttcattatacnggcaaagctaaaaagtggtgggatatttggggtcttaatgaaaattgtatcatttaattccataaatattaaaatatttgggtaccttttaagctttttttctttccttctataatggtggtacaagttctatattcattcagtttaatctcatttgaaattgtttaaatcagagtacatgtaaatatttgtgggttttttttttttggtttatagactcgagctttccttttacacagttttttttagggaaaaactaaagctattaggaaattctaaatcttgttgatgaagagttgggctttctttgatataattaataaaagggatgtatggtatttatggctgggtaggaccccagaaagccactttgtattaccagaagtgttaaaggctgggttgcctaataagtatgggaaccagaaacaccctctcccttgggtctccccctagtaatggttcaaagttccttcccccaggaagtcctaccatattaataactttggttccattatcctttccccttatagcatccattttccctttttgtagagtggaaatcagactagctgcctaaacatattaaggttaatcctccaaaaatgtactggggaggcattttagtcccaacaacttacatttggctttggaagttgttaacaaagcatagtcgatgtttttaaatcaaacataatttgtatcttggaacttacattttgacatttgaataaaacaaaaagactaaatgaaaaaaa

SEQ ID NO: 1552 - DNA, 467 bp, Homo sapiens
  SIMILAR (3)..(179): 741254mologous to Homo sapiens fF27C3.2 (NOVEL PROTEIN SIMILAR TO MOUSE B99),accession number AL022325,Smith-Waterman Score=197.
ggccagcaccacaaagcctgctgagcgcacggcatgtgtcagccttgcccacacccgccagccggctgctctggccttccaccgatgacccccaaaacgatgcccagggccgtgggtctcccctgtgtgtgccagctcggagacgttcctctgagccccgcaagaactctgcaatgaggctcttcttgtagatatcaaactggaaccactcgcggtcactccagatgctgcaagcagcccctcattgaccttcctctcatcgacttctgcgataccccagaagcacacgtggctgtaggatctgaaagcaggcctctgatcgacctcatgacaaacactccagacatgaataaaaatgtggccaaaccttcaccggtggtgggacagctcatagacctgagctcccctctgatccagctgagccctgaggctgacaaggagaacgtggattccccactcctcaagtt

SEQ ID NO: 1553 - DNA, 273 bp, Homo sapiens
  SIMILAR (2)..(142): 931254mologous to Homo sapiens dJ1163J1.3 (similar to mouse B99 protein),accession number AL031588,Smith-Waterman Score=220.
atttgcaagtattcctgcaaatagctcccggcctctgtcaaacatcagcaagtcaggcagaatgggacacgccatgctgcggccagctctgcctgcaggccctgtgggggcatcctcctggcaggccaagcgggtcagaatcttctcaattgaataagactagaagtatcagacggcgacattcctgtctaaattccaagacaaaggttatgcctactcctacaaatcaatttaaaattcctaagttttctattggtgactccccgaaagctt

SEQ ID NO: 1554 - DNA, 472 bp, Homo sapiens
  SIMILAR (371)..(472): 971254mologous to Homo sapiens G-2 and S-phase expressed 1,accession number BC006325,Smith-Waterman Score=178.
  misc_feature (1)...(472): n = a,t,c or g
gttggcagggtcactgtccacagcaccccggttagacgctcatctgggccaggaccacaaagcctgctgagcgcacggcgtgtgtcagccttgcccacacccgccagccggcgctgctctggccttccaccgatgacccccaaaacgatgcccagggccgtgggctctcccctgtgtgtgccagctcggagacgttcctctgagccccgcaagaactctgcaatgagaactgaaccaacaagggagagcaacagaaagacagattccangctggtggatgtgtcccctgacaggggttctcctccttcccgtgtgcctcaggcacttaacttttctccagaggaaagcgattctactttctccaaaagtactgccactcatcgacttctgcgataccccagaagcacacgtggctgtaggatctgaaagcaagcctctgatcgacctcatgacaaacactccagacatgaat

SEQ ID NO: 1555 - DNA, 1875 bp, Homo sapiens
  SIMILAR (1875)..(1570): 1001254mologous to Homo sapiens Human secreted protein, SEQ ID NO: 6952,accession number AAG02871,Smith-Waterman Score=521.
tcagggaaacattaaatcaccctccatctctactgaacatcctgaacaacaacagcgccgcagcagcaaggacttgccttccttcttagggtcatccatgttcacgtcccctgcccggcaggctgaaggctcatcgcggccgccgcctccttccatggagagagcagcctgcagtgggggttggcgggtagaaggcttctgcatgaggtggacggtagctgccttgcggatgagccgctcggtcaggggcgagttgggcttcaaggcatcacgctccatcagaaggctccgggctacgttcttatggacgctggaggtgcagtttaaggccgcgtgaatcagcagctggttgaagacgtctctctgggcattgctcccaccgagctggacgatccggtagcggatgggcaggagcagctccaggacgcggtcagggttcccgtcctcagcctccaccagggcctggcacaggggcagccccacgtctcgggccaggaggtgctggcagttctcccctggggatcttccagcctcagtttgctcatctgtaagcaggcataacagtgccaatctaacagaaccgtcaggattgctgataatacaggcaaaggcctggcacctctcggcagggtgaggacccccaccccgagaaggcccctctgcatactcgctggcgtcccgcagggtggtcagcagctcctgtgtggtctgggggtcgtgtgcacccagggatgccatcaggaagtgtgcgtcattgaacagcaggatgtggtctcggctgtgcttccgggccacaggcaggacatcctgccaccgctggcccacagacactccttccatctgcaggcggtagagcatggagcagctgtccaccacgtccagcattgcatcgttggcctgcaggctgggaaggatgtgggtatcgtagatggtcagcgcggcctcatattcgccctggaagaataaagttctccttattaaacccttctcaatcagatataaagcccagtgccaatagttatgacaagccaacatatcagagtccttccagaaggtctctgagtgctgcatgaattccaacccatccttgatctctgctttcatctcgtggatgtgagcgacggtgtgcaccgaccatgcgtcagcctggggctgcagacacagagcccatgtgttaccactcctggccccatcacagcctgcttttcctgcccagtagttgtctgtggggtgctggtgttgaagacaaagagttggtgcctctttggcgagtttttctgcctggtcgtagaagttggtttccatcaagccaaaagagtagatgcctttcacatagctgcttagggggatgtcaggtgtccagaaggggtaaattcgagcaacagaatctctcatctgttcctgatagcccaggtaaaaataagcatcatgggaaaatttcagggccaacatgtctgtcgggtggtcctggagaatctgttcccatagttcacaggctttcggaaagttcccattggcaaatgtctctactgcagacacgtgcagctgctcccgccttgtcagcggctgggttcttgaaatctccaccattgtcttcacagccaggtccagctctttgtccagcttcacggagcttccagtgccaatcagcacaaggccagtagccatggcgtggcccatcacaaaggttggatctgctgctttgagctttgacaggcagccctcgatgccaccgagactcttgtcattggtccattttacatactgggtcagcgtggcatcgaacagcttgcaggcttcgttgcttgtggtggagagcgggagcctcgcatccttccaggcctggcagtcgcgcagaggcgaggctgcggccat

SEQ ID NO: 1556 - DNA, 565 bp, Homo sapiens
  SIMILAR (17)..(361): 871254mologous to Homo sapiens fF27C3.2 (NOVEL PROTEIN SIMILAR TO MOUSE B99),accession number AL022325,Smith-Waterman Score=499.
gcaagccggcgctgcatctggacttccaccgatgacccccaaacgatgcccagggcgtggctctcccctgtgtgtgccagctcggagacgttcctctgagccccgcaagaactctgcaatgagaactgaaccaacaagggagagcaacagaaagacagattccaggctggtggatgtgtcccctgacaggggttctcctccttcccgtgtgcctcaggcacttaacttttctccagaggaaagcgattctactttctccaaaagtactgccacagaagtagctcgggaggaagccaagccgggtggagatgcagcccctagtgaggtgggcggattacttgagcccaggagttcgggaccagcctgggaaatgatgtgaaactcctgtccctacaaaaaatacaaaaattagccgggtgtggtagtgcatgcctgtagtcccagctacttgggaggctgaagtgggaggatggcctgagctcaaggagatgcaggctgcagtgggctgtgattgtgccactgcactccagcctgggcaccaatgtgagaacctgtcttggaaaaa

SEQ ID NO: 1557 - DNA, 2115 bp, Homo sapiens
  SIMILAR (3)..(515): 891254mologous to Homo sapiens dJ1163J1.3 (similar to mouse B99 protein),accession number AL031588,Smith-Waterman Score=789.
acattcttcttttggccgatgaaaaatttgacttcgatctttcattgtcttcttcgagtgcaaatgaagatgatgaagtcttcttcggaccctttggacataaagaaagatgtattgctgccagcttggaattaaataatccggttcccgaacagcctccgttgcccacatctgagagtccctttgcctggagccctctggccggggagaagttcgtggaggtgtacaaagaagctcacttactggctttacacattgagagcagcagccggaaccaggcagcccaagctgccaagcctgaagaccctcggagccagggcgtggaaagattcatacaggagtcaaaattaaaaataaacctctttgagaaagaaaaggaaatgaagaaaagccccacgtctcttaaaagggagacatactacctgtcagacagccccttgctggggccccctgtggggaatcatgcactgctcatgctgcaagtcaggcagcgactcagaggaagcccgggaccaaattgctgctgcctcgagcggcctctgttagaggaagaagcatccctggggctgcggagaagagaactgctaggatgcctaaaggaagaagaaaaagaaaataacaggtgttattttgaggatgaggatgttgtggaggatgaggagaaggctgaggatgtggagaagctggaagctcacgcattgctgcccaagaaagagattccagctagtccttccaggacaaaaatcccagctgagaaggaatcccaccgggatgttctccctgacaaacctgccccgggtgctgtcaatgtgccggccgccggaagccacttgggccagggcaagcgggcgatccctgttccaaacaaggtaaataacgagatctttgctgattctgttttttcacattttgccccagttggggctgaagaagaccctgttaaaagcacccggctctaccagcaatctcgcaaggaagtcctcctcggggcctgtttggagcggggcatccagtgcgtgcacatccccagcagtgggcaaaggcctctgctgcacacccgtgtgtcccgcaaggcccgcgagacccctgcactcctgctgctgcaagatgacaccttctcggccctggctcatgtggcagtgcagagagggactcgagtgtccctgaggttctggcggaacctgggtgctgccactcatgtgacaggagggctggaagaggcagcgggcagagtccacggccccattttggaagtagtgaggtgctggggtgaacatggaggcctggtgaacgcacaggtgactccccggacagctcaacaccaaagctttcgcgggcacagcggccgcagtcgtgcacgtcagttggcagctcacgacactgatgttgtgtttgccagggtcactgtccacagcaccccggttagacgctcatctgggccagcaccacaaagcctgctgagcgcatggcgtgtgtcagccttgcccacacccgccagccggcgctgctctggccttccaccgatgacccccaaaacgatgcccagggccgtgggctctcccctgtgtgtgccagctcggagacgttcctctgagccccgcaagaactctgcaatgagaactgaaccaacaagggagagcaacagaaagacagattccaggctggtggatgtgtcccctgacaggggttctcctccttcccgtgtgcctcaggcacttaaacttttctccagaggaaagcgattctactttctccaaaagtactgccacagaagtagctcgggaggaagccaagccgggtggagatgcagcccctagtgaggctcttcttgtagatatcaaactggaaccactcgcggtcactccagatgctgcaagccagcccctcattgaccttcctctcatcgacttctgcgataccccagaagcacacgtggctgtaggatctgaaagcaggcctctgatcgacctcatgacaaacactccagacatgaataaaaatgtggccaaaccttcaccggtggtgggacagctcatagacctgagctcccctctgatccagctgagccctgaggctgacaaggagaacgtggattccccactcctcaagttctaa

SEQ ID NO: 1558 - DNA, 3322 bp, Homo sapiens
  SIMILAR (504)..(2066): 491254mologous to Homo sapiens G-2 and S-phase expressed 1,accession number BC006325,Smith-Waterman Score=949.
cgaaccgtgtcgaccgcgtttaaatccgtgccggaggcgcgtcctgcatcgtctgccgctttggtgacttctgacagctctctccatggaagaaggcggcggccgcgatgagccttcagcctcccgggcaggggacgtgaacatggatgaccctaagaaggaagacattcttattttggccgatgaaaatatctccaccttcgatctttcattgtcttcttcgagtgcaaatgaagatgatgaagtcttcttctgaccctttggacataaagaaagatgtattgctgccagcttggaattaaataatccggttcccgaacagcctccgttgcccacatctgagagtccctttgcctggagccctctggccggggagaagttcgtggaggtgtacaaagaagctcacttactggctttacacattgagagcagcagccggaaccaggcagcccaagctgccaagcctgaagaccctcggagccagggcgtggaaagattcatacaggagtcaaaattttaaaattaacctctttgagaaagaaaaggaaatgaagaaaagccccacgtctcttaaaaggggagacatactacctgtcagacagccccttgctggggccccctgtgggttgagcctcggctcttggcctcctccccggccctgcccagctctggtgcccaggcccgcctcacccgggcgccggggcctccgcactctgctcatgctttgcccagggaatcatgcactgctcatgctgcaagtcaggcagcgactcaaaggaagcccgggaccaaattgctgctgcctcgagcggcctctgttagaggaagaggcatccctggggctgcggagaagcccaagaaagagattccagctagtccttccaggacaaaaatcccagctgagaaggaatcccaccgggatgttctccctgacaaacctgccccgggtgctgtcaatgtgccggccgccggaagccacttgggccagggcaagcgggcgatccctgttcccaaacaagttggggctgaagaagaccctgttaaaagcacccggctcttacagcaattctgcaaaggaagtcctcctcgggggcttgtttggagcggggcatccagtgcgtgcactccccaaccagtggccaaagctaaatcaagtgaatttgcaagtattcctgcaaattagctccccggcctctgtccaaacatcagcaagtccaggcagaatgggaccccgccatgctgcggccagctctggcctgcaggccctgtggggtgcatcctcctggcaggccaagcgggtcgatgtttctgagctggcagcggagcagctcacggcaccccccctcagcatcccccacccaaccccagactccggaaggtggcggcccagtggctgaactccagttgcgcttggtcagaatcttctcaattgaataagactagaagtatcagacggcgagattcctgtctaaattccaagacaaaggttatgcctactcctacaaatcaatttaaaattcctaagttttctattggtgactccgccggacagctcaacaccaaagctttcgcgggcacagcggccgcagtcgtgcacgtcagttggcagggtcactgtccacagcaccccggttagacgctcatctgggccagcaccacaaagcctgctgagcgcacggcgtgtgtcagccttgcccacacctgccagccggcgctgctctggccttccaccgatgacccccaaaacgatgcccagggccgtgggctctccccttgtgtgtgccagctcggagacgttcctctgagccccgcaagaactctgcaatgagaactgaaccaacaagggagagcagcagaaagacagattccagggctggtggaatgtgtcccctgacaggggttctcctccttcccgtgtgcctcaggcacttaacttttctccagaggaaagcgattctactttctccaaaagtactgccacagaagtagctcgggaggaagccaagccgggtggagatgcagcccctagtgaggctcttcttgtagatatcaaactggaaccacttcgcggtcacttcagatgctgcaagccagcccctcattgaccttcctctcatcgacttctgcgataccccagaagcacacgtggctgtaggatctgaaagcaggcctctgatcgacctcatgacaaacactccagacatgaataaaaatgtggccaaacctttcaccggtggtgggacagctcatagacctgagctcccctctgattccagctgagccctgaggctgacaaggagaacgtggattccccactcctcaagttctaagccgaaccaaatcctttgccttgaaagaacagccctaaagtggttttcaaccctcagaaacaagctttaggctggttcgcagtggcttacacttgtaaccctagaacttgggaggcttgaggtgggcggattacttgagcccaggagttcgggaccagcctgggaaatatagtgaaactcctgtccctacaaaaaatacaaaaattagccgggtgtggtagtgcatgcctgtagtcccagctacttgggaggctgaagtgggaggatggcctgagctcaaggagatgcaggctgcagtagggctgtgattgtgccactgcactcaagcctgggcaccaatgtgagaacctgtcttggaaaaaaaaaaaaaagaaacatgttttagtagaagttttatttgaaaaagaaaaataagcataaatatattcccagtgcctgccgagggtcgcctgcagcgactggggccaccacggaccacccaaggcctctgcttcccgccgccaccctcctcgctgccattctctgggctggaatctgaagcctcagtcactctaaatgaagaatcttctttcgaatgttttgtatgtaaaatagcaagtggcttattttttaaagttacgctttgtataaatagtcagatattctagatttacattaaattgtaaaataaatggacttattgaagcatatcttgatttttaagcttatcttgattttcaaacatgcatagctatttttatcactctaatcagtaaggctactatctagactcgaatgctttcatacaagtgattttcaaaaattagtcaataaaaattgatgtcagtgcagggcccaggcccgcccccagatacactagtttctaggtctggggccagcctagtaattgttactaggcacacaggtgatgctgactcgatggcctgagacacaccccttgagaagaagctgctctggggagacgagggtatgagtggaaagaggatgggcga

SEQ ID NO: 1559 - DNA, 353 bp, Homo sapiens
  SIMILAR (83)..(187): 911254mologous to Homo sapiens phosphate cyclase,accession number Y11651,Smith-Waterman Score=157.
gatgtgcaactggagggggcaaaaattggctcaacagaaataacctttacaccagagaagatcaaaggtggaatccacacttgcatataccaagacagcagggagtgtgtgcctcttgatgcaggtctcaatgccgagtgttctctttgctgcttctccatcacaacttcatttgaaaggtggaactatttaaagttgcacaagatatggcaacggcagcagttagatgcatcaaaaaggagatccgggatttgtatgttaacatccagcctgttcaagaacctaaagaccaagcatttggcaatggaaatggaataataattattgctgagacctccactggctgtttgttt

SEQ ID NO: 1560 - DNA, 1401 bp, Homo sapiens
  SIMILAR (891)..(1091): 1001254mologous to Homo sapiens Human signal peptide containing protein HSPP-74 SEQ ID NO:74,accession number AAY87297,Smith-Waterman Score=345.
cccgagcactagaagctgcataagttacacaggatgtgcttctgcagcctacagatgcagaaccagaatgagggggacaattccacccactcgagggctgccccctcttccttagcagacgaaccagtaatgggggcaaggctggggcatcccagcccacacaccctggatgcccagcaaggccacagaaagagcctgatgtccatgatccaggtggctctgagaagcttggcctggacacctgagcctgcggccggtactcctgccttctccccatctatccccaaggcctctgcctctcagcctcttccatggtcggtttaggctgctgagttttctgtgcttccccaagaaccagtgggatcaatgccggcggcctctgtgatggttgctgactaatccgggatttcatgagtcagaggcaccacccctcaccccagctgcctgctgcttctgacggatcttggtgctcaggctgcctgggctctccgagtgaggacgcagcctccatatttgggtgcactcaggcatggctggggacaagccagcttgccccagggttcttcccctggtgattctcgcctgctttctcatctcaggggaggcagtggcacctccctctccctgctgacatgaagagagctatgatatgccactgctgccaactcatcctctgcccccacctcgaaacccacagtccccagtggagggccactactcatccccattggtttcccaggggaggggtgttgtctggaagggcaggttcagatgcagccttccagatttagaggcactgggaggacagtggctgagtggaggcgcccagacctgggcaggcagcaggctcaggcccacaccttgtgatttttgaaaccaaagcccagaagatgatgtttacttctctctccctggctctccccttcttactgcaaaccatgctgtgccttagggcccttctcatagctgttcctcatggccatgactggaacagggatgcaacctctttctacacaagcacagttagttgggtgaagtctttttttttgtttgttttagacggagtttcactcttgttgcccaggctggagtgaagtggggtgaccttggctcactgccaaactccccagcagcctcagcctccctagtagctgggactacaggcacccactaccacgcctggctaattctttgtatttttagtaaagatggggtttgaccgtgttagccaggatggtctcgatctcctgacctcgtgatccacccacctcggcctcccaaagtgctgggattataggtgtgagcccccgcgccgggccggttgctggcatcttaatgttctgtaggtggaatatttccaataaacccaagggtgccgtaattgaaaaaaaaaaaaaaaaa

SEQ ID NO: 1561 - DNA, 1548 bp, Homo sapiens
  SIMILAR (786)..(905): 971254mologous to Homo sapiens phosphate cyclase,accession number Y11651,Smith-Waterman Score=202.
cgtcaggctcctgcaaccccaggcatgaaccaaggtttctgaactactgtgcgggagccaacgtctcttctttctcccgctctggcggaggctttgtcgctgcgggctgggccccagggtgtcccccatggcggggccgcgggtggaggtcgatggcagcatcatggaagggggcggccagatcctgagagtctctacggccttgagctgtctcctaggcctccccttgcgggtgcagaagatccgagccggccggagcacgccaggcctgagtattatgacctgaaggcctcaacatttatctggactggaaatgattcgagatttgtgtgatgggcaactggagggggcagaaattggctcaacagaaataacctttacaccagagaagatcaaaggtggaatccacacagcagataccaagacagcagggagtgtgtgcctcttgatgcaggtctcaatgccgtgtgttctctttgctgcttctccatcagaacttcatttgaaaggtggaactaatgctgaaatggcaccacagatcgattatacagtgatggtcttcaagccaattgttgaaaaatttggtttcatatttaattgtgacattaaaacaaggggatattacccaaaagggggtggtgaagtgattgttcgaatgtcaccagttaaacaattgaaccctataaatttaactgagcgtggctgtgtgactaagatatatggaagagctttcgttgctggtgttttgccatttaaagtagcaaaagatatggcagcggcagcagcttagatgcatcagaaaggagatccgggatttgtatgttaacatccagcctgttcaagaacctaaagaccaagcatttggcaatggaaatggaataataattattgctgagacctccactcggctgtttgtttgctggatcatcgcttggtaaaccggggtttaattccgacaaagttgtaattgaagcttgccgaatggctattagcaaatcttagacatggtggtacctgtggatgagtatcctgcaagacccagcttgattgttttccatgggcattagcccaatggagtttcccagaataaaaacagggaccagtttacactccatacgcaaacccgccgatacattttgctgaacaaattgccaagggctaaattttattgtgaagaaatccagaagatgaagaagacgccggctaaagatacttatattattgaatgccaaggaattgggatgacaaatccaaatctatagagtatttgcctcttaaatgataccctcattgaatatattgcactattttcataaatactataaaataatgactaggaagtaacttattaaaggctatgacttaaatttgaagatgaagtacagtgttctagggtttgctgagaagagcttcacttaaattaattcttcactcttgaatattctctctgagagataggacaatgaaatatcagttggtggatatgtgtgatagctgatttcaatattgaagtattgaaataaaatattctttacacctgaagtaaat

SEQ ID NO: 1562 - DNA, 1189 bp, Homo sapiens
  SIMILAR (918)..(1187): 601254mologous to Homo sapiens Human myelin oligodendrocyte glycoprotein gene,accession number AAZ29204,Smith-Waterman Score= 229.
ccaaatccttaagtttacaaagctgttggaaaactttgtgtcctgatttcaacaatcacgctttgtttgaaagatgagccaagctcacagacactaaattttatgtcatgccataagctggagaggagccatttggctacagctgcggaacttcattgaggagcaaatgaaaggcacatggacgagcacgctggtgcagttcatgttcttcctgcctgtgaattgaatactgtcctggtagcagttttgggtcggtcaggagctcaaggctggtttgtgtggctgactacggatgagcactgaagttgcctcaaagaattaaggggtgtccacaccagcctctgggggtctttggtgtgtagtcttccaggtagagctggttttacaagtaggtggccatctacttgatgtgatgtgagcgatgccagacagctctctctgaaccccaggtaatgccctgaaatctggtgatcctggctgatctgtgaccaatagagattagctccttgggatttggggtcctaaaaggtccctgaaaaaatgcaccccttgtctttaagccaacattggtgaaggaactgagaactcttagggttacataaaaaaagacccctgttgagatagtttatgcagatacctggaaggaactagagatgccaggaggaagactgagacccagaatgaagcaaggcatgagggctccaaagtgaactgcacccatcccagagtctcagccaagatggccctttcctagagggacgggcaccttccacctgcccacaggcactgctacctatgggaattgcagaaggccgttgtacacacgcgcatgcacgcagtggccctctgccctttagaatatggaagcaaagtctgggtgcagtgactcacacttgtaatcccaacactttgggaggccgagacgggcagatcacctgagttcaggagttcaagaccagcctggccaacgtggcaaaaccccatctctactaaaaatacaaaaattagctgggcgtggtggcagtctcctgtaatcccagctacctaggaggctgaggcagagagagaatcgcttgaacccaggaggcggaggttgcagtgagctgagatcgcgcgactgcactccagcctgggcgacagagggaaactctgtctcaacaaaaaaataaataaaaaaaaaaaaaaaaaa

SEQ ID NO: 1563 - DNA, 2256 bp, Homo sapiens
cactgacttgctgtgtgaccttaggaagtctctgcccctctctcagcctcagtgtcccgagggccccgaagcattccattctcgtggaggagtttccttgctgagatttcaaatagtcctccccacctcaactgtcaccactgctaagggactctatccattgagcacatttttctaaggccctgctgtctgccgaggagcgccaagaagatgtcacttggttacacaacggactgcccacatccccaagctccgttcttgcccctcgtgtcctaggcccaacccagcctcccagacctcactttccccatcagcaatacctggtgttctcccaccttgaaaggactcttggctcctgccgggttcctgctcaggctggaattgggaaaatatgcatgtgacattcgatcatgctctaatgcccatcctctcacccatccatttcctcactcagtggagatttgccaaatgaataaacgacacctttgaggccccaggtgaagcggggccctactccggcctctgccttgggcctcgcctctgtcctcaggtcctctcagaggcagatacctaggggagctgctgctgcctgctcattctagcttccgattccattcccagcccctgcgttaaggtccctggagaggtggcgtcagtgggggtgaggaagggcatcttcctgactcctctgcccagtgctggaaggagcatgcctggggttagtggggccaggggccaggcagatggggggcctttggggaccagaagggggagatgttgcttcccagagcctctcttgctgtaaagaccccagtttttcctgggaagatgggactctggggtgtgtggtgctcaccagagttcaggccacccactgggcttcggcaggagattagggaagccccatcacctgaccacagccccccaccaacattcccccaaaatgcagcctaggaggccgcagtgctcttcttcctgcccagaccaaaatgttccttttagtcctcaatgttttatattctttttgttttgaaaatctcaattttaatcaggggttttaaaagaaaattgaaagcctgaacctccatttttcttcttggctccagttttgctggtcctctggagaactcttcgtgagcactggtgccgtgacccacttgggatctctgctgtgcccttctcgggcattccagaccaggtgtagcaaatgaaaaagtgcagttaattcaagaacaggaatccctgtgtccttgctgggatttccttttgggaacctgactttccgactccagatcctgctgtctggatcagtgttctggctggaggtgctggattctctgattttgcctcctcactctgtgtctggctttgctcctgggtcttggccctgggccatatgaggggccaggaaatgaacgacaaggaggataagagtgttctttcttgaaagccgggacttcccctcaagaacctgggcctggggccgggactctgcatgactgggagcaagtcacattaaacctcctgtgcctcgatttcccccttctacaaagtgggggccaatggattcttgtgtgtcagcactgttaactaccgagtgctgagttaaggggcaaaataatacccctttctctatgtatctctgtatgcacacgcactatatatatatatatatatatatatatatatatatatatacattcatgtaatcaccacttctcgatgtctatttcaaaacaaggctcctgagtagggggagaagagagccagcttgcaccttaaggcttaacaccataggaactttgctaagccattgtcccctgggaatacaagggccacacccgggaccaagtggcaaaacctgtgggcctttcaaacctcggggcccagggcattcctgcccaccccctgacaaaaaacaggttcccacagtgctacccttgcttcctgcccccttgaggtgggcccaggctgggctccctggctatgcagggatctctggttccccagggagacccttgggggcccaggcaggttaaggttcaggggtgataggggagagcaattactttgttcactgtatgcacccgcgggggcctgggagtccccatttgcaggtgggtagggcctccagcccaaaccacccagacctaggcttccctcttcgtcaggatccaccacagggttaggggacaggaagccttgttcttattctcaataaatcttacaaaattccaaaaaaaaaaaaaaaagggc

SEQ ID NO: 1564 - DNA, 850 bp, Homo sapiens
ttttttttttttttttccttgaccaatgccagaaaacctttatttccaccgagacctctcatccaattctcttctttccgggaactttttcccttccctactccaggtcgtaccctggccactcctttccttttggctggccaatgtctcctctgtaggctccagaaggctctcagggatgcaggcggcctcccgcaggtgtgaggttgcaatgggaacaaagacagctgtggtcccatagcaccctcatctggtgacatcctgctactgacagtcaaaagaagccttcccagatgaaattttagtcctctgcgcagccatgctcttcttccagcaaaagagccatgtgcagtcgggtctgctccccatgggggctttgatgtgggcccagcagtggatcagccttccagacacgctcaactctgcacactcttcctgccgcctcaggctttccaggaccctcccgagccttatcagagtcacttaccctcagggcctaactgaataccttgcctgggtgaccttggacagattcaacttaccctggactcagtttcataatatgaaaatgatagggttgggctacgtgattttcacgttgtgcttccagattgttagaagttagggggctgaaaggcattacctgtccctctctcaatttcactcatgctactttgtttttttaatctaccttttatatggggcttagaaaaaagggttctgggacaaacgtgagaatctctggctcctgtagctttcttttaaccttaccatcccagggttcctaagtgtgctctctccccaatggcgacctggccctgtttttcctttcttttttttggagatggag

SEQ ID NO: 1565 - DNA, 930 bp, Homo sapiens
  SIMILAR (343)..(927): 791254mologous to Homo sapiens sex comb on midleg-like-1 protein,accession number AF160728,Smith-Waterman Score=809.
atggcatatttacaagatagaacactaagaagtcgttacagtaactacagtagacctaaaagtactggtttggaaagactctttccaccacagataaaaacaagaatacctacttacgatgaagatgacaacactattctttatgcgtatgaaacaaaacctgaatttgtcaataaagttatatatgatgctctgcaaaacctggataagaagattgatgtgattcgtagaaaggtttcaaaaatccaacgtttccatgcgagatccctgtggacaaatcataagcgatatggatataaaaagcattcttaccggcttgttaaaaagcttaaactccagaaaatgaagaaaaatgaggtttacgagacattctcctaccctgaaagttacagccccactttaccagtgtcaaggcgtgagaataattccccgagcaaccttccaaggccatccttttgcatggaagaataccagcgagctgagctggaggaggacccgatcctcagccgcactccgagtccagtgcatccctcagatttctctgagcataattgtcagccgtattatgcatctgatggtgcaacgtatggttcttcttcagggctctgccttggcaaccctcgggctgacagcatccacaacacttactcaactgaccatgcttctgcagcaccaccttcaggtatgctggcccagggagagcccaatttggtacatgcccctgagatgatgagttactcagctttgatggagaataggtatactggatcatctctctgcttcccttctggtttggaaattgacgggaaggctctgctcctactcacgagtgacgtgttgctgaagcacttgggggtgaagctgggaacggctgtgaagctatgctactacattgaccgacttaaacaaggaaaatgctttgaaaattga

SEQ ID NO: 1566 - DNA, 3328 bp, Homo sapiens
  SIMILAR (1050)..(1316): 551254mologous to Homo sapiens sex comb on midleg-like-1 protein,accession number AF160728,Smith-Waterman Score=195.
caacttgtagtgtcgtggaattcagactgatgtcttaagtgtagttgggttaatgagaacacagttctgcaaatacatcttttcatgtagtcatagtatttacagtgagcaaaggtcctttgatatcacaaataggcctttgtaacagcctcttgaaagtgaaattaaaccctcaacttttcttttagttctgtctttcatcttcccttttaatttgttggtaaattttcctcagataaaaacaagaatacctacttacgatgaagatgacaacactattctttatgcgtatgaaacaaaacctgaatttgtcaataaagtatgttaattgctaattgccaaatatattaacatttgctgttttaaaggaaaagatgtaaattcctcgtatactatggagttcccgtaaactcacactcaagagaatatctctcccctgaatttgtatgcttgctttcatcagagaatgagcacttaaccaatttactttcccctttttcttatatagtagaaaattaagagcagttttgtactcactttcagtataaaactctaaacctggattcttctgatataataaattcttttcttgcccccttcctcaattggcagtttttcattctcatattaatgtgaattttaaaaatctctgcttaatttaagacttctgaaaccccttgaaaagttggtgataaataaaaacaatttaaataaataaatatagctcccccctgcccccagtgttcagtttggctgttacagaaataaatcattaactacttttaaaatattagcaggaaccgaatattgtatctgacgcatcctgtaatactgaagagcaactgaagacagttgatgatgtccttattcattgccaggttatatatgatgctctgcaaaacctggataagaagattgatgtgattcgtagaaaggcttcaaaaatccaacgtttccatgcgagatccctgctggccaaactcataagccacatcatcataacaagcattcctccccgcctgttcaaaagcttaaactccagaaaatgaagaaaaatgaggtttaccgagacattctcctaccctgaaagttacagccccactttaccagtgtcaaggcgtgagaataattcccccgagcaaccttccaaggccatcctttttgcatggaagaataccagcgagctgagctgggaggaggacccgattcctcagcccgcactccgagtcccagtgcatccctcagatttctctgaggcataattgtcagccgtattatgcatctggatgggtgcaacgtatggttcttcttcaggggctctgccttggcaaccctcgggctgacagcatccacaacacttactcaactgaccatgcttctgcagcaccaccttcagttacaaggtcaccagttgaaaatgacggttacatagaggaaggaagcatcactaagcacccttcaacctggtcggtggaagcagtggtcctatttctaaaacaaacagatcctcttgcattatgccctcttgtcgacctcttcagaagccatgaaattgacgggaaggctctgctccttactcacggagtgacggtgttgcctgaagcaacttggggggtgaagctgggaacgggcttgtgaagcctatgcctacctacattgacccgaccttaaacaaggaaaatgcctttgaaaattgaaaaaatcccttgtgcaaatttagattgggcccaaccttcctagaggcacccaatgccttccttagtgtggaatcatttttctgccctttagtcgtttttgttttgtagaaagtatctctcaaaatatattatagctagaattgtagaactatgttatagtccagtctacttctttaaaaaccatttaaactgctagatagtattagaatagtccaatagaaaattcattctttataggtctttaaaaattacttttattatattgtttacaaatatatttcatgcaagaaacagaaaaaaaaaaaaaccctttgattctggttcatctcgatacagagaaccaaaacagctaagagaggtattatcagggttgacaactcctatgattgaatctatgggaattattcctcagaagagaatttaaaggtgtacccatatatatctctttctggagtattttatctgtctgatgttgcagtattctacaagtttccagaaagagaatagccatataaattattttcctttctgctattatttctctatatgttttatttattcagatttagagtaaaaaataagcatataaacttttattatgtgctcttatcagaccctaagatatactattcgaaacatcgacgggatatttgatgcaagaaatattgtaccgcaagggtgggtttggatgacctactcgacatactttttttcaaaccaactattatattcaaactgtcatattttggctaagtttggacctataactacactttccattgtttgcaactctctatgaaggtacgtctgtcccaaaccttttaaaaggcataactgtattttatgtgtttattctttatatagatagtattttatattttattctcacccgaagtattcacacaatctttttaaaaaaaatttgaaatgggcattttgtattgccacagaggtagggatgagccatatattaggtggaaatgttttattttgtaaaatataaatggggttatttgccatcattaggtacccgctcaacttactttttagggggccagggaaccaatctgtagattggtttccatacagggaagttctccgtcctatgcaatgtttctaattaatttgcttaattctgagccattaatcctgctacactttgaatgatacattaattcagactaatctttgggggctttattttgtaagttagaactttcaagggaaacatgttcaacactattattttgttataaatttataactttgttattaccattgtgtaaccaaatataagggtttaccgagcctatgagaattgcctgcctatcacccattagcctatttgcctgtaatgtcaagaaaatgttcaccagatgcaagaatgtacattttcctttttagaaaacccaaatgtactttagacatgaatgcaactatttaaagaatagcttcatttatgttattccttacatgtcataagattcttacttaaacttggtcttctttcaagttgtttgtatgaagatgctgtacccacttgaacagtcctcaggtgtttacataaatactatgttttacagttttcatattttaaaatattaataaagttaaatcacaatagttcattg

SEQ ID NO: 1567 - DNA, 423 bp, Homo sapiens
  SIMILAR (4)..(423): 951254mologous to Homo sapiens unnamed protein product,accession number AK001179,Smith-Waterman Score=692.
gggcaagaattcctggcatctgtggctcggggagtagctcctgcagactcaccagaagctccaaggcgcagctttgctggtggaacatgggattgggaatatttaggatttgcatcaccagagtatcggaggaggcacagacaacgtcgtcgaggagatgttcacagtctactcagtaatcctccagaccctgatgagccaagtgaaagcactttagatattccagaaggcggcagcagcagccgcaggcctggcacatccgtggtaaggtctgcatctatgagtgtgctgcacagctcttccctgcgtgactacacccctgccagtcgctctgaaaaccaggactctcttcaggctctgagttccttggatgaagacgatcccaatatacttcttgcaatacagttatcactgcaagagtcg

SEQ ID NO: 1568 - DNA, 527 bp, Homo sapiens
  SIMILAR (92)..(484): 881254mologous to Homo sapiens unnamed protein product,accession number AK001179,Smith-Waterman Score=593.
  misc_feature (1)...(527): n = a,t,c or g
tttctncatctatgagtgtgctgcacngctcttccctgcgtgactacacccctgccagtcgctctgaaaccaggactctcttcaggctctgagttccttggatgaagacgatnccaatgacaatcttctcggcnacatcatggcttggtttcatgacatgaaccctcagagtattgccctgattcctccagcaactacagaaatcagtgcagattcccagctcccctgtatcaaagatgggtcagaaggtgtgaaggatgtggaactggtgctgccagaagantcaatgtttgaagatgccagtgtcagtgaaggtagaggaacccagatagaagaaaatcctttggaagaaaatattctggcgggggaancagcatctcaaactggtgacagtggtaacgagncagccaacagaggagatggttcagatgtttcaagtcaaacacctcaaacctcaagtgactggcttgaacnagtncanttantntgaactccacatagctgggcaccttntggagcnnnnnngn

SEQ ID NO: 1569 - DNA, 755 bp, Homo sapiens
  SIMILAR (1)..(276): 941254mologous to Homo sapiens unnamed protein product,accession number AK001179,Smith-Waterman Score=451.
atggcttggtttcatgacatgaaccctcagagtattgccctgattcctccagcaactacagaaatcagtgcagattcccagctcccctgtatcaaagatgggtcagaaggtgtgaaggatgtggaaatggtgctgccagaagattcaatgtttgaagatgccagtgtcagtgaaggtagaggaacccagatagaagaaaatcctttggaagaaaatattctggcgggggaagcagcatctcaagctggtgacagtggtaacgacggcagccaacagaggagatggttcagatgtttcaagtcaaacacctcaaacctcaagtgactggcttgaacaagtacatttagtgtgaactgcacacatctggggctctaaatggatttacaggtacagatcggtatgctaaggtgggaagtatgcttgatagagactttgaattcactttaattccaactcaggtgataaaccactgacattagggttgaatacagagaagttcccttggaatggtagcttccatttttttattttaaccttaccagggaatttcctttggtacttaattggaatagcttttccccctttttgctgacaaaaagaagagcaagagaaagagaaacaaaaatgaaataaataagttgtattccacactctaagaaaatgcagtcctctatttagcctaggcttgacaatacttaaattgaacatttaaaataaaggcttactccctaatctttgggtggctttcctttaaa

SEQ ID NO: 1570 - DNA, 551 bp, Homo sapiens
  SIMILAR (390)..(352): 691254mologous to Homo sapiens Human myelin oligodendrocyte glycoprotein gene,accession number AAZ29204,Smith-Waterman Score= 47.
cggacgcgtgggcggacccttggacagactcgtgggggcataagagacaccggctgccttcggaaagtacggcctccctcctggctgactggtcccaccaccctgacttatccagggacagagcaggatatgcctggcactcctcaatgcccaaggaaaccaaactgtgcttccccacccccaccaccatgccccaggctcactggctcatttcttgggagggcttaaagatggataatataacttcccttgcaccctgctgggccaaatataccaattctctctcccagcgtccaacctagcaagaaggtattaagtcctgcaaatcagatgagaattctggtctggcccctggccaacatggtgaaaccccatctctactaaaagtatacaaaattagctggatatggtggagcgtgcccataatcccagctactcaggaggctgaggcaggagaattgcttgaaccgggacctgggaggcggaggttgcagtgagccaagatcctgccactgcactccagcctggactacagagcaagactctgtctc

SEQ ID NO: 1571 - DNA, 4190 bp, Homo sapiens
  SIMILAR (2241)..(2288): 501254mologous to Homo sapiens Human nucleic acid-binding protein, NuABP-50,accession number AAB21046,Smith-Waterman Score= 41.
atgaggcagaactcagggggtaatgttcacttgcccgctgctcacctcgtgctgtgtggcctggttcctaacaggccatggacaggaaagaacaaaaacaaaagacatcaccttggatgtatcccccaacccccaactttagccaaaattgccaaagcagccaagggatcagcaggtaattttcgctaccctctaatacttggaagttttcctgcaaactgggtattcatgaacttctttcagagtaaagccacattggacttcaacttaatatgcagtttgaatgtgaaagatgttgcagaagtgttccagaagtggctgaagatagaaggaaaaaagtgccactgcctatcagaaaaaacaaaacaaaacatgggaaatacaaccaccaaattccgtaaagcactcatcaatggtgatgaaaacctggcctgccaaatatatgaaaacaatcctcagctaaaagaatctcttgatccaaatacatcttatggggagccctaccagcacaatactccattacattatgctgctagacatggaatgaataaaatattagggacttttcttggtagagatggaaatccaaataaacggaatgtgcacaatgaaacatctatgcatttgttgtgtatgggacctcaaattatgatatctgaaggagcccttcatcctcgcttggcacgccccacagaagatgatttcagaagagcagattgtctgcagatgatcttaaaatggaaaggagcaaaacttgaccagggtgaatatgagagagcagctattgatgctgttgataacaaaaaaaacacacccttgcactatgctgctgcctcagggatgaaagcctgtgtagagcttttagtaaaacatggaggagacttgtttgctgagaatgaaaataaagatactccttgtgattgtgctgaaaagcaacaccacaaagatttggccctcaatctggaatctcaaatggtattctcacgggatcccgaggctgaagaaatagaagctgaatatgctgcattagacaaacgagagccatatgaaggattaaggcctcaggatcttcgtagactaaaagatatgcttattgtggaaactgcagacatgcttcaggctcctctctttactgctgaagctttacttcgagctcatgactgggacagggagaaattacttgaagcttggatgtccaacccggagaactgctgccaacgatcaggtgttcaaatgccaactccaccaccaagtgggtataatgcctgggacacgctcccatctccaagaactccaaggactacacgctcttctgtcacctccccagatgaaatcagcttatctcctggggatttagacaccagtttgtgtgacatttgtatgtgcagtatctctgtatttgaagaccctgtggatatgccctgtggacatgacttttgtaaaggatgttgggagtcgtttttgaatctgaaaattcaagaaggtgaagctcacaacattttttgccctgcatatgattgcttccaacttgtacctgtggatatcatagaaagtgtagtttcaaaggagatggacaaacgatacctacagtttgatattaaggcctttgttgaaaataatcctgccattaaatggtgtcctactccaggctgtgacagagcagtaagactaacgaaacaagggtcaaatacatctggatctgatacactcagcttcccattgctgagagctcctgctgttgattgtggaaaaggacacctcttctgctgggagtgccttggtgaagcacatgagccttgtgactgccaaacatggaagaattgcgctgcaaaaaataaccgaaatgaaaccagaagaactgtgtgggagttagtgaagcctacgaggatgaccgccaatggtctgctgagtgatgaactgaactgccaagccttgtgccaactgtaagtctccaatacagaagaatgaaggctgcaatcacatgcagtgtgctaagtgcaagtatgacttttgctggatttgccttgaagagtgggaaaaaacatagtttcgtccactgggaggttatttacagatgtactcggtatgaagtcatttcaacacgtggaggagcaatccaaggaaatgactgtggaggctgagaaaaaacacaaacgatttcaggaacttgacagatttatgcactattatacaagatttaaaaaccatgagcataagttatcagctagaacaacgccttcttaaaacagccaaagaaaagattggagcaattgagcagagctctcaaagaaactcgaaggaggctgtccagataccacttttcattgaagatgcagttcatgtgctcttaaaaactcggcgcattctcaagtgttcttatccatatggatttttcttggaacctaaaagcacaaagaaagaaatttttgaactaatgcaaacagacctagaaatggtcactgaagaccttgcccagaaagtcaataggccttaccttcgcacaccccgccacaagatcatcaaagcagcatgccttgtacagcagaagaggcaagaattcctgggcatctgtggctcggggagtagctcctgcagactcaccagaagctccaaggcgcacttttgctgggtgggaacatggggattggggaatatttaggatttgcatcaccagagggaatatggctggaattttcagtattcggagggaggcacagacaacgtcgtcgaggagatgtttcacagtctactcagtaatcctccagaccctgatgagccaagtgaaagcactttagatattccagaaggcggcagcagcagccgcaggcctggcacatccgtggtaagttctgcatctatgagtgtgctgtacagctcttcccctgcgtgacttacacccctgaccagtcgctctggaaaaccaggactctctttcaggctctggagtttcttgggatgaaggacgatcccaatatacttcttgcaatacagttatcactgcaagagtctgggctggccctcgatgaagaaactagagacttcctcagtaatgaagcatccttaggtgcgataggcacttctttaccttccaggctggactctgtccccagaaatacagattagccctcgggctgcattgagcagctctgagcttttggaacttggtgacagcctcatgagactaggagcagagaatgacccattttcaacttgacacccttgagctcacaccctctcagtgaggcaagaagtgatttctgtccctcatctagtgatcctgactcagctggccaggaccccaacatcaatgacaatcttctcggcaacatcatggcttggtttcatgacatgaaccctcagagtattgccctgattcctccagcaactacagaaatcagtgcagattcccagctcccctgtatcaaagatgggtcagaaggtgcgaaggatgtggaactggtgctgccagaagattcaatgtttgaagatgccagtgtctgtgaaggtagaggaacccagatagaagaaaatcctttggaagaaaatattctggcgggggaagcagcatcttcaagctggtgacagtggtaacgaggcagccaacagagggagatggttcagatgtttcaagtcaaacacctcaaacctcaagtgactggcttgaacaagagacaatgtttagaggcttagcaacaagaggtgagattgaaacaaacagtgcaaacggtgctttgttactcctgcaggcaggcagaggaagggatgttttcaaggtaaggagtcagcaactcctgttacaatgtaaaataaatggtgttatcaataagaaccttgcttttcgattgagagccttggatagactgaaaacagaaggttatttgattgagctgcaagcagttgcaacactgttcaaatgccgaagtgaaggcaatgccatgcctaaaagtgcagagcaggccacagctgattcagccagtaatgagggcaaggtgctgggtgcaggagtgacagaaggtgccgaagacttcgggacgcagaataaaaatgaaaaggtcgatgatgtccaagtagatgttcaggatagcaaaaacatacccttcagggtccagggaataatggcggtgccctcccagcatgagctgcacatcgatcaccaagtacttgaagaaaaggaagaattagctacttaa

SEQ ID NO: 1572 - DNA, 316 bp, Homo sapiens
  SIMILAR (225)..(61): 541254mologous to Homo sapiens Human NOV16 protein,accession number AAB61147,Smith-Waterman Score=139.
cgagtccaccgtctcatgctgcgagaagcccacgggcgcgatgccatagatgcacacggcatgtggtcgtccatgtccatcgatctggcgcttgacgaagctgtcgatgcgcttgcggtaggtgcggttggtgagccgtcccaccatgcccagcccatacggccgcttctcccgggcgaagagcttgcgcaccggcaccgcgatacgctggccccgtcgcggccccgcggtgctcaccacctcctgtcggagccgcaccttgggctgcggggctgcggcgccctccttctgcttccgccagcctcgctccaagggc

SEQ ID NO: 1573 - DNA, 885 bp, Homo sapiens
  SIMILAR (798)..(355): 501254mologous to Homo sapiens Human NOV16 protein,accession number AAB61147,Smith-Waterman Score=304.
ttaacggtatttggaggtcagcacggtgctcacagaagccaggaacttgtccaaggaggcgtgcaccgcaagggtgaactctgcggggaagtgggcggccaaggtcaccaacaggcagtggcttaagagcttgaagttgaaccgggtccaccctataacttgggcgcatgcaggatcctcaaggcggacaaatgcgttgggcatattctctaacattcgccaaggacgtttgtcaactcggtttgtctcattattttgcgggggcagcatcaggaggctgcgctcaagctcgctgcggtccagggccccgccggtgaggtccgcctgctccggtgccttctcccagtcctttagcgctgcctccgatggggactcgaaaacttcatccgggtatgtggacagctcttcatggaggataccttcccgggcaaagaaggatgtgtccagctcatcggggaaatcagttgtgtcctcctccagaaagctagctggagtgaagcttcgacgctgtgcccggcgaaaggtgccatccctaacggagcggcctttcatcagcgctgcggccgcccggaagctcatcttggccaccgactctcgcttgcgccgccgcgggagccggtggaaacctgagcgggagctggagaatgaacatagggaggcagcaccctgcgtgaccggagtgtgtggggcactcatgcctttcgcaatgtcatctgccacacggaaggcacgggcaccggccagggggtctattatttctaaacggcccctcggaaaagttttttgggcatcacttccaccccacaaaaaccctaaagggcttgcccggaaatgcttttcccattcaagaaacttggcccccttggtgcaaatacccaaaaccat

SEQ ID NO: 1574 - DNA, 974 bp, Homo sapiens
  SIMILAR (857)..(934): 841254mologous to Homo sapiens Human NOV16 protein,accession number AAB61147,Smith-Waterman Score=129.
  misc_feature (1)...(974): n = a,t,c or g
ggatttccagcgccccacagcttgcgggccacaagagacagtttggctctgtctgccaccaggatcccagggtgtgtgatgagccctcctccgaagaccctcatgagtggccagaagacatcaccaagtggccggtgagctgcagtgggggggttgttagggagccctccgtgtcatgtgggagagaatgccacaccccacccactggtgataccagagattcccatcatgggaccacctcacgttttcagaggctgtgcacctgccctttgtacagcctgtccatcaaccagcgcctgcccctctgagcaagtagatcaagagaactagatggagacttgaaaggtcaagtgacattattccagtttgatagagactcagtgtggtggcctgcttgaagtcaaggaagccacaccgttttctgctttatgagcccacccatctttgcctctacccccaaacgtggtgtggggccaaaggttgggggaggccctgactcagctcgtcctcatttgtgacccagatctgcaccaaaaacagcgctgggaaccacaccaaccatccccacatggactgtgtcatcacaggacggccctgctgcattggcaccaagggcaggtacgtgtgcgtgccagcgagtgcagctggtctctgggctcagagcatcgccctagggtgtgccttctccctaaccaaatcctgaaataagccagtataccaaggatgtggggttagagggggtctggacttccttggggccaacaaaggtgggtaggtgcggctgaaactcgccctggatgccagcaatccccctctgcaaggcagcagtctccgaaccctggcctgcctttctaggtgtgagatcacctcccgggagtactgtgacttcatgaggggctacttccatgaggaggccacgctctgctctcangtaggtctgcagagtggccgtcgttcccctcccccagctactg

SEQ ID NO: 1575 - DNA, 3138 bp, Homo sapiens
  SIMILAR (1570)..(2832): 411254mologous to Homo sapiens Human NOV17 protein,accession number AAB61148,Smith-Waterman Score=687.
atgagtgaggcccgcagggacagcacgagcagcctgcagcgcaagaagccaccctggctaaagctggacattccctctgcggtgcccctgacggcagaagagcccagcttcctgcaggtaggccctggcctgcagggactgtgggtgccccctgtccagtaccctcaccatgaccctgttgcccagcccctgaggcgacaggctttcctgaggagtgtgagtatgccagccgagacagcccacatctcttcaccccaccatgagctccggcggccggtgctgcaacgccagacgtccatcacacagaccatccgcagcagccgacaagtacgcttcgggcgtgtccacactctgcccctcttgggtccccggggctgcccgcagggccttcccacagcgccagtctctctcttggtccctgctcagggggaccgccgaactggtttggagtgagcaaggacagtgacagcacccagaaaatggcagcgcaagagcatccgtcactgcagccagcgctacgggaagctgaagccccaggtcctccgggagctggacctgcccagccaggacaacgtgtcgctgaccaagcaccgagacgccacccccactctacgtggggccatgccagctgggcatgcagaagatcatagaccccctggcccgtggccgtgccttccgtgtggcagatgacactgcggaaggcctgagtgccccacacactcccgtcacgccgggtgctgcctccctctgctccttctccagctccccgctcaggtttccaccggctcccgcggcggcgcaagcgagaagtcggttggccaagatgagcttccgggcggccgcagcgctgatgaaaggccgctccgttagggatggcacctttcgccgggcacagcgtcgaagcttcactccagctagctttctggaggaggacacaactgatttccccgatgagctggacacatccttctttgcccgggaaggtatcctccatgaagagctgtccacatacccggatgaagttttcgagtccccatcggaggcagcgctaaaggacttgggagaaggcaccggagcaggcggacctcaccggcggggccctggaccgcagcgagcttgagcgcagccacctgatgctgcccttggagcgaggctggcggaagcagaaggagggcgccgcagccccgcagcccaaggtgcggctccgacaggaggtggtgagcaccgcggggccgcgacggggccagcgtatcgcggtgccggtgcgcaagctcttcgcccgggagaagcggccgtatgggctgggcatggtgggacggctcaccaaccgcacctaccgcaagcgcatcgacagcttcgtcaagcgccagatcgaggacatggacgaccacaggcccttcttcacctactggcttaccttcgtgcactcgctcgtcaccatcctagccgtgtgcatctatggcatcgcgcccgtgggcttctcgcagcatgagacggtggactcggtgctgcggaaccgcggggtctacgagaacgtcaagtacgtgcagcaggagaacttctggatcgggcccagctcggaggcacctcatccacctgggcgcctagatttcgccctgcatgcgccaggacccgcaggggctcagcttcattcgctcggcgcgcgagcgcgagaagcactccgcctgctgcgtgcgcaacgacaggtcgggctgcgtgcagacctcggaggaggagtgctcgtccacgctggcagtgtgggtgaagtggcccatccatcccagcgccccagagcttgcgggccacaagagacagtttggctctgtctgccaccaggatcccagggtgtgtgatgagccctcctccgaagaccctcatgagtggccagaagacatcaccaagtggccgatctgcaccaaaaacagcgctgggaaccacaccaaccatccccacatggactgtgtcatcacaggacggccctgctgcattggcaccaagggcaggtacgtgtgcgtgccagcgagtgcagctggtctctgggctcagagcatcgccctagggtgtgagatcacctcccgggagtactgtgacttcatgaggggctacttccatgaggaggccacgctctgctctcaggtgcactgcatggatgatgtgtgtgggctcctgccttttctcaaccccgaggtgcctgaccagttctaccgcctgtggctatccctcttcctgcacgccgggcaagtgacactgatcttgcactgcctggtgtccatctgcttccagatgactgtcctgcgggacctggagaagctggcaggctggcaccgcatagccatcatctacctgctgagtggtgtcaccggcaacctggccaagtgccatcttcctgccataccgagcagaggtgggtcctgctgggctcccagttcggcatcctggcctgcctcttccgtggaagctcttccagagctgggcagatcctgggcgcggccctggcgtgccttcttcaagcttgctggctgtgggtgctcttcctctttcacctttggggcttgttgccgtgggatttgacaacttttgcccacatcttcgggggttcatcagtggccctcttcctctccttcgccttcttgccctacatcagctttggcaaagttcgacctgtgccggaaacgctgccagatcatcatctttcaggtggtcttcctcgggcctcctggctggcctggtggtcctcttctacgtctatcctgtccgctgtgagtcgtgtgagttcctcacctgcatcccctttcactgacaagttactgtgagaagtacgaactggaacgctcagctccactgagctggctgcgggctccagcggccgtgtgctccagcaggccagagccagacacgacctccctgagccctacaggccttacaggagtcacctgctccatgtggggaactggcactgttttcctgaacacagacctctttcttgtgccttgttcacttctgttgaacccctcgtacttgccgggcatttattatactacttcctgtcataaccttctaacttgtttcttgacgaccacctcatgtggccaataaatggactgggagcgttttagctgccattaacttgaaaaaaaa

SEQ ID NO: 1576 - DNA, 939 bp, Homo sapiens
  SIMILAR (145)..(249): 771254mologous to Homo sapiens Human secreted protein, SEQ ID NO: 5327,accession number AAG01246,Smith-Waterman Score=134.
atggcggcgctctacgcctgcaccaagtgccaccagcgcttccccttcgaggcgctgtctcaggggcagcagctgtgcaaggaatgtcggattgcacaccctgttgtgaagtgcacctactgcaggactgagtaccagcaggagaggctagagtgcaatggcacgatctcggctcactgcaacctccacctcccaggttcaagcgattctcctgcctcatcctcccgagtagctgggattacaggcattaaaaccaatacaatatgcaagaaatgtgctcagaacgtgcagttgtatggaacgcccaaaccttgtcagtattgcaacataattgcagcatttattgggaataaatgccagcgctgcacaaattcagaaaagaagtatggaccaccctattcttgtgaacagtgcaagcagcagtgtgcatttgacaggaaagatgatagaaagaaggtagatgggaaattgctgtgctggctgtgcacactttcatacaaacgggtccttcagaagaccaaagagcagaggaaacacctgagtagctcttctcgtgctggccaccaggagaaggagcagtatagtcgcctgagtggtggtggccattataacagcttctccccagacctggctctggactcaccaggcactgaccactttgtcatcattgcccaactgaaggaagaagtggctaccctgaagaagatgttgcatcaaaaggatcaaatgattttagagaaagagaagaagattacagagttgaaggctgattttcagtaccaggaatcgcagatgagagccaaaatgaaccagatggagaaaacccacaaagaagtcacagaacaactgcaggccaaaaaccgagagctcctgaagcaggcagctgctttgtccaagagcaagaagtcagagaagtcaggagctataacctctccatga

SEQ ID NO: 1577 - DNA, 1026 bp, Homo sapiens
  SIMILAR (145)..(249): 771254mologous to Homo sapiens Human secreted protein, SEQ ID NO: 5327,accession number AAG01246,Smith-Waterman Score=134.
atggcggcgctctacgcctgcaccaagtgccaccagcgcttccccttcgaggcgctgtctcaggggcagcagctgtgcaaggaatgtcggattgcacaccctgttgtgaagtgcacctactgcaggactgagtaccagcaggagaggctagagtgcaatggcacgatctcggctcactgcaacctccacctcccaggttcaagcgattctcctgcctcatcctcccgagtagctgggattacaggcattaaaaccaatacaatatgcaagaaatgtgctcagaacgtgcagttgtatggaacgcccaaaccttgtcagtattgcaacataattgcagcatttattgggaataaatgccagcgctgcacaaattcagaaaagaagtatggaccaccctattcttgtgaacagtgcaagcagcagtgtgcatttgacaggaaagatgatagaaagaaggtagatgggaaattgctgtgctggctgtgcacactttcatacaaacgggtccttcagaagaccaaagagcagaggaaacacctgagtagctcttctcgtgctggccaccaggagaaggagcagtatagtcgcctgagtggtggtggccattataacagccagaaaacactttctacatcttcaattcaaaatgaaatcccaaagaaaaagtccaagtttgagtcaatcacaactaatggagacagcttctccccagacctggctctggactcaccaggcactgaccactttgtcatcattgcccaactgaaggaagaagtggctaccctgaagaagatgttgcatcaaaaggatcaaatgattttagagaaagagaagaagattacagagttgaaggctgattttcagtaccaggaatcgcagatgagagccaaaatgaaccagatggagaaaacccacaaagaagtcacagaacaactgcaggccaaaaaccgagagctcctgaagcaggcagctgctttgtccaagagcaagaagtcagagaagtcaggagctataacctctccatga

SEQ ID NO: 1578 - DNA, 1366 bp, Homo sapiens
  SIMILAR (3)..(107): 711254mologous to Homo sapiens Human myelin oligodendrocyte glycoprotein gene,accession number AAZ29204,Smith-Waterman Score= 125.
tctcggctaactgcaacctccgcctcccgggttcaagcgattctcctgcctcagcctctcgagtagctgggattacaggatgcgccaccatgcctggctaatttttgtatttttagtagagatgggtttcacctgtaatctcagcctctcgagtagctgggattacaggcatgcgccaccatgcctggctaatttttgtatttttagtagagatggggtttcaacatgtttgggccaggctgggtctcaaactcctgacctcaaggttatctgcccacttgggcctcccaaaagtgctgggattacaggcgtgagccactgctcctggcctgttatatatgtcttaagtacccttctgcatgcagtcagaaatgttcttttcaagaggacatttcctttaaaaagttcaagtttcttatcttacgataaagagatatttcctatacttattggcctaaaattctatttggtcactcttacctcttttgtgaaaggccacatcttgctaaagtagcagctactgaactgaccagaaacaaactcaaacactgaatttgacaaaccaacctgctgaatataagcaactttttctaagatgaaatgtaaaaaagaaaaagaaaaaccaaaaagcaacaccttctagaaagccattcatcttatctcataaaattaattccccagagttatctcatgtagtagcagcattatcaaatagtgcaattcttcaaaattgatttcaaataatatctttctaaaataaattacatttacttacagctttgcttataaaaccacagcttaaaacacttagccctcaaatgggtaaattactataagcaataactgtcttgtctacatggtaatgaaatgcacgtgcacgcacacatgtgtgtgtgaaggccaaagataccgcaacaaggtaaaaacatgtaatattaaataaaaagtaaacagtacataatggaatttttagttttggtacttctaatcatattcccgtcaataataagaactataaataggtaattgttaaattaagcatctatgtaagaaaaggcaaggagctatatactaaagaacagtgataatttgtatgtttcatgctatataacctataaagtacatgcaaaacagcatgatcctgaattccatattttatagttaatttacataaatgtggcacatacagaaaattacaaatcttaaaagattatgcttttcccgcccacttttttcatcttctatttattaatcagaaactaggcactttaatctaaaaattcgcaatttaaaaatgcattttaggagtaagacatggtgacacatgcctctggtatgaggagttgaattccaccgcactgtactg

SEQ ID NO: 1579 - DNA, 403 bp, Homo sapiens
  SIMILAR (1)..(132): 1001254mologous to Homo sapiens BIGH3,accession number AC005219,Smith-Waterman Score=213.
  misc_feature (1)...(403): n = a,t,c or g
gtcatcaccaatgttctgcagcctccagccaacagacctcaggaaagaggngatgaacttgcagactctgcgcttgagatcttcaaacaagcatcagcgttttccagggcttcccagaggtctgtgcgactagttattagagaggatgaagcattagcttgaagcactacaggaggaatgcaccacggcagctctccgccaatttctctcagatttccacagagactgtttgaatgttttcaaaaccaagtatcacactttaatgtacatgggccgcaccataatgagatgtgagccttgtgcatgncnnnngacggaagggagagagatgtacttttnnaanatcatgttccccctaaacatgggctgttaacccactgcatgcagaaacttggatgtcact

SEQ ID NO: 1580 - DNA, 401 bp, Homo sapiens
aaagcaccttcggcttccaaggtacaggctgggaaacaaggtgggggcccacatagcctggtgtctcagcatggagcttggtgccaagtcctgtgctagagacacctgatctggagagagggaagagggcacacttgggagtggccacagcaggagggcctgctggcccctacaggctcagtccccacaccctgagttccaggaaagaaggcaaaggggaagcggccagcaagggcacagaggcagaactcatgactataggaattgaaaacagcacctgtcaaagctgcctatccccttccttctctcactacttctggtcccccagaggggctggtcccaaggctatgtggttggttggtgacagaaaaggggcaacaaagaatgacaagagaggctat

SEQ ID NO: 1581 - DNA, 676 bp, Homo sapiens
ccggagagctgccgtggtgcattcctcctgtagtgcttcaagctaatgcttcatcctctctaataacttttgatagacaggggctgaaaaagagaagttggtaacgtcaaataggtgcagatctccccatgtctgtctaggacactgtcagaatctcaaggaccagggccaagcagcctccttctgccatgctctcctgcacatagcaggtgctttgtggtttgtgaaacttcactctttactcaaggcccgatgttctggttttctgtacctatcaacttggaactagatcctcaccatgggttcctgccaagccctttgcaatattcccagacttcctaagctgaaaactcaccttaaccctaaaaggttgttactcttattatcctcatcttacagagaaggaaatggggtgctctgggtctgaccccaagtcaccctgctgttctgactccaaaggccaggcttcttttactgcaccatgatgttcttatctatatacagcagatggcaggcttgggcttgcttgggggtaaggcctaaacaggtctgcaatgacttcaaacccagaccagactcacctagtcgcacagacctctgggaagcctgaaagaaaacacaaggtgtcaggttttctagtgaaagttatacctgcaactgcttatgacaatggctt

SEQ ID NO: 1582 - DNA, 1106 bp, Homo sapiens
  SIMILAR (274)..(155): 651254mologous to Homo sapiens class I major histocompatibility antigen,accession number S67633,Smith-Waterman Score=141.
ggaaggttctcaggtctttatttgctctctcaacttccaggaattgacttatttaattaatccatcaacccttcatagcaaatatttgagaaaacaaatttatattcaggttcttaacttcattagggaagtaagaagttgcagctcagcgcaccatgaagttgagacagagatggagacatccagcccacttctctggaacaggaaagatgatcggggagggaacacaggtcagtgtggggacaggggtcacggtggacacgggggtgggctgtctctccacctcctcacattatgctaacaggaacgcagacacattcagatgcctttgcagaaagagatgccagaggctcttgaagtcacaaaggagaggtgtgaagaaatcctgcatctcagtcccacacaggcagctgtctcaggctttacaagcgatgagagactcatcagagccctgggcactgtctatcaaaagtttatttagagaggatgaagcattagcttcgaagcactacaggaggaatgcaccacgggcagctctccgccaatttctctcagatttccacagagactgtttgaatgttttcaaaaccaagtatcacactttaatgtacatgggccgcaccataatgagatgtgagccttgtgcatgtgggggagaagggaaaaagaatgtacttttttaatccttgttccccctaaacatggctgttaacccactgcatgcagaaacttggatgtcactgcctgacattcacttccagagaggacctatcccaaatgtggaattgactgcctatgccaagtccctggaaaaggagcttcagtattgttggggttcataaaacatgaatcaagcaatccagcctcatgggaagtcctggcacagtttttggtaaagcccttgcacagctggagaaatggcatcattataagctatgagttgaaatgttctgtcaaatgtgtctcacatctacacgtggcttggaggcttttatggggccctgtccaggtagaaaagaaatggtatgtagagcttagatttccctattgtgacagagccatggtgtgtttgtaataataaaaccaaagaaccataaaaaaaaaaa

SEQ ID NO: 1583 - DNA, 548 bp, Homo sapiens
  SIMILAR (434)..(63): 481254mologous to Homo sapiens Human secreted protein sequence encoded by gene 112 SEQ ID NO:282,accession number AAB56188,Smith-Waterman Score=227.
  misc_feature (1)...(548): n = a,t,c or g
aaaatcacggnaaaaaaatgaactgcctcaacctgcctatgcangtttaaccattcctacggggttcctgggaatctctgcaaccctacccagcaaccagatgagaaaacaaaccaggcctgggtgtggtggcctcaacatcccataaccctaaccactttgggaaggctgaaggccaggcggaatcccttgagcgccaggagtttgagaccagtctgtgcaacagggcaaaaccccgtctctataaaaataaaaaaattagcaggtcgtggtggtgcgcacctgtagtcccagctactcgggaggctgaggtgggaggattgcttgaacctggaggcagaggttgcagtgagccgtgactgcacnactgcactccagcctcgacaacagagtgagactgtctctaaaaacaaaaaattaaaatgaaaaaacagccaatacacacccctcacacttatccaaatgatgggtttctgagtgcagatgctcttacacaatcaggctcactcgtgcctggtcctaattccgccaggtctggatctcgtgcc

SEQ ID NO: 1584 - DNA, 494 bp, Homo sapiens
  SIMILAR (69)..(1): 1001254mologous to Homo sapiens unnamed protein product,accession number AK024003,Smith-Waterman Score=122.
ggccgggggcagcctgcgccccaggaacggcggggtggtcacgtcgcggatcatgagcacgtactcccctgcaaggggcgggtgggctggtcctcagcaggctcctgtcccttcccctccctggcctcagcccactgcccactgtctcatgtgcccgctggcccctgtgcccccgaccctggtcatctctgcctgggttctgggattcttggcactgtaaccacaggactggccaccggaccggtcctggggggctggacacacagtcagcataggtgaataaactaatttggggtaaaggaaaccacctctgacctcaggccacagcccagctatggcctccagctcggaggctggcaaggatggacacgaccctcgcatggtggccgctctcaagcccccactgctgacctggctacaggtccctgaaggattcttttgcaaatactttcctacttttttaggagaaaaataattcattccctcctcgtgcc

SEQ ID NO: 1585 - DNA, 633 bp, Homo sapiens
  SIMILAR (380)..(466): 861254mologous to Homo sapiens gamma-G globin,accession number X55656,Smith-Waterman Score=128.
  misc_feature (1)...(633): n = a,t,c or g
aacgaaagacgacgacagctacgatgaccagcctgtgccgcaaggtgaatggcggacatgctggatgagaaaccctgcgaaggctcctggttgtctacccatggacccagaggttctttgacagctttggcaacctgtcctctgcctctgccatcatgggcaaccccaaagtcaaggcacatggcaagaaggtgctgacttccttgggagatgccataaagcacctggatgatctcaagggcacctttgcccagctgagtgaactgcactgtgacaagctgcatgtggatcctgagaacttcaagctcctgggaaatgtgctggagaccgttttggcaatccatttcggcaaagaaatcacccctgaggtgcaggcttcctggcagaagatggtgactggagtggacagagccctgtcctccagataccactgagctcactggccatgatgcagagctgtcaaggataggctttattctgcaacaatcaaaaaataatctattctgctagagatcacagnnnnnnnnnnnngacggccccttaaagaaacaattttagaacgcggctggagagttataaatttttaaggggccaccaaatattccatggcctggtttaaaaagcgagcagaag

SEQ ID NO: 1586 - DNA, 701 bp, Homo sapiens
  SIMILAR (181)..(570): 361254mologous to Homo sapiens gamma-G globin,accession number X55656,Smith-Waterman Score=132.
aattttgccctcgaggccaagaattcggcgagggcaataagctcctagtcccagacgcccatggggtcatttcacagaggaggaccaaggcttactatcgacaagcctctggtgcaaggttgaatgtggaaaaatgctggaaggaaaaaacccctgggaaaggctccctggttgtctaccccatggaccccagaggttctttgacgagctttggcaaccctgtcctctgccttttgcccatcatgggcaaacccccaaagtcaaggcacatggcaaagaaggtgctgactttccttgggagatgccaacaaagcaccctggatgatctcaagggcacctttgcccagctgacgtgaactgcactgtgacaagctgcatgtggatcctgagaacttcaagctcctggggaaatgtgctggtgaccgtttttggcaatccatttcggcaaagaattcacccctggaggttgcaggcttcctgggcagaagatgggtgactgcaagtggccagtgccctgtcctccaggataccactgagctcactggcccatgatgcagagcttttcaaggataaggcttttattcttgcaagcaattacaaataataaatctatttctgctaagagatcacacatgattttcttcagctcttttttttacatctttttaaatatatgagccacaaagggtttatattgagaa

SEQ ID NO: 1587 - DNA, 331 bp, Homo sapiens
  SIMILAR (113)..(331): 1001254mologous to Homo sapiens hPTTG,accession number AJ223953,Smith-Waterman Score=370.
ggaccaacggcaactgtctgatgagtgccagccccaaaccgcgcgctgctcgggaccttagagcctctgactcaggctggaagatttgagagctggattaaaataatccagaatggctactctgatctatgttgataaggaaaatggagaaccaggcacccgtgtggttgctaaggatgggctgaagctggggtctggaccttcaatcaaagccttagatgggagatctcaagtttcaacaccacgttttggcaaaacgttcgatgccccaccagccttacctaaagcgactagaaaggctttgggaactgtcaacagagctacagaaaag

SEQ ID NO: 1588 - DNA, 1152 bp, Homo sapiens
  SIMILAR (478)..(861): 461254mologous to Homo sapiens hPTTG,accession number AJ223953,Smith-Waterman Score=147.
  misc_feature (1)...(1152): n = a,t,c or g
ggcacgaggctccggcggggaaggaggcgggctgcggctgcggctggggctgaagctgaagctggggctggggttgggggactgcccggggcttagatggctccgagcccgtttgagcgtggtctcggactgctaactggaccaacggcaactgtctgatgagtgccagccccaaaccgcgcgctgctcgggaccttagagcctctgactcaggctggaagatttgagagctggattaagtacttgttggctcacgcccgtgactgttccgctgtttagctcttgttttttgtgtggacactcctaggatagaaagtttggtatgttgctatacctttgcttctcccaccttccccaatatctaatatgtatttctcattcttagaataatccagaatggcgtactctgatctatgttgataaggaaaatggagaaccaggcacccgtgtggttgctaaggatgggctgaagctgggggtctggaccttcaatcaaagccttagatggggagatctcaagtttcaaacaccacgttttggcaaaacgttcgatgcccccacccagccttacctaaagctacctagaaaggctttggggaactgtcaacaggagctacagaaaagtctgtaaaggacccaggggaccccctcaaacaaaaaaacggccnagccttttccggcccaaaaaagatggacctgaagaaggactgtttaaagcaaaaaagcctctgtttcctggccttcaggattgatgcctaatccgagaaataagacaaaattctttccccttcaaatcctcttagacttttgaggagtttttgaccctgccctgaagagcacccagatttgcggcaccttccccctttgagttggagttgcctctcatgattcccttgacgagggagagagagctttgaaaaagctggtttcagctggggcccccctttcacctgtggaaggatggccctcttccaccatggggaattccaatctgtttgcagttttcctttcaaggcatttctgttcggacctggggtgttggatttgccacctgtttgctgtgacatagatatttaaatttcttagtgcttcaagagtttgtgtgtatttgtattaataaagcattcttcaacagaaaaaaaaaaaaaaaaa

SEQ ID NO: 1589 - DNA, 359 bp, Homo sapiens
  SIMILAR (163)..(357): 921254mologous to Homo sapiens PRO2769,accession number AF116713,Smith-Waterman Score=326.
ggcacgagagtcatcaaacggatcagcagctccagggaaggcctggctgtcccgggtctaaatgccactcccgccccatcagcgttcgtgctgtcagccttgcagccttctcctactcattccagctccaatacccaacggctgccacaccgagtgaccggcggcttctcattgaatggacagctcattggcaacaaggccaggagccctgggcagcatgacggcacgtacttcgggcggctgggaatcgcaaacgctgccacggactttcagttggaagtgactcctgagaacattacgctgaaccccggctttggtgcgcctgcgttttcctggagggaccaagctgtgctgcggca

SEQ ID NO: 1590 - DNA, 638 bp, Homo sapiens
  SIMILAR (1)..(372): 961254mologous to Homo sapiens inter-alpha-trypsin inhibitor C-terminal,accession number X16260,Smith-Waterman Score=633.
tttcagttggaagtgactcctcagaacattacgctgaaccccggctttggtgggcctgtgttttcctggagggaccaagctgtgctgcggcaggacggggtggtggtgaccatcaacaagaagaggaacctggtggtgtctgtggacgacggtggcacctttgaggttgttttgcaccgagtgtggaaggggagctcggtccaccaggacttcctgggcttctatgtgctggacagtcatcggatgtcagcccggacgcacgggctgctggggcaatttttccaccccatcggttttgaagtgtctgacatccacccaggctctgaccccacaaagccagatgccacgatggtggggtttgcaaaaagactacagcaaggacccgtggcatggggccgaggtgtcctgctggttcattcacaacaatggggctggactcatcgatggtgcctacactgattatatcgtccccgacatcttctgagccctctggccagcacgcctgtcctcccccggggccaaggcagaggaggaggacgacatcctgacctgctgctgaggctgtacctccttgactaagctggttccttgtgtcaaagcacctcatgccttccattaaagagaggccgtgtccaaaa

SEQ ID NO: 1591 - DNA, 2126 bp, Homo sapiens
  misc_feature (1)...(2126): n = a,t,c or g
ttctggctgtcaggagcaaagcctgaagacttggagctgcaggactggaagaacagtggagccccgcgggtctcaccctttattgatgctgaggcctagagatgggaagtgacttgctcaaggtcacacaattggatagtgacatagctagagcgcagagttcctgattccaagtcacctgtgctttctgggaccaaagaatgggcacctgctggagtccgggcagagctttctcagttgtattgctactccagacctcaccataggttggggtcccagtaggaaggctcagggtctgtgccagccctggtcggtgctgcttataccttcatagcctctcttgtcattctttgttgcgcccttttctgtcaccagccaaccacatagcctttgggaccagccctctctggggggaccagaaagtagtgagagaaggaaggggataggcagctttgacaggtgctgctttcaattcctctggcaactcctcccccgttttatttccccaattttaaacaaagattctgccaactgtggaaacttcagtccctcaggctggcagccatgccagtagcctgcctggggggtggggggtgcctgggcagccatggaaggcagggctgaaaggcagaggggctccaggtcctgtttccagctcccctcactgcacatggagaagctcgctccctccctccctcccttcccgcttttcccagagctaatacacaggtgctattattcagaaaaaaactggtcagctctagccaacagtgaggtttcttttcttctgccctaactattgtgtagcctcttatgctgaaatcggcttctgctggcttngccgggctttcagagccctgaaacaaagagaaacaggatctgtccctacccagcacagcaaaatggttgtagtaattgccaaagccctcataaagccctccggcttgaggagagagtgtatagtcatgggttctgcctctgtgcccttgctggccgcattctcctctgccttctttccgtggaactcagggtgtggggactgagcctgtaggggacagcatgccgtcttgctgtggccaactcccaaagtgtgccctcttccctctttacacatcaggtgtctctggcacaggactttggcactaaagctccatgcttgagacaccaggcttatgtggggcccccacctttggtttcccagcctggcaactttagaagccgaaggtgctttcatcagaaccctaaaatggtcgttgaaggcgcctgggccgcagcccagcagtagttggagaggcaaggcagagggcagtggttctcccaaataggagaccttggggcatggccacgcccagggttttgggccttaatggctttgacgtaaattaccccccatcctccttgccccggaaaagggagagcttagagccactcactgttcattcttgctctgacccttgaaggggggcggtgttgggccttggcttcttggaatggactgagtccatcgtggaaagggctgggggcatgaggattgtggggaggggcacttgccttgcggaaggtaggattagatcataagctcagtgacttcctagggttttcaatgtgctatgttctcatcctacagttggtttggtaatgatctgccaagtcccggagagcaacagcgacagctctgcctgacgctctcattaaaatctatgcaagccaagctcggcactttgtaagcagccggccttgcgaagcctcctcagctctggggggccggggacccagtgagccggaggagcgctctgggctccactttaatgcaccannnnnnnnnnnnnnnngaaaaaagaaaaaaaagggggttttttaaaacaaaaccccttttaaaatgcccgggcccctggggggaatcccgtttttggggacccccgaagggaaaaagccaagtttaaggaatatttaaatggggcctaaccttggggaaaggtggaaaaagggcccaaaaagacccaaaaagcccaaaaccaaggggccccccccttttggggttcacccccccaaaagaaaccgcccccatttagggggcccgggggcccaactttaaaaaagggaaaaaacaatttggggttttgtgg

SEQ ID NO: 1592 - DNA, 416 bp, Homo sapiens
  SIMILAR (3)..(266): 981254mologous to Homo sapiens inter-alpha-trypsin inhibitor heavy chain ITIH1,accession number X63652,Smith-Waterman Score=439.
gcgaggtgagggccaacctgtcatcccaggccctgcggatgtggctggactatgggtttgtgaccccactgacctccatgagcatcaggggcatggcggaccaggacggcctgaagcccaccatcgacaagccctcagaggattctccgcctttggagatgctgggacccagaaggacgttcgtgctgtcagccttgcagccttctcctactcattccagctccaatacccagcggctgccagaccgagtgaccggcgtggacacttgagtagtgacttagccttatgtactctgttggaatttgtgctagcagtttgagcactagttctgtgggcctatgaagttaatgctgcttattggctcattctgacttcatggagaattaatcccacctttaagcacaggctactaagtg

SEQ ID NO: 1593 - DNA, 1485 bp, Homo sapiens
  SIMILAR (811)..(1167): 861254mologous to Homo sapiens inter-alpha-trypsin inhibitor C-terminal,accession number X16260,Smith-Waterman Score=500.
acaaaggaggcccttctcagaatcctggaagatatgaaagaggaagactatctgaatttcatcctgttcagtggagatgtgtccacatggaaagagcacttagtccaggccacgcccgagaacctccaggaggccaggacgtttgtgaagagcatggaggataaaggaatggacaatttcctcatgagaaaggggaagacgaaagctaagctagaagaaaggggagccaaccaggactcgaggaatgggagcaaggtccgctaccggagggccgcatcccacgaggagtctgagtctgaggctgctgcctgcatacgtgatgccatggcctactcagtgcatcataacctgaggtgcctggtgtcagttgattctagtgttggtgaaggtttcattgataactgggagcaggagcttcccgtgtctgctgcgtctgattatggcaagctcactgggcccttgcagcaaactcagagaggggctaccacaggttcacaggtggagaaagtgaggtgctggcagggccagaaaatcaactgtgactcctctgctgttgcacaaattcagcagccagtccagggggtcatgtcccagaaggccagacacacttacctggtggccaagcccccttcttccgggaagccgctaggggcctcggggagaactatggagcaattcaccatccacctcaccgtcaatccccagagcaaggtcacgtttcagctgacttatgaggaagtgctgaagagaaaccatatgcagtatgaaattgtcatcaaagtcaagcccaagcagctggtgcatcattttgagaccaaggaggcactccttaaaattctgggggacatgcagccaggggactactttgacctggttctttttgggactcgagtacaatcgtggaagggctcgctggtgcaagcatctgaggccaacctacaagcagctcaagactttgtgcggggcttttccctggatgaggccacaaacctgaatggaggtttgctccggggaattgagatcttgaaccaagttcaggaaagcctcccagaactcagcaaccatgcctcaatactcatcatgttgacagatggcgatcccacagaggatcccccagtatttattcgcgataagctcatggagcggcgtaaccgtcgcacaggaaggacagagaaagcgcggatctgggaagtgacggacagaacggtcaggacctggattggggaggcggttgccgccgctgctgctgacggtgtgacgttctctgttccggtcacaccacatacgttccgccattcctatgcgatgcacatgctgtatgccggtataccgctgaaagttctgcaaagcctgatgggacataagtccatcagttcaacggaagtctacacgaaggtttttgcgctggatgtggctgcccggcaccgggtgcagtttgcgatgccggagtctgatgcggttgcgatgctgaaacaattatcctga

SEQ ID NO: 1594 - DNA, 3060 bp, Homo sapiens
  SIMILAR (440)..(1051): 831254mologous to Homo sapiens inter-alpha-trypsin inhibitor C-terminal,accession number X16260,Smith-Waterman Score=834.
  misc_feature (1)...(3060): n = a,t,c or g
ggtctgactgaggtgacagggcagcaggagccttagagcatggacggtgccatggggcctcgggggctgctgttgtgcatgtacctggtatctctcctcatcctgcaggccatgcctgccctgggctcggctacaggcaggtccaagagcagcgagaagcgacaggctgtggacaccgctgtcgatggcgtgttcatccggagtttgaaagtcaactgcaaagtcacctctcgcttcgcccactatgttgtcaccagccaagtggtcaacactgccaatgaagccagggaagtggccttcgacctggaaatccccaagacagcattcatcagtgactttgccgttacagcagatggaaacgcatttatcggagacataaaggacaaggtgactgcatggaagcagtaccggaaagcagctatctcatgagagaaagccaggccttgtcagggcctcggggagaactatggagcaattcaccatccacctcaccgtcaatccccagagcaaggtcacgtttcagctgacttatgaggaagtgctgaagagaaaccatatgcagtatgaaattgtcatcaaagtcaagcccaagcagctggtgcatcattttgagattgatgtggacatcttcgagccccaggggatcagcaagctggatgcccaggcctctttcctgccgaaggaactggcagcccaaactatcaagaagtccttctcaggaaaaaagaccagtaatggctcacactctcgacggttccagggtcatgtgctgttccgtcccaccgtgagccagcagcagtcctgccccacatgctctacatccttactgaacgggcacttcaaggtgacctacgatgtcagtcgagacaagatctgcgacctcctggtggccaataaccactttgcccacttctttgccccccaaaacctgacaaacatgaacaagaacgtggtttttgtgattgacatcacgtggctccattgagaggccagaaagtgaagcagaccaaggaggcactccttaaaattctgggggacatgcagccaggggactactttgacctggttctttttgggactcgagtacaatcgtggaagggctcgctggtgcaagcatctgaggccaacctacaagcagctcaagactttgtgcggggcttttccctggatgaggccacaaacctgaatggaggtttgctccggggaattgagatcttgaaccaagttcaggaaagcctcccagaactcagcaaccatgccttcaatactcatcatgttggacagatggcgatcccacagagggggtgacggaccgttcccaaatcctcaagaacgtccgcaacgccatccggggcaggttcccgctctacaacctgggtttcggccacaatgtggactttaactttctggaggtcatgtccatggagaacaacggacgggcccagagaatctacgaggaccatgatgccacccagcagctgcagggtttctacagccaggtagccaaacccctgctggtggatgtggatttgcagtacccccaggatgctgtcttggccctgacccagaaccaccataaacagtactacgaaggctcagagattgtggtggccgggcgcattgctgacaacaaacagagcagcttcaaggctgatgtgcaggcccatggggagggacaagaattcagtataacctgcctagtggatgaggaggagatgaagaaactgctccgagagcgtggccacatgctggagaaccacgtcgagcgcctctgggcctacctcaccatccaggagctgctggccaagcggatgaaggtggacagggaggagagggccaacctgtcatcccaggccctgcagatgtcgctggactatgggtttgtgaccccactgacctccatgagcatcaggggcatggcggaccaggacggcctgaagcccaccatcgacaagccctcagaggattctccgcctttggagatgctgggacccagaaaggacgttcgtgctgtcagccttgcagccttctcctactcattccagctccaatacccagcggcctgccagaccgagttgaccggcgtgggacacagacccttcaatttcattcattccacgtgccccagaaagagggacaccctgtgctttcaacatcaatgaggagcctgggtgttatcctggagcctgggtacagggaccccaacacagggtttttcagtggaatgggacagctcattgggcaacaagggccagggagcctgggggaaggcattgacgggcactaatttcggggcggctggggaattcgcaaaccctgccacggaacttttcagttgggaagtgactccttcagaacatttacgctgaaaccccggcttttggtgggcctgtgttttcctggggagggaccaagtttttctttccggcagggacggggtggtggtgaccatcaacaagaagaggaacacctgtggtgtctgtggacgacggtggcaccttttgaggttgtttttgcaccgagtgtgggaaggggagctcgggtcnaccaggacttcctggggcttctaatgtgctgggacaagtcaatcgggatgtcaagcccgggacgcaagggctgctgggggcaaatttttcccacccccatcggttttgaaagtgtctgaacatcccaccccagggttccgacccccacaaaagcccaaatgcccacgatggtggttaggaacccgcccggcctcacggtcacccaggggtttgcaaaaagacttacagcaaggacccgtggcatggggccgaggtgtcctgctggttcatttcacaacaatggggctggactcatcgatggtgcctacactgattatattcgtccccgacatcttctgagccctctgggccagcaacgcctgttccntgcccccgggggccaaggcagaggaggaggacgacatcctgacctgctgctgaggctgtacctccttgacctaagctggttcctttgtgtcaaagcacctcatgccttcccattaaagagaggccgtgtccaaaaaaaaaaaaaaaa

SEQ ID NO: 1595 - DNA, 2233 bp, Homo sapiens
  SIMILAR (309)..(1211): 461254mologous to Homo sapiens Human OXRE-5,accession number AAY92508,Smith-Waterman Score=493.
cgagattccgggattggaatcaaaatgctaatttaaaaggtcaagtgaagctgctcctcacgttttggcgtgccttgcctctctctgcaggcagaagcgaacaaagacccagcaagagaaggcagaggctaagacccatcccgtatctgctctcctgaaataattctggagtcatgcctgaaatgccagaggacatggagcaggaggaagttaacatcccctaataaggagggttctgggttactgggtgccactggggcttccttggcagagctgtacacaaagaatttacagcagaataatttgggcatgcagttggctgtgggtttcagaagagcaagaccaaaattttgaacaggttaaatctgttgggattctaatgcagtttcatcacatcatttcatgatttttcagccccatgttatagtacattgtgcagcagagagaagaccagatgttgtaggaaaatcagcccagatgcttgcctcttcaacttaatgtgggatgcttctggggaattttaggccaaagggaaggcagctgcctgtttggggagcatttctccattctacatttaggctcaggtttttgtattttgatgggaaccaaatccaccttacaagagaggaagacataccagctcccctaaattttgtatggccaaaccaaatttagatgggagaaaaggctgtccttggaggaaccatctaggagctgctgttttgaggattcctattctgtatggggaagttgaaaaacctcgaaaaaaagtgctgtgaactgttaatgtttgaataaaagtgccagttcagccaacaaagtccagcaaaacaatggatccactggcaagcaagaggttcccccccacacatgtccaaagatgtggccccactgtgtgcccggcagcctagcagagaagagaatgctggatcccatcaattaagggaacctttccactggtctggcaatgaacagatgaactaagtatgaaaagggcatgtgccaattgccagatgcccttcaacctccccagcagtcaccttaagaccctattactgacagccctgtccctaggagcacaacgtccgagaaatgctcagcttgactgctccaaattggagaccttgggcattggccaacgaacaccatttcgaattggaatcaaagaatcactttggcctttcctcattgacaagagatggagacaaacgggtctttcattagtttatttgtgttgggttcttttttttttttaaatgaaaagtatagtatgtggcactttttaaagaacaaaggaaatagttttgtatgagtactttaattgtgactcttaggatctttcaggtaaatgatgctcttgcactgatagaattgtctaaagaaactaaagggcagtcatgccctgtcttgcagtaatttttctttttatcattttgtttgtcctggctaaacttgggagtttggagtaatagtaaaattatgaccccttaaaatatttgaagaagtccaggatgaaagcagaacctgctgtaagaccttttccagatgaaaattgttccattcctcgtaacctcccatattttccaggatttttgaagcctgttgaccttttccatgttgattattttaaattgtgtgaaatagtataaaaatcattggtgttcattatttgctttgcctgagctcagatcaaaatgtttgaagaaaggaactttatttttgcaagttacgtacagtttttatgcttgagatatttcaacatgttatgtatattggaacttctaccgcttgatgcctcctgcttttatagcagtttattgggaagcacttgaaagagcgttgtgtccatgtattttttttctaggcaaacattgaatgcaaacggtgtatttttttaatataaatatataactgtccttttcatcccatgttgccggctaagtgatatttcatatgtgtggttatacttcataataatggcgccttgtaagtcttttcaccattcatgaataataataaatatgtactgctggcatgtaatgcttagttctcttgtatttacttctttttttaaatgtaaggaccaaacttctaaactaattgttcttttgttgctttaatttttaaaaattacattcttctagatgtaacatgtgatacatacaaaagaatatagtttaatatgtattgaaataaaacacaataaaattaacacttgaaaaaaaaaaaaaaa

SEQ ID NO: 1596 - DNA, 463 bp, Homo sapiens
  SIMILAR (211)..(462): 931254mologous to Homo sapiens carboxyl methyltransferase,accession number D13892,Smith-Waterman Score=401.
  misc_feature (1)...(463): n = a,t,c or g
caggatccacctccgtatntnnnnnacgacgacttcgtaacagcggcagctacagcggtgacgcgagcggagcggttacggtgtgggaggtagtctcactcttaggaaaactgctgggcaccgtcgtcgcgctgaaggtggttctgtacctgctccgagtgtgcttagcgatggcctggaaatccggcggcgccagccactcggagctaatccacaatctccgcacatgcatatgcgctagaacttctatttgatcagttgcatgaaggagctaaagctcttgatgtaggatctggaagtggaatccttactgcatgttttgcacgtatgggtggatgtactggaaaagtcataggaattgatcacattaaagagctagtagatgactcagtaaataatgtcaggaaagacgatccaacacttctgtcttcagggagaatacagcttgttgtgggggatggaa

SEQ ID NO: 1597 - DNA, 779 bp, Homo sapiens
  SIMILAR (1)..(702): 841254mologous to Homo sapiens Human ReproSA-1 coding sequence,accession number AAV59153,Smith-Waterman Score=976.
  misc_feature (1)...(779): n = a,t,c or g
gctgcttcgggcttcagtgatattgcaaagcatctccagaagttagcacaggcagtagtgaatgcaggagctgttgctcatttagcccagatgatcctanaccctgatgctagattgaagcatcagatctttccagctcattctgagaccctagcaatggcagtcatcatttctaagggtgtacnccagttgtcagtctgcttgtcagaagaacggaaagatcatattaaggctgcagctgcttgggccttaggacagattggaagacacactcctgaacacgcacgggctgttgcagtcacaaatactttgccagttctgctttctttgtacatgtcaacagaaagttctgaggatctccaagtaaaaagtaaaaaagccataaagaatatcctgcaaaaatgtacctacttaccagcccttgaaccatttctatatgatgctcctcccaatattctgaaacatgtggttggacagttcagtaaggtgctgccgcatgatagcaaagctcgacgactttttgtaacaagtggtggccttaaaaaagttcaagagataaaagcagaacctggttctctccttcaagaatacatcaacagtattaacagttgttaccccgaggaaatagtgaggtattattcccctggatattcagatacacttctgcagagggtggacagctatcaaccacttaataactgagcaaagttatattgtgatactcaaattcacagcagagtagttttgagtaacagtaattaaatccttctaaatatttg

SEQ ID NO: 1598 - DNA, 2606 bp, Homo sapiens
  SIMILAR (1124)..(963): 1001254mologous to Homo sapiens sperm flagellar protein Repro -SA-1,accession number AF079363,Smith-Waterman Score=282.
tttttttttttttttttttttttttttttttttttttgctgtttttatttaaaattttattgaaaccctctttcacccgtttaccacttcctaagtaaaaatgcatgtaaactctgagcctgatggtattagcttcaaactattccttaaatacctgaaaatgtgacttttgaaacttgggaaagtgacgttaggacaaggatccattttacatgcctgcttctttgttcattcatgagcagagctagactaagaaacctttcaatgagagggagagcatgtatgcaggagtataactctctattctgaattctaccctcgctgggcccaatgaaaggtaaggaacactttagatagggtggggaaggaggtttggaaaacttgtgataaagaggagtaaatttttcctaaattcttagtaaaacctaacaggttacccacagagtccgtgtcttaagttaatgcacttatataactagcatcagagtctccttcaagtgccctgtatatctgtcatcagtttcctccttcaaagatttctcttgtgtatactactatatagttagcaaggccagctttccttgcctatgcctatgacaaattggctagaataatttagggtttttgaatgccatctcttaactatatctcattggaggtgtctgcatgtacgagtgtgtgtggtttttaacagaataacaaaatgccttaaggccctttaacgtgtttttaaaatctacctgtagaacaaatcctatgcatgcgaatgaccatgaatagttcctcacatattcaagctacgaatgtttaaagtattacataaatttagaaaatattatctaaaggtatttcccattaaataaatctagaatatacttagttcaaatatttagaaggatttaattactgttactcaaaactactctgctgtgaatttgagtatcacaatataactttgctcagttattaagtggttgatagctgtccaccctctgcagaagtgtatctgaatatccaggggaataatacctcactatttcctcggggtaacaactgttaatactgttgatgtattcttgaaggagagaaccaggttctgcttttatctcttgaactttttttaaggcccaccacttgttacaaaaagtcgtcgagctttgctatcatgcggcagcaccttactgaactgtccaaccacatgtttcagaatattgggaggagcatcatatagaaatggttcaagggctggtaagtaggtacatttttgcaggatattctttatggcttttttactttttacttggagatcctcagaactttctgttgacatgtacaaagaaagcagaactggcaaagtatttgtgactgcaacagcccgtgcgtgttcaggagtgtgtcttccaatctgtcctaaggcccaagcagctgcagccttaatatgatcttccggttcttctgacaagcagactgacaactggggtacacccttagaaatgatgactgccattgctaggttctcagaatgaactgctacataaccaagcatcatgatgccaggcagccgtgtgttccctttgcaggacccaatgcagtcaatcacggcagcaacccctcctgcgttaactaccagctgtgaaagctcgggtgtatgttttgcaatctctctaattaaagtagaagcatttttcttcacgtattcatccttgtccttcagacaggtaagtacaactggaaaaatctctgcttcaacaaccatttctgccagatccacggaatgttttgaaacctgactgagagctgaaaggatctgatgcttcaatttagcatcagggttcaggatcatctgggctaaatgagcaacagctcctgcatccactactgtctgtgctaactctggagaatgctttgcaatatcactgagggccgaagcagcaatccttttcaaagcaatttctggctcctggatacagagtactaaaagaggaacagctcctgcatccaccacagcttgtgacagttctgcattatgtcttgcaatatatctaagtgcccaggctgcagcctccttgactccagggtcaaaatcttccaagcatatgaccagcgtatccagtgctccacaatcgactattgcctgagctagctggggagaatgtttaccaactgctcgtaacacaaaggcagctgctttcttgtagaagcgattctgttctgccaatgaataaacaagctgtggaagaatgtcgcacttcacaacagcttctgctaggtcatcattataattggccagtctcccaagagccaaagcagcagtctgttgaattgttgggaccacgtccagaagaagagttctcagcaaagacattacacccgcgttctgcagcgtctcgatgttttggggtctagtcgccagctccgccaccatctgcacgaactgggtcctggccttctggtattgctcgaacacttgcagcacctgcctctgactcatggcgcccccgccgccgtctgccctcctcgagctctgcggggaagccgctcggcctgcgagtccaccaagggggcgatcgtggcgacgactcggcctccgacgggagccgcttctc

SEQ ID NO: 1599 - DNA, 1639 bp, Homo sapiens
  SIMILAR (74)..(643): 811254mologous to Homo sapiens carboxyl methyltransferase,accession number D13892,Smith-Waterman Score=752.
  misc_feature (1)...(1639): n = a,t,c or g
actcttgggaaaactgctgggcaccgtcgtcgcgctgaaggtggttctgtacctgctccgagtgtgcttagcgatggcctggaaatccggcggcgccagccactcggagctaatccacaatctccgcaaaaatggaatcatcaagacagataaagtatttgaagtgatgctggctacagaccgctcccactatgcaaaatgtaacccatacatggattctccacaatcaataggtttccaagcaacaattcagtgctccacacatgcatgcatatgcgctagaacttctatttgatcagttgcatgaaaggagctaaagctcttgatgtaggatctggaagtggaatccttactgcatgtttttccacgtatggtgggatgtactggaaaagtcatgggaattgatcactttaagagtctagtagatgactcagtaaataatgtcaggaaggacgatccaacacttctgtcttcagggagagtacagcttgttgtgggggatggaagaatgggatatgctgaagaagccccttatgatgccattcatgtgggagctgcagcccctgttgtaccccaggcgctaatagatcagttaaagcccggaggaagattgatattgcctgttggtcctgcaggcggaaacccaaatgttggagccagtattccaggctccaggatggccagcatccaaaatgaagccctctggatggggggtgatatacgtgccctttaaccgngataaagaaaaagccagtgggtcccaggtggaagtgattttatcttctgctcttccttccttccacacatggcaagggatgaattgttaaaagcaacatcagctttgacccagtttaaatttacagtgggattgctccatctccagtccctccaaagctttttggaaaaccaacaccatccacagcttggttttgggactttggttaacactggttatttttcaggcatgaaaatgtgtgttttttttagggtttttgattcttcaaaaaggcacagagccaaattggtagaggaaggatgcaaagtataaatttgtgtaatattactttaacatgcccatattttacttggaaatattaaaagaaagggttttgtaaaatggaaaacttagtttgtgaattgattttgaggagtggtttttcttttcttggacacttaattctgttctgatattaatttatcagattgcttttgtgcattggataacaccaccattcacaagttaagattcttggtatttggatatctgttagatgctactaagaaaatagagatgagctttctttttaaagcttttgatgtggtgtcataaaatagcatgttgtagatacaatcagctgctttgttaccttaaaactaggcatttgtacaatattaaaccttaagaatggcaggtgaatgtcctgtaaacactcagctgttcagattggacataactgacttagttcttcccttctctctctctcaaaattataggagacttgtagtttagtgtggttttctgtttctaatttgctgctgataatgtatatgaacttaacatgctgtgtaagctgtgtcctagttcttgaacagtttatgcagtgctgctttgccaaataaagttaaaagtaaaagaggc

SEQ ID NO: 1600 - DNA, 1826 bp, Homo sapiens
  SIMILAR (908)..(940): 1001254mologous to Homo sapiens carboxyl methyltransferase,accession number D13892,Smith-Waterman Score=61.
caaaaagtcgtcgagctttgctatcatgcggcacaccttactgaactgtccaaccacatgtttcaggcagcggcggcgacggcagtaacagcggcagctacagcggggacgcgagcggggcggtgacggtgtgggaggtggtctcactcttgggaaaactgctgggcaccgtcgtcgcgctgaaggtggttctgtacctgctccgagtgtgcttagcgatggcctggaaatccggcggcgccagcacttcgggagctaatccacaatctccgcaaaaatggaatcatcaagacagataaaagtatttgaagtgatgctggctacagacccgctcccactattgcaaaaatgtaacccatacatggattctccacaaatcaaatagggtttccaaagcaacaatcagttgctccacacattgcaatgcatatgcgcttaggaactttctattttggatccagttggcatggaagggagcttaaagctctttgatgtagggtctgggaagtgggagtccttacttgcatgtttttgcacgtatggttgggatgtactgggaaaagtcatagggaattgatgcacattaaaggagctagtaggatgactcagttaaattaatgttcagggaagggacgatcccaacacttctgtctttcagggggggagtacagcttgtttgtggggggatgggaaggatggggatatgctggaagaagccccttatgatgccattcatgtgggagctgcagccccgtgttgtaccccagggcgctaatagatcagttaaagcccggaggaagattgatattgcctgttggtcctgcaggcggaaaccaaatgttggagcagtatgacaagctacaagatggcagcatcaaaatgaagcctctgatgggggtgatataccgtgcctttaacagataaagaaaagcagtggtcaggtgggatgattgtaaaagcaacatcagcttgaccagtataaaattacagtggattgctcatctcagtcctcaaagctttttgaaaaccaacaccatcacagcttgtttttggactttgttacactgttattttcaagcatgaaaatgtgtgtttttttaggggttctggattctttcaagaaggcacagagccaaattggttagaaggaaggaatgcaaagtataaattttggggtaatattactttttaacatgccccatatttttacttggaaatattaaaagaaagggttcttgtaaactggaaaacttagtttggtgaattgatttctgaggagtggtttttcttttcttggacgcttaatccggttccggatattaatttatcagattgcttttgtgccatgggataacacccaccattcaccaagttaagattcttggtatttggatatctgttagatgctactaaagaaaatagagcatgagcctttccattttaaagccttttgatgtggtgtccatagaatagccatgttgtaagatacaatccagcctgcctttgttacctctaaaacataggcatcttgtaaatattaaacccataagatggccaggtgatgtccctgtaaacactcagctgttccagattggacataactgtacttagttccttcccttctctctctctcaaaattataggcgacttgtagtttagtgtggttttctgtttctaatttgctgctgataatgtatatgaacttaacatgctgtgtaagctgtgtcctagttcttgaacagatttatgcagtgcctgctttgccaaataaagttaaaagtaaaagaggaaaaaaaaaaaaaaaaaactcgagggggggcccggta

SEQ ID NO: 1601 - DNA, 478 bp, Homo sapiens
  SIMILAR (107)..(466): 931254mologous to Homo sapiens dihydropteridine reductase,accession number AB053170,Smith-Waterman Score=560.
gcggccgccgcgcgttccctcttggcggggttggccggccggggcgttgcgcggcgctccggctcgaggcattcggagctgcgggagccgggctggcaggagcaggatggcggcggcggcggctgcaggcgaggcgcgccgggtgctggtgtacggcggcaggggcgctctgggttctcgatgcgtgcaggcttttcgggcccgcaactggtgggttgccagcgttgatgtggtggagaatgaagaggccagcgctagcatcattgttaaaatgacagactcgttcactgagcaggctgaccaggtgactgctgaggttggaaagctcttgggtgaagagaaggtggatgcaattctttgcgttgctggaggatgggccgggggcaatgccaaatccaagtctctctttaagaactgtgacctgatgtggtataagcaaaactacatggactctgtcctggtatccttttcctgtgtg

SEQ ID NO: 1602 - DNA, 385 bp, Homo sapiens
  misc_feature (1)...(385): n = a,t,c or g
caccatccannnnnnnnnnnnnnnnnnnnnnnnnnnnnnnnnnnnnnnnnnnnnnnnnnnnnnnnnnaatattcaaataacccaaaagacaggaaaggggaaacagggattaatgagaaaacaaataataaaatggtagatttaagttcttacacatcagtaattacgttgaatttttaaatgctgtaaacaaatcaattaaaagtttgtcaagagtccatagaaaaaacccactttatgctgtctattggaaacttactttaaatatggtataggtgggttaaaagtgaaaagatggagaaagatatagcatgcgcacactattggaaagaaaaccctagtggctatattaataacaaagcacacttcagagctaagctaatac

SEQ ID NO: 1603 - DNA, 1969 bp, Homo sapiens
  SIMILAR (547)..(1194): 471254mologous to Homo sapiens dihydropteridine reductase,accession number AB053170,Smith-Waterman Score=319.
  misc_feature (1)...(1969): n = a,t,c or g
atggcggcggcggcggctgcaggcgaggcgcgccgggtgctggtgtacggcggcaggggcgctctgggttctcgatgcgtgcaggcttttcgggcccgcaactgggtaatgctgcgggctggggctgctgggtctccgcgggggtggccgggggctttcgtgtggaacccggcggggggcagtctagaggaaggtctacgcgtctattcctgtttccgagtgcgtgcgcacgccagtcccagggcgctgggcctttgctgtgcaaggaggtgctccgtgggcctccgccagacccaaaaagtccggcgtgactcgggagagaattccaaaggggaggaacgggagcagggtggtgaagtctgggcttttagtgtaaccatcacccaaatagtgtacatttaccaaggttttcttgttgctcagaatctggtacaggaatatgcttctgaagaattcagtcacaccactcccttcctgccacccatctgctcagtgcttggggacactgatgagggcgctttcccaggtcttcagagatgcatggtgtgggttgccagcgttgatgtggtggagaatgaagaggccagcgctagcatcattgttaaaatgacagactcgttcactgagcaggctgaccaggtgactgctgaggttggaaagctcttgggtgaagagaaggtggatgcacattctttgtgttgctggaggatgggccgggggcaatgccaaatccaagtctctcttttaagaactggtgacctgatgtgggaagcagagcattattggacatccgaccatcttnccagccatcttggcttaccaagcatctcaaggaaggaggcctcctggaccttggctgggcgcaaaggctgccctggatgggactcctggtatgatcgggtacggcatggccaagggtgctgttcaccagctctgccagagcctggctgggaagaacagcggcatgccgccccggggcagccgccatcgctgcgctcccgggttaccctggataccccgatgaacaggaaatcacatgcctgagggctgacttcagctcctggacacccttataatttctagttgaaactttccatgactggatcacagggaaaaaccgaccgagctccaggaagcctaatccagggtggtaaccacagaaggaaaggacggaactcaccccagccatatttttaggcctcatctcagtgcctatgaggtggcctgcccagaaaagtcactaacctgtcttaggtgtggccttgtcagcccttgtgttttctggtaacccctgttttgtggtacgaataaatgagtctattttttctctcacataaatatgccatttgctctcctagggacaagtgtaatacatttatgtgaagtaagacaatgcgagactgggtggcctgcaaataagcatcccgtcaatctgtgtttaactcataggggagggctctgcatagcacctgttatagcggtgtccatgtttggatcgctttttgtgactgttcattctgtcccttgacaagtggctgtcaatcttgacctactttgtttgattctgctcggtattggggaccattataaacggctgagttatttttgaaatgtcatgtttatggtccgtagatgtagttttccgcatcccttgaattaaactggccttaactccttttgtggtataaagcaaaactccatggactctgtcctgggtatccttttcctgtgtggttgcccctgtgcctgtggtctggcctagggttaagtgtgcaagataactactccgtgagttattcagaatgttgttcctaataaatgcacttgttgtctgtcttctttaatcaaatcacatcttatatacagcagtcagagatgagtatactagaatcatggattgctggaggtcttttaatctgatgttctcagaagggggtggatttaaatcctgaaataaatatttcaacac

SEQ ID NO: 1604 - DNA, 297 bp, Homo sapiens
  SIMILAR (220)..(17): 541254mologous to Homo sapiens KIAA1611 protein,accession number AB046831,Smith-Waterman Score=169.
  misc_feature (1)...(297): n = a,t,c or g
ccacagacactggagagtcatgtacatttttctgggtttctctgaagnaaaaatcttgtatgtcgtggctttcatgtctttccaacattactgtctggaatatttctcctgtattactctccttttttggtggtaattccttgatctcacatttagnaaaaatacctgaggaagaaccattcctgacgcctttgctttcctcttccccttccgggtttctncctcatgtaccaagagtccttagaagtcaatccgccacggtgtaactttcactccacataatccgcttccgggttt

SEQ ID NO: 1605 - DNA, 516 bp, Homo sapiens
  SIMILAR (94)..(387): 1001254mologous to Homo sapiens HPF1 protein,accession number M27877,Smith-Waterman Score=564.
atggatttggagccagtgcagacagagcagagtggtgctggtgtcaaggagaaccgagggagaaacacagcatggaggacacctggtgatctgcatcgcaggattcatactggagagaaaccatataaatgtaatgaatgtggcaaggtctttaatcaaatttcacaccttgcacaacatcaaagaattcataccggagagaaaccttataaatgtaatgaatgtggaaaggtcttccatcaaatttcacaccttgcacaacatcggacaattcatactggagaaaaaccttacgaatgtaacaaatgtggcaaggtgttcagtcgcaattcctaccttgtacaacatctgatcattcatactggagagaaaccttacagatgtaataaaaggaaaggaactgaaattaagggaagggagagattgaaaggtggtgctgaaattgaaaggagaaagatgatgagggatagtgacaaagttggagaagacagtaaaaagaccacttacccaatttga

SEQ ID NO: 1606 - DNA, 3040 bp, Homo sapiens
  SIMILAR (909)..(1517): 511254mologous to Homo sapiens repressor transcriptional factor,accession number U35376,Smith-Waterman Score=576.
  misc_feature (1)...(3040): n = a,t,c or g
cggaanncccgggtcgacgatttcgtgcggggcccgccgaggcccggcttctgtcctgcgcgcgcagattctcgcaaatctggaagcggatcgcgtggagtgacggtcacaccgcggcgaattaatttccaaagactcatgttacatgagaaagccaccaagaagaccaaagaaaaggagacaaggatggctcttcctcagggatgcttgactttcagggatgtggctatagaattctctttggaggagtggaaatgcctgaaccctgcacagagggctttatacagggccgtgatgttggagaactacaggaacctggagtctgtgggattgacttctaatgactcttgggacatgaggaacaaacccggaaggggaagaggaaagccaaggcggctggaatggttctttctcagggtctattgacattcagggatggaggccatagaattctctcaggaggagtggaaatgcctggaccctgctcagaggactctatacagagatgtgatgttggagaattataggaacctggtctccctgggtattttttctaaatgtgagatcaaggaattaccaccaaaaaaggagagtaatacaggagaaatattccagacagtaatgttggaaagacatgaaaagccaccgacataccaagattttttgcttcagagaaacccagaaaaatgtacatgactctcagtgtctgtggaaacatgattgaagacattataagcgagtgcgtgtgacctataagggaaagtctcattggtagaagagaccatgccagggtagaagggatgatgccacaaaagccagccctgttaaaaatccagccttggattaaaccccgcagtcacatcctacccagaacctgccagcctatttccaagcctgaagggaaaatatataaatatgatcacatggaaaaatctgtcaacagtagttccttagtttccccaccccaacgtatttcttctactgtcaaaacccacatttctcatacatatgaatgtaattttgtggattcattattcacacaaaaagagaaagcaaatattgggacagaacactacaaatgtagtgagcgtggcaaggcctttcatcaaggcttacattttactatacatcaaataatccatactaaagagacgcaatttaaatgtgatatatgtggcaagatcttcaataaaaaatcaaaccttgcaagtcatcaaagaattcatactggagagaagccatataaatgtaatgaatgtggcaaggtcttccataatatgtcacaccttgcacagcatcgcaggattcatactggagagaaaccatataaatgtaatgaatgtggcaaggtctttaatcaaatttcacaccttgcacaacatcaaagaattcataccggagagaaaccttataaatgtaatgaatgtggaaaggtcttccatcaaatttcacaccttgcacaacatcggacaattcatactggagaaaaaccttacgaatgtaacaaatgtggccaaggtgttcagtcgcaattcctaccttgtacaacatctgatcattcatactggggaggaaaccttacagatgtaatgtatgtggaaaggtcttccatcatatttcacaccttgcacaacatcagagaatccacactggagagaaaccttacaaatgtaatgagtgtggcaaggtcttcagtcacaagtcatccctagtaaatcactggagaattcatactggagagaaaccttacaaatgtaatgagtgtggcaaggtcttcagtcacaagtcatccctagtaaatcactggagaatccacactggagagaaaccttacaaatgtaatgaatgtggcaaggtcttcagtcgcaattcataccttgcccaacatctgataattcatgccggtgagaaaccttataagtgtgatgaatgtgacaaagcattcagtcggaattcacatcattgtacaacatcacagaatccatactggagagaaaccttacaaatgtgatgaatgtggcaaagtcttcagtcaaaattcataccttgcatatcattggagaattcatactggacgaaaaagcttatagatgtaatgaatgtgggaaggtcttcggtctacactcattcctagcacatgatcctaaaattcacagctggagagaaacctttcaaatgtaatgaatgtggcaaagcttttagtatgcgttcaagcctcactaatcatcatgcgactccacactggagagaaacatttcaaatgtaatgaatgtggcaaactcttccgcgacaattcatatcttgtacgtcatcagagatttcatgccggaaagaaatcctaacacatgtaattaatgtggcagagtgttcagttagcattaaagccttgtaagacatacaataatttatactggagaaaaactttggcaagtataatgaatgtagcagagcctttagttttttgttcaaggcttaataaccgttagctagaccatagagggacagaaactttactaatggtactgaatgtgggcaaggtcttaaagggttaaaatctgagacccaggaatttttccaaaagaattccttgcttggtgagaaacctaaccaaatgtaatggaatgtggcaaggtcttctggccacaattctcacattgtacaatattgccaaaaatttcatggcttgaggaggaaacaaaaaccactgagagtgggaaacccattatgacttcaaacattcatcaacatcagagaatcccatactaaagagcatttataataattatatgtgatagagattttcccacaggccaaagtctcactagggcatcaaaaaccttttttgatgaaaccatacgaaatgtaacgtgcatgcttaagcttttacccaggcatcaaaaccggaacatcacagggtttatactggagagtaactacacaaagataatgtaataagcctttcagtgtaatattcatgattttgtcgtgagagatccactcaataaaaaccgaggcaaatgtaaaaaaaaaaaaaaaaaaa

SEQ ID NO: 1607 - DNA, 581 bp, Homo sapiens
  SIMILAR (117)..(515): 871254mologous to Homo sapiens ribosomal protein S3,accession number U14990,Smith-Waterman Score=574.
gctcgaccagaacacagaatgttcttggtgagaagggccggcggattcgggaactgactgctgtagttcagaagaggtttggctttccaggcagagtctctgcgttacaaactcctaggagggcttgctgtgcggagggcctgctatggtgtgctgcggttcatcatggagagtggggccaaaggtgcgaggttgtggtgtctgggaaactccgaggacagagggctaaatccatgaagtttgtggatggcctgatgatccacagcggagaccctgttaactactacgttgacactgctgtgcgccacgtgttgctcagacaaggtgtgctgggcatcaaggtgaagatcatgctgccctgggacccaactggtaagattggccctaagaagcccctgcctgaccacgtgagcattgtggaacccaaagatgagatactgcccaccacccccatctcagaacagaagggtgggaatgcagagccgcctgccatgccccagccagtccccacagcataacagggtctccttggcagctgtattctggagtctggatgttgccctcctaagacctttaataaa

SEQ ID NO: 1608 - DNA, 565 bp, Homo sapiens
  SIMILAR (18)..(314): 961254mologous to Homo sapiens ribosomal protein S3,accession number U14990,Smith-Waterman Score=470.
cggagcgcggcggcaagatggcagtgcaaatatccaagaagaggaagtttgtcgctgatggcatcttcaaagctgaactgaatgagtttcttactcgggagctggctgaagatggctactctggagttgaggtgcgagttacaccaaccaggacagaaatcattatcttagccaccagaacacagaatgttcttggtgagaagggccggcggattcgggaactgactgctgtagttcagaagaggtttggctttccagagggcagtgtagagctttatgctgaaaaggtggccactagaggtgtgctgggcatcaaggtgaagatcatgctgccctgggacccaactggtaagattggccctaagaagcccctgcctgaccacgtgagcattgtggaacccaaagatgagatactgcccaccacccccatctcagaacagaagggtgggaagccagagccgcctgccatgccccagccagtccccacagcataacagggtctccttggcagctgtattctggagtctggatgttgctctctaaagacctttaataaaattttgtt

SEQ ID NO: 1609 - DNA, 1007 bp, Homo sapiens
  SIMILAR (150)..(857): 371254mologous to Homo sapiens ribosomal protein S3,accession number U14990,Smith-Waterman Score=210.
  misc_feature (1)...(1007): n = a,t,c or g
ggagctcaaggatccttaattaaattaatcccccccccccccgcctttcctttcagcggagcgcggcggcaagatggccagtgcaaatttccaagaagaggaaggtttgtcgcttaatggcattctttcaaagttaaacttgaatgagtttctttactcgggaactgggctgaagatggcttactctggaagttgaggtgcgagttacaccaaccaggaacagaaaatcatttatctttagccaccagaaacacagaatggttcttggtgagaagggcccgccggattcggggaactgccttgctgtagttcagaagagtttctggcttccccagaggggcagctgtagagctttatgcctgaaaaaggtggcccacctagagggtctgtgtgccatttgcccagggcagagtctctgcgtttacaaancctcctagggagggccttgctgtgcggagggccctggctatggtgtgctgcgggttcattcattggagaagtggggccaaaaggctgcgaggtttgtgggtgtctgggaaaactccgaggacagagggcttaaaatccatgaagttttgtggatgggcctgatgatcccacagcggagaccctgtttaactactacgttgacacgtgatgtgcgccacgtgttgctcagacagggtggtgctgggcatcaaggtgaagatcatgctggcctgggaccccaactggtaagattggccctaagaagccccgtgcctgaccacgtgagcattgtggaaccccaagagatgagatactgcccaccacccccatctcagaacagaagggtgggaagccagagccgcctgccatgccccagccagtccccacagcataacagggtctccttggcagctgtattttggagtttggatgttgctctttaaagacctttaataaaattttgtacaaagacaaaaaaaaaaaaaaaaaaaaaaaaagtcgacgcggccgcgaatttagtagtagtagtaggcggccgc

SEQ ID NO: 1610 - DNA, 724 bp, Homo sapiens
atgtactaattcaacaatttctgcatttctgtacatttatgctgtttctagttttttattatctcaaaaaacacttcacacagtcttgtatctgactctttgggcacttgtatgaatatttcttcaggctggatgcctaaaattagtcattagatcaaaggctggagacatttcacatgttgatacacactgtcaaactgtccatccaaaagctgtatcaatttctacaatgactgagaatactcctttcctcacattatctccagcactatcaccaatctttaataatctgccatttcaatgtattgaaaaatagtatctcattttaactttaattttcctgattgcttacgaggttgaaagtttatgtttatagtctgtatttcttatttataaaatatttttatagcctttgtccaatttttgttgtttgtaggtgctctttatattatcttaaatcttctgttctattacatgtattttcccactcctttatttatgaaatctaattttatcaaagttttgtaaaaagtgaaaggttttactttttaaaaatgtagtcaaatctatcttttttttcatggctactgggttttgtgtcttggttgggaatgcctttcttacacatttattacaatttttttccagtattttcttctagttatttttaatttccatgtttaattcatcttgatttttttcatccatgatatgaaataagcaa

SEQ ID NO: 1611 - DNA, 1262 bp, Homo sapiens
  SIMILAR (124)..(756): 471254mologous to Homo sapiens inner mitochondrial membrane translocase Tim23,accession number AF030162,Smith-Waterman Score= 341.
tttcgtagcgtgtgaagtaggcgctggcaacgcggggttattcgctgttattgaggagtaacggcccagcggaccacccaggcttgaggcagcggcgggaaccactcggtttgctgcgataccatggaaggaggcgggggaagcggcgacaaaaccacaggggtattggccggctttttcggagccggcggagcagggttactcgcacgcggatttggctggcgtcccgctaactaggatgaaccctctgtgtccttattttaaatgtgggatccacgatacctcgtgcaaggatacaagatgaagtttatttttaccttacccgagctaattaaaacccgggggcaagatttgaagctggccttctttacgattggaggatgttgcatgacaggggctgcgtttggtgcaatgaatggtcttccggctaggattgaaggaaacccagaacatggcctgggtccaaaccaagaaatgtacagattttgaataatgggtgactagggaaaggggcacttttgggctaaatactctaggtctctgggctttgctctataagtgcatttggtgtccatcattgagaaaacacgaggtgcagaagatgaccttaacacagtagcaagctggaacccctgccggccatcttgtatacatgtacagggtggtcttcgagggatagcaccgaggtggtctgacaggactaacactttcccagccttctatgcactatatataatacctggggagcacatggaaagggctccttggcttccaacagttcactctggaaggtttttgcccaacctccatgaaatgggaggacaccttcaggtaggtcattcctagatccctttttaataaggaccagtttgggaggttattcctcctcctccttcctaccctacaattaggtttgaaaaattgggagattttgatttgcctgtgatgaaaatccctggatggctgacccaagactggcactttgttcccagcccattagtgagttgaagccaaagcccctttggtgactcaactgagtacccatggttctgtctctcctctggagatcttgcacgtatctgttttcctcccccatgaactagaaaacccacttactcccagaattcaggtcgtgcttgttagtactatatcaccaagtccattcatttaatgatccaaaacttgtaatgttgcactggtattccaaataaaggggtaaaaacagaaccaaagttataactccaacacacaaaaaaaaaaaa

SEQ ID NO: 1612 - DNA, 285 bp, Homo sapiens
  misc_feature (1)...(285): n = a,t,c or g
gttataattcgcctccctatagggaaaaagctattccgttgcaagcccgggtaaacttgggcccccccagggatcctttaaagcggccgcccccggnnnnnnnnnnnnnnnnnattttaaaactaaatgcattttttatttgaaagggaatcttcatttcaccgctgcaaatggaaagctggcatcacttgtgttaaatcatggtacccatgaaaataagtagaatgaaaataaaataatgttgtcacactctggatgtggctgaggtgtcgaagcctccatgct

SEQ ID NO: 1613 - DNA, 353 bp, Homo sapiens
agggtcaccagagttgctggggcctaccgcaggtctcctgacccctggtgcagttttaccttcaattacaaccaccaaaatagctacagtcaaaaattcccaaagttcctacaccatcaacctccaccccacttccgtccaaagtccacttagaggctctcagttttggaccttagaaacacttagggagctttttaaaaagatcgattctgtatttttagtagagatggggtttcacccagctactcaggaggctgaggcaggagaatcacttgaaccggggagttggaggttgcagtgagccgagattatgtcactccagcctgggcaacagagtgagactccgtcttagg

SEQ ID NO: 1614 - DNA, 1431 bp, Homo sapiens
  SIMILAR (37)..(534): 861254mologous to Homo sapiens FLJ00058 protein,accession number AK024465,Smith-Waterman Score=737.
  misc_feature (1)...(1431): n = a,t,c or g
cgccattttttttttttcttgagtagacttcagtgaccacactgtggaaaatacctttgcagacgtggcacccgagtgcacacaccgaccgccacatgtgcttttctgccgggaatccctggggtgaacgcatgttttatgggcgtttccaggagcgcgcgtgcacctccagacggggagctggcgggcgggggtggcagcagcagctctagccttggggggacaagcctctctcagctacgccaggggaaaagagagttaaggacactcacccccacccacgcacacacacaaggcagcgtcgggtgggagagagaaggccgtttctccttctgtagcctgggtctcccacgggccttccccgctgctgagcgagtacaccagtagccaggtgaagggccacagcgggccaggccccgaccctgttgtgacccacctggggcacctttcccggaccagcttccgccttccccttgccctcctctctccaggaaggagccagaaccctcacccctctcccaccctccccaaggggtaaccccaggccaagcacagataggtcaactgcgaacctctggcctctggggacataaacggggcggctgggccagggcggaaggggctcctgtttccctccttctgcgtggtccctttgacgggccggccaccgtgtccgaggcgcaacgctaggcctccaggccacgcatccatctccaagttaacagcccgtcctgcccaaagttctggggcaggtaggagagggccgtcaaaaaacctgtccgccccgtgaagtgaacccgggggggcttccgggtggaaggtggagcccaccaaggcccttcctcaaggggtcaacttattaaaaagtcccaacgcctgaggccagggccctctgcacagaagccatcatgccgggccaggcgcgcctcctcctctgtccacggaaaccgttgcccatcgtagccttcgtaaagacctgtctcctgtttcccagccgccgcctgtggttctagcaggttctatgccatctgcattgggatgtctggttgtttttatttctgacttttttaaaattccaggtgtgccgcacccactttctcgcagtgttttaatattgtgtggagttgtcgataccacgtgaattcatacacaataaaaagcctcactctcccttttnnnnnnnnnnnnnnnggggcggccggtttaaaggatccctcggggggcccaagtttacccgggcttgcgaggaaatagctttttccctataggggggcgtattataacctacctggggatttttgggaaggaacccttattttgggggggggacatattgggccaacctccctacagaaatttaaggctctagggnnnnnnnnnnnttttaaagggaaaaaggggtaaaacaacctgcatatgctggcggcttga

SEQ ID NO: 1615 - DNA, 410 bp, Homo sapiens
  SIMILAR (211)..(83): 1001254mologous to Homo sapiens Unknown gene product,accession number AC002550,Smith-Waterman Score=235.
caggctctccagaaggattgaatgtagagggctgcttcctcttctgtcagcaggagcgagagtgggattggcggccgtgggatgtttttgggttgattgtttccgatttatcttgaggacagggtgtacgtgagatcatggtgaaatgggaaaccggaaaatagtgctctgcactgaagccatgaaaaagcatttcctctactggcgcaacccttgcagatctgctcccacagattcttgcttgacggctcggtgacctgccacgacgagacaggcagctcgcgggacgcgagagacacggtgggcaccggcgtccgggtgaacgacgagtctgtagagcagctgggcttgaggcgcactatgtggctggggatttgccgcggtgccgccatggccgccggacgcgtggg

SEQ ID NO: 1616 - DNA, 431 bp, Homo sapiens
  SIMILAR (13)..(420): 411254mologous to Mus musculus TSG118.1,accession number AF034580,Smith-Waterman Score=214.
gcttggcacgaggagacacacaaagtagaccttgggctcccagagaagaaaaagaataagaaagtggtcaaagaaccagagactcgatactcagttttaaacaatgatgattactttgctgatgtttctcctttaagagctacatccccctctaagagtgtggcccatgggcaggcacctgagatgcctctagtgaagaaaaagaagaagaaaaagaagggtgtcagcagccctaggaaaggaagtaaaaagaagccagtcaaagttgaggctccggaatacatccccataagtgatgaccctaaggcctccgcaaagaaaaagatgaagtccaaaaagaaggtagagcagccagtcatcgaggagccagctctgaaaaggaagaaaaagaagaagaggaaagagaggggggtagcaggagacccttggag

SEQ ID NO: 1617 - DNA, 531 bp, Homo sapiens
  SIMILAR (348)..(479): 841254mologous to Mus musculus putative,accession number AK009230,Smith-Waterman Score=199.
  misc_feature (1)...(531): n = a,t,c or g
gtgtggtggaattcggaggaggaaggcagaaaggcagctctgtgcagaggtgggcagtggtgttggctggacctgggctggaattctgggggtcactagttaggtttctgtctccagctaagctgcagacctctattttctcctctgtgcaatgggaataacaacagtgtttctcatagggctgtctttaggattaacggaataatccgttgttgagcttattagcactgtgcctggtacacagcagccatctaatctgctgggccctccctgatgagggtgggggtcaagggaaggaaagggctttgaactcaaggaaaatagccacctttttcctctcctcacagggaacccagtttggccagtgggatactgctggttttgagaacgaggaccaaaaactgaaatttctcagacttatgggtggcttcaaaaacctgtccccttcgttcagccgccccgccagcacgattgcaaggccccnacatggccctcggcaagaaggcggctgacagcctgcagcagaatctg

SEQ ID NO: 1618 - DNA, 510 bp, Homo sapiens
  SIMILAR (156)..(1): 811254mologous to Homo sapiens Unknown gene product,accession number AC002550,Smith-Waterman Score=209.
cttcgcttggtgaagcaggctagccattccgggaagcagaacagcaaagatgaaagtttccaaatattctatgggagaacatgtttttgggttgattgtttccgatttatcttgaggaacagggtgtaacgtgaagatcatggtgaaaatgggaaaccggaaaaataagctctgcactgaaagccatgaaaaagcatttcctctactggcgcaaccgtaatcacaggctcctgtttgactttatatccttctggaaagggaggctgctcagcttcatactccttgcagatctgctcccacagattcttgcttgacggctcggtgacctgccacgacgaaacaggcaagctcgcgggacgcgagagacacggtgggcaccggcgtccgggtgaacgacgagtctgtagagcagctgggcttgaggcgcactatgtggctggggatttgccgcggtgccgccatggccgcggtttccacggtaaccgcgttcgccggaaggccgcgaattcc

SEQ ID NO: 1619 - DNA, 2559 bp, Homo sapiens
  SIMILAR (593)..(1024): 331254mologous to Mus musculus TSG118.1,accession number AF034580,Smith-Waterman Score=157.
atggaggtggacttcaaaatcagaaaagtcggccagtggacaatcacccttcaggagcacccagtcagtgttttgctattcatagaagagacccatccagaaaacaaacccacaagtacagcagtagaagaaagccacatcagccgtgatactgtgatggttaattttcagtgtcaacttgactggagtaagggatacctagaggcctatttgaccaaaataaactcgatctgctcccacagattcttgcttgacggctcggtgacctgccacgacgagacaggcagctcgcgggacgcgagagacacggtgggcaccggcgtccgggtgaacgacgagtctgtagagcagctgggcttgaggcgcactatgtggctggggatttgccgcggtgccgccatggccgcggtttccacggtaaccgcgttcgccggaaggccgcgacccggaagaagccggaacccgagagggtgggccggcgactcgaagtggacttccgggtcacggcggagctggctctcacgtggaggcggggaaatttcgcccaccggaatgatcaccaagacacacttttgtttaccttgggctcccagagaagaaaaagaagaagagggtggtcaaagaaccagagactcgatactcagttttaaacaatgatgattactttgctgatgtttctcctttaagagctacatccccctcgtaagagtgtggcccatgggcaggcacctgagatgcctctagtgaagaaaaagaagaagaaaaagaagggtgtcagcaccctttgcgaggagcatgtagaacctgagaccacgctgcctgctagacggacagagaagtcacccagcctcaggaagcaggtgtttggccacttggagttcctcagtggggaaaagaaaaaataagaagtcacctctagccatgtcccatgcctctggggtgaaaacctcccaagaaccctagacagggtgaggaggaaaccagagttggcaagaagctcaaaaaaacacaagaaggaaaaaaaggggggcccaggaccccacagccttctcggtccaggacccttggttctgtgaggccagggaagccagggatgttggggacacttgctcagtggggaagaaggatgaggaacaggcagccttggggcagaaacggaagcggaagagccccagagaacacaatgggaaggtgaagaagaaaaaaaaaatccaccaggagggagatgccctcccaggccactccaagccctccaggtccatggagagcagccctaggaaaggaagtaaaaagaagccagtcaaagttgaggctccggaatacatccccataagtgatgaccctaaggcctccgcaaagaaaaagatgaagtccaaaaagaaggtagagcagccagtcatcgaggagccagctctgaaaaggaagaaaaagaagaagaggaaagagagtggggtagcaggagacccttggaaggaggtagtttttccttcagaaatggactttgccgtgggagaattaagggaaacagacacggacttagaggtggtgttggaaaaaaaaggcaacatggatgaggcgcacatagaccaggtgaggcgaaaggccttgcaagaagagatcgatcgcgagtcaggcaaaacggaagcttctgaaaccaggaagtggacgggaacccagtttggccagtgggatactgctggttttgagaacgaggaccaaaaactgaaatttctcagacttatgggtggcttcaaaaacctgtccccttcgttcagccgccccgccagcacgattgcaaggcccaacatggccctcggcaagaaggcggctgacagcctgcagcagaatctgcagcgggactacgaccgggccatgagctggaagtacagccggggagccggcctcggcttctccaccgcccccaacaagatcttttacattgacaggaacgcttccaagtcagtcaagctggaagattaaactctagagttttgtccccccaaaactgccacaattgctttgaattattccatttatgctggagattacaaattttttttggtgaaaaaatcagatcttgggtgaggaacctcgagcagtaagatataaataactccccataagcttaggcgttccagttaatggaacacctagggcataaatgggtttattccagtggtgcaaatgaaagccatctgacagttggctccacattgaacacctgtggagattaaggacgaggacaactatattgatgggcttggatgaactggggcagggcaagctccatatttcgggagccaggagaacgagtgagtgctaaaacctcctgttttctgtgttaaacattccgtccctgtttgagacatcagtatgtacagttaacttttgttgagtgtttagcaggtactagggacatactagtgttttccttaatgtatttaatcttcataattatgaaatgggtgctattattagccccatcttatagatgaggcaactgaggttcagggataaagtaataaaattgcctggggtcacccagcccactaaaaaaaa

SEQ ID NO: 1620 - DNA, 2148 bp, Homo sapiens
tcaggctacccttttacagccacaggtcttagttctgtttaagggctcctgtttcagaaggatatttatcctacatgcatcattgaagtttccttcaaagactccaatcttcacagctccactactgcctttatctttctttttcttccacatcttaaaggttccagcggggagaggattgaaggcttctctgaagataagtgacaccaacacatttgtgccatataaacacagctctgccagcagtgtgaagctggcatgggactggatgaagttaggtacagaggcagtttgcgaggcagttgtaatggtctggttgagcactgataggggtctgcacctgttttctaaatcaggaaatgcagacgtaaggaaagtaagcaccttgcccagggtcatgcagcaggtgagtgcagcagctgggttgggctgtgtgactgccaggtgggcagctgcccattctctcccacagctggagcaggcagttgacttggtcatgagatttagaaacagcaggacgctccccccgaccatgcaccaggtatcatccttctgcagtgccaagacttggaaactggactccaccttgaaagcacctacagaccctcctacaccactgacagatgaggcaaagatctgagtcccaaacatggtagatgtgaagctccatgggatcacaaaggagggcttcaaagaggtgacgtcatcgggggtgaataccatgggattactgttaatttcctcaggtgtgatcctggcatggccagttagtgagaggtacttactgaagtcattccacatgaagtcacctgatatctgggatttgttttcaactaccgtgtcctgactccaggtagaatccacctcaggagagctggtggttttcacataaacttgcccctgctcggggacccacccgaacctctcagcgtccccgatgccagcaggagtctggtcgctgggtggggttggctgtacggtctggaacacaggtgtggctgcgtaaccacatgtgtttccctgcctgccctggtcacccaaccgcaaggggacccaccattccccagtgtcgggaccatcaagacagccattttctcccttgacccaggacagccctccaggtgtgcagggctctgctgtggaccatgggcctgatgtgagcagccaggtgctttctcggagccttagtctcctcctcttgtgtgcctgctgataagcactggtcagagccaatcctcgctcttcacgaagtgccctccgtgggtggtctctctggtgccacttgctctgttgctctgttctgagctcagatgcctttccctggaggccccaccctgggtcagatgaaggaagcagtactgagctgtccagaaggtccttctgaaatccacagggcttggtgcttgttctccacgtggagcgggggcagatttggaagtccaattcccctgccacgaatgcccaggaaacacctgctttggactcagcatccattatactctgagaccagcaggcatgaggagagatgtggggccacatgcagagacattcaggcagatcaacaaaccaccgcagcgagccgcccttctgggccgctcctctgttttcctttcccatccgttccctttgcctcggctgctcggagacatgtctggtggcgatcggggacccagagcccggcagccgctcctgtccctgtccctgcgatccctgtcccttccctttgtctccccgcgcagcgctctccgccgcggaaacttcgcgtgacacaaactcctgagtgcggagatttgctgctgctgtagctaccctgccacctggggccgctccatctgggcagcaccaggcacactgggccacagacacggatacctgggtttccgtggccacccctgtgtcccctaatgtctggtagtcttggcccatagacccgtctgctcctggtgcccccagctcctcagggtccggccgggtcacctgggccgatccaggcgggcaggggcctcgctgctcctcccccgcagcccctctcgccctcccggggaccgtgtgcggggagcagctgggagctgcgtctggaggggctgtccgactggggaacttgtcctgtgccttgtccatgccattacattcatcctcccaagaacc

SEQ ID NO: 1621 - DNA, 459 bp, Homo sapiens
  SIMILAR (34)..(336): 971254mologous to Homo sapiens Arf-like 2 binding protein BART1,accession number AF126062,Smith-Waterman Score=496.
  misc_feature (1)...(459): n = a,t,c or g
gggcggggttggagcctactcggggcgactgcgatggacgccttagaaggagagagctttgcgctgtctttctcctccgcctctgatgcagaatttgatgctgtggttggatatttagaggacattatcatggatgacgagttccagttattacagagaaatttcatggacaagtactacctggagtttgaagacacagaagagaataaactcatctacacacctatttttaatgaatacatttctttggtagaaaaatacattgaagaacagctgctgcagcggattcctgagttcaacatggcagccttcaccacaacattacagcccaataggctcagctcatgatgacagaacacatcttggaaagactgactctgntatgtaactcttcatttatggtaagtattaataggtcaaaaccaaaatgacctaaccctcctggacctatttatcctg

SEQ ID NO: 1622 - DNA, 2065 bp, Homo sapiens
  SIMILAR (98)..(550): 541254mologous to Homo sapiens Arf-like 2 binding protein BART1,accession number AF126062,Smith-Waterman Score=299.
  misc_feature (1)...(2065): n = a,t,c or g
agcggccgcgccctgcatgcgagttgggccgcgggcggggttggagcctactcggggcgactgcgatcggacgccttagaaggagagagctttgcgcatgtctttctcctccgcctctgatgcagaatttgatgctgtggttggatatttagaggacattatcatggatgacgagttccagttattacagagaaatttcatggacaagtactaccttggagtttgaagacacagaagagaataaactcatctacacaccctatttttaatgaatacatttctttggtagaaaaatacattgaagaacagctgctgcagcgggattcctgagttcaacatggcagcctttcaccacaacattacagcacccataagggatgaagtggcttgggtgacaatattcggcaatgctggctccacctttcacaagattttcctgggcttttaaaggaaatgttttttggactacagagcagaaaaagaaggnccgaggactgggacttaagcagtggcttagttggtgacttcattgtgcaaatcatcttctctggccagcttcccagaacaatctgcggcactaggtcctacctccagccaatggaatggggatccattctgggatgtcaccagcccaatagggttcagctcatgattgacagaacacatcttgggaaagactgactctgttatgtaactcttccatttatgttaagtatttaataaggtcaaaaccaaaatggacctaaccctcctggacctattttatccggaaacaccttcttgtattcattaaccatagtactcctccccacctcaagtagacacctctctcaggagcttctgaagtcagacgccttctggagcgagccctatgtcaggcactcccacctggggggcccctttcccccagcatacctgctgggtgtgtaaagtgtgggacttaacccgccgccaccaccctctgttcccagcagggctctgcatggaatctttgtggcacttgcacctcttttttcacatggggccacagttttcagtatttcaggcctcagtgggggttcctggatgtttatcttggggtgtttacttcaaggcccagtttgagattttggagttctcctgtgatcacatcttgtgttcgggtgtagggaatcaacagaaggagacgtcctctacataaaaagctccatgtggaaaagctactcctagtctttaacatttggcagtccttgtgttcactgtcttctgggtcctgatgtagtcccactgttttctaggaagtctcttttaagcattatttttgaaaaaaaaaatatttttatagatgaatactcaggctaaccctagtggatgtgatcttggaacttccatgattatccacttaaagatcaaagtattaatatgctgtgtgcttttttaggtgtttgttagtactgggaaggcaaaaatgccttcctaccatggacattccatccctatttttactggggcacctatgaatgtaatgcccgtgggggctaaaaatagactaaaaccatattccctatagccatgttagtgtgtttgccatgtttgctgtaaaatccctttgtgtataaaaccagttttgtaaaggttcctctggggttaggtaggggactctgccagttttcttcctgtccaaaatctctcctacccaagatggtgttcccactgtcccagccccagcatgagtagccaggtagagcacagctttactggctgtttgtatgctttgggtttagtgcaatgtgtgggtaggattacttatccaggaaaacatattatgtccatctcttaggaacggaggaaaaaagcatagtagttccaattccccagtgtgtccctttgattttttttttttttaatagtaaaaattagaatcctggactgacttttcacttggccattctggttttaaaggacaagctacaagctctgtgtttctgtactgatgtgtcacttattaaatacttttgtaccatgagtaaaacttcatggtgtttcgcaagaaccaccattctcaaaaaaaaaaataaaaaaaaaa

SEQ ID NO: 1623 - DNA, 1090 bp, Homo sapiens
  SIMILAR (125)..(433): 461254mologous to Mus musculus putative,accession number AK002885,Smith-Waterman Score=142.
aggaagtgtcggcgccgccactgtccggccacagcctaacgctcttcgctgtcgtttgcggtctcgcgcagggcggtccccggttctggtgtttggcgtcggaattaaacaaccaccatgtccgagcaaaaaggcaaagaccaagaccaccaagaagcggccctcagcgtgcaacatccaatcgtgtttgccatgtttgaccaggtcacagattcagggagttcaaagagggcctttcaacatgattgatcaggaacagagatgggtttcattcggacaagggaaggttttgcatgatatgcttgcttctcctagggaagaatccccactgatggcattaccttgatgccaatgaatgaatgaaggccccaagggcccattcaagtttcaccaatgttccctgaccatgttttggttgagaaagttaaatgggcaccagatcccctgaagattgtcatccagaaaccgccttttgctttgcctttgattgaaagaaagcaaccaggcacccatttcaggaaagattacctaaggaggagctgctgaccaacccatggggggatccggtttccggatggagggaagtggatgagctgtaccggggaggcaccttattggaccaaaaaaaggggaattttcaaattacattcgagtttcacacggcatcctggaaacatgggagccaaagaccaaagatgacttgaaagaacttttagcttaaaatcttcccagttacaattgtcttactctcttttacttctcagacactttcccccaccctcaatagaaccgtgttgcatgcaaccttagtttcaccaggctttgccgtcttctttttgatgtatttattcccagaccttttctgccactttagcacttggtataatcagactgggaaatgggggatgagggtggtaaattgtattgaaaaagatcgcgaataaaaaatccacaaatgtgaaagcccagaaaaatatattcgtatttcctgggttttgctgggatttttacatttttatataataaaaatgttattttgaaataaagattatgctgactcaaatgcaatgtaaaaaaaaaaaaaaagggc

SEQ ID NO: 1624 - DNA, 512 bp, Homo sapiens
  SIMILAR (238)..(501): 351254mologous to Homo sapiens pot. unidentified reading frame,accession number X03717,Smith-Waterman Score=162.
  misc_feature (1)...(512): n = a,t,c or g
cttgaagacaggaagaaagagtgtttttcccatttagannnnnnnnnnnnnnnnnnnnnnnnnnnnnnnnnnnnnnnnnnnnnnnnnnnnnnnnnnnnnnnnnnnnnnnnnnnnnnnnnnnnnnnnnnnnnnnnnnnnnnnnnnnnnnnnnnnnnnnnnnnnnnnnnnnnnnnnnnnnnnnnnnnnnnnnnnnnnnnnnnnnnnnnnnnnnnnnnnnnnnnnnnnnnnnnnnnnnnncatatgtatgtacccaacctcagaacatctaaatatatgaagcgaacattgatagaactgaagggagaaatagatagcaacacaatantggtaggagatttcaataccacactttcgacaatgggtagaacgttcagataggacatcagtaaggaaacagaggacttgcacaacactgtagacccaatggacctaacagatatgcagagctttctacccaacagcagcagaatacactttcctctcaagcacatggaatattctccaggacagag

SEQ ID NO: 1625 - DNA, 1361 bp, Homo sapiens
  SIMILAR (969)..(685): 411254mologous to Homo sapiens Human secreted protein, SEQ ID NO: 7874,accession number AAG03793,Smith-Waterman Score=134.
  misc_feature (1)...(1361): n = a,t,c or g
ttaaaaatatgtataattgtattatatattgtatgtatatccttaacaatatggttgtataacccccaccaatggaaatatacatccaatgaaaatggacagctataaaacaataaaacttgtgaattcctagagacatgttgagtgaaaaaaacccaaatccttagacctacatagagtatgatacaattttttttgaagttcaaaaagaaagaaaactataaaataagtcactttagggatacatatgtattttaggtctttctacattcgaacaaatctattaaaaagagagcgggggggtcggcaaagatagggagaagagctcaaataggataaaatacaagcactcataattgttattcttaagttagggtgatgagttattatgcttgataatttattgcaatccccaatttacccttttataaggcatcaaatattacatttaaatataaagtcccaaattatgtataaagtgttgambyyavmttatatctgcatggctgttcctaaaactatgcttattttatcaagcagagttcttggttttaggcaattcaggttagttttaataacagcaaaaaaatgattttattaaaagtaattctcaggatctctaggacagccagcaaacaagaattagaggttacaggccaggcacggtggctcatgcctataatccccagcactttgggaggcccaaggtggggtggatcaccctgagggtcaggagttcgagacccanccctggccaacacgggtgaaacccccatctctactaaaaatgcaaaaattagccgggcgtggcggcacatgccatgtaatccccagctacatgggaggctgaggtgggagaattgcttgaacccagggaggcggaggcagaggctgcagtgaccccaagattgtgccactgcacttccacccttgggcaacagagcaagaccccattctcaaaaataaataaatatatataaaaaataaaaagctatttctagtttatttcacctataaagttttgcctttattaaaaagcctaataaacagctattaatcacagtgtattagtatttgttacatttttgtatttcactatctttatactatataatatggtaacttgggtaccgggggaactttaaaatttcatctcaaaaataatttttaaaaagcctgaggtatgatatagcataaaagatttgagatgaaaatatatttccctgtagagctgaattactcctttaaaaattttaacttccatatggggacccgaattaggacactggctgaatcctgtacagccttactcataaataaagtacttactgaatttccaccattcaaaaaaaaaaaaaaaa

SEQ ID NO: 1626 - DNA, 1815 bp, Homo sapiens
ttactcttccgcccacgcgtacgcccacgcgtgcgggttaaaatatcttgatattttcacaaattttaaacaaaaaattaaatatctataaagtgaatgttcaacaacgatgatgagcaatagaaatctatatatgagaaacgcttggataatatttgcctcagggattgtttacctaaaacagaactatggttatttatctcagattgtaagttttattttgaagtgacatttttatggcaatattgataacacaaaggaccacaaactaaatcataaaataatggaatccttacactttgagaaaacggatagcttctgtgttatgataccaaacaaaatattttcatatttattgcttacaactatttccacaatatttatatctcagcttttttatggcactcgaaaaaccaaaccttgtgaaaaatatgagatttgtacttcatttgtgtattagttcattttctgtttctattacatagtttttaaagtcaatgaaagagattgagaatgttaacatttgttgatcaatgtggagctgtccacattcggtatcttttcatttttatatatattttacagtttcaagaaaacttagtactactagtatctgccttattttcttaagtctgatgataatttttggttcaggagtgagatataaacattttgctttttttcagatttgaaatatagtttggcatcctgtgaaaaccacctcgtttgctttttgtttgtttgttttgcttttttagtgtagacctaaaattatttttgcctataaacagtgaacttaatatgtttctgtgagagtgacagagctgtgcccgtttatcttcattgtattaattattacataaagattaacaaatacattgcaaatgcaaattataggatgtttggaggatttattaatgagcatgtattgattgcctattccatatccagtgcaatgctaggtatgtctatggaaggagtattattacttcatttctaaacaaatgaagtcaagcaaattgagatctttctgaaattatgaagacatcttctgataacttatctgttgtatttcctagtctcaaagtcaagaaacccgtatatgtggacctagggctaataggaggtccctatggcactaactgggaaaattacatggtgcttttcaactacagaaagaagtaatgactaatgggcctgtctgtagagaagaaaaggagaagagtacacatttgctggaactatatataattcacagtggagatagttaattctttgctaaaactagggttttatgagtattttttaaatctacatttaagtttttgtttttgtgaaaagttattcagtaagaaaactttataatattaagtagatacagttatgtattaaaaatttccttatatacccttttgccagccaagatactgatattttaaaacaaaatggaaaaatgtccaatacaatattctctttctggaggcttcctacaagtgaaagcagattttgtcattttatttggcctttgcttggctttgatatatttctttatgtgtttttcaaatacatactggttgagatttattgtcttgtatttgcaagtatgccggttgagagaactaaaatggttatagtattgtttatccgaaagaggaagtgtacttaagattattttatttatttagatgaaaggcttctacataaatgcactgaaataaatgctagtaatttcttgtatcccacttctttttttgcttctcatggaaatgtttgtacttttttatcattgtcttttatgaaatataatgttctaaa

SEQ ID NO: 1627 - DNA, 1960 bp, Homo sapiens
  SIMILAR (297)..(368): 661254mologous to Homo sapiens PRO1722,accession number AF119851,Smith-Waterman Score=71.
ctttacccagagaaaatgctactttaaaaaaaaaaaacacccagaaatttagagttcaataatgaattttgctttcttggcacatttttgaaatgatcatatcattacatgtagctaggtctttatctcctgaatgctcctcctagggaggcaaggtatctaaacaacaaaataaccctacaaaaaaagttaatattgtgagcagtctcaatttgtagttattaaactcaaagtctaatgctgaaaggcaacagtaatttaaacagatttgtttatttttattattattttttgagatggagtcttgctctgtcactctggctggagtgcagtggcacaatctccgctcactgcaatctccatctccccaggttcaagtgattctcctgcctcagcctccccagtaactgggattacaggcacatgccaccatgcccagctaatttttttgtatttttattacatgacggggtttcgccatgttgctcaggttggtgtcgaactcctgggctcaagcaatccacctgccttggcttcccaaagtgctgggattacaggcacctgccccagatttataatgctattcacagatcttgcagaattataacaggctccttctacaacttggttagtgacatcaagtactaactatatatgttccaggtcaagaacttactcttgagatattcaaaaagtgcttgtcaagaatatcaggaatctagaatttatggcaaattgtatatattttaataaaaaccttaaaataaattctaattttaattgctacccatagaaactcctcaagagaagacattagccaaccagacatgaaatatccacagcatttagctactcccttcgtcttcagtactgtctctaacttcagttgcagtatatgtgctgctgaagagcagtctgcttccaatttcaacacagcattaaggtaccctatagccatcatccaatatacttgctttaaaaacagcactactctgatttagcctggctttctaagaatgattctctggagagaaagaccatgtgaatggtctgtggaagaccagaacaatcctgctgcagtccaagtggattttcctagagacaagcctttgttaaaatattctaaaagtatatgtggcaccttccaattctgggaacctggcctttctaagcacatgcaacacaaccccctcgcttaagccacctgtgagagagctacaaatggcaaaacttcttttgctactctaaatattaatgcattaaaagatctgtctagatagggagcagatccctgctttaaaaaaagtagatagattactatctattgcatatttgtttactaaagagcaaagcatattactagcatgcaggcttaaaaagttacatttattctgcactgtagaaacactggaaatgaagagccaacaaatccaattcccacagctccatgcaaggaagaagcatatcaccactttctctggaaaagttagacaatcgtgattaaccatataccctacaataactgcctgccaatgtcagtcatttgtaccactgtcaaacataaaaactaaaatatgcaaatcacatggggtacataatccataaaggaaaatcagaaatttacttaagcttcctaaaatgtccagagcatcatacgttcaagtttcagagatttaacccccttttacttttaaaactgtcccttttaatggacatgtcagagtgcttcaaatgtagcatactagttaaaattcttcctggaaggttttaatgctggcagctaacttactaaagttattcacccacagggtgttcaagcaagagcatgctgacttacaaagacacctcatgggacaaagaaaattctggtctgacttcacaaattttctatagagtacttaaatccagaactgaggtcaagataaggccactctgaacacaggcatcccggacgcgtggg

SEQ ID NO: 1628 - DNA, 371 bp, Homo sapiens
  SIMILAR (59)..(184): 831254mologous to Homo sapiens peroxisomal short-chain alcohol dehydrogenase,accession number BC003019,Smith-Waterman Score=165.
gcgccctactctgtcacctcgctggaaggagtggaacccagacttgctggtctgatccatgcacaaggcgcggctacgaggccactgtgcccgggcagggaagtcggtgcgggtggccagctccgggatgacccgccgggacccgctcacaaataaggtggccctggtaacggcctccaccgactgggcttcagtccttacaatgtcagtaaaacagccttgctgggcctcaacaagaccttggccatagagctggccccaaggaacattagggtgaactgcctagcacctggacttatcaagactagcttcagcaggatgctctggatggacaaggaaaaagaggaaagcatgaaagaaaccctgcggat

SEQ ID NO: 1629 - DNA, 1434 bp, Homo sapiens
  SIMILAR (630)..(668): 921254mologous to Homo sapiens peroxisomal short-chain alcohol dehydrogenase,accession number BC003019,Smith-Waterman Score=60.
atgcacaaggcggggctgctaggcctctgtgcccgggcttggaattcggtgcggatggccagctccgggatgacccgccgggacccgctcgcaaataaggtggccctggtaacggcctccaccgacgggatcggcttcgccatcgcccggcgtttggcccaggacggggcccatgtggtcgtcagcagccggaagcagcagaatgtggaccaggcggtggccacgctgcagggggaggggctgagcgtgacgggcaccgtgtgccatgtggggaaggcggaggaccgggagcggctggtggccacggctgtgaagcttcatggaggtatcgatatcctagtctccaatgctgctgtcaaccctttctttggaagcataatggatgtcactgaggaggtgtgggacaagactctggacattaatgtgaaggccccagccctgatgacaaaggcagtggtgccagaaatggagaaacgaggaggcggctcagtggtgatcgtgtcttccatagcagccttcagtccatctcctggcttcagtccttacaatgtcagtaaaacagccttgctgggcctcaacaataccctggccatagagctggccccaaggaacattagggtgaactgcctgcacctggacttatcaagactagcttcagcaggatggttaggcgagccagaggattgtgctggcatcgtgtctttcctgtgctctgaagatgccagctacatcactggggaaacagtggtgaacttgagcgtgatgttcacgggtggaggtgtctgcagagctgccagctggaaggaaggtggcacgggaactcccaggacgccacgggaatccccgaggcagcgcgagcccggagagacctcctctactgatacccaagaaaataaggtctggaatggacttccagcaaacccccaaagacctgcagctgaggggcctgttagaaggaaaactaacaaacagaaaggaatagcatcaacatcagcaaaggacagcatcaacatcagaacaggaaaggacatccacactaaaaccccatccataggtcaccaacatcaaagaccaaaggtagataaaaccacaaagatggagagaaaccagagcaaaaaggctgaaacttccagaaatcagaacgtctcttctcttccaaaggaatacaagtcctcaccagcaagggaacaaaactggatggagaataagtttgatgacttgacagacgtaagcttcagaaggtcagtaataacaaactacacccagctaaaggagcatgttctaacccattgcaaggaagctaaaaaccttgacaaaatgttaaacgaatggctaactagaatgaagaatctagagaagagcttaaatgacctgatggagctgataaccacagtacaagaacttcatgaaggatacacaagcttcaatagctga

SEQ ID NO: 1630 - DNA, 684 bp, Homo sapiens
  SIMILAR (339)..(46): 551254mologous to Homo sapiens PRO2221,accession number AF116695,Smith-Waterman Score=270.
tcagctattgaagcttgtgtatccttcatgaagttcttgtactgtggttatcagctccatcaggtcatttaagctcttctctagattcttcattctagttagccattcgtttaacattttgtcaaggtttttagcttccttgcaatgggttagaacatgctcctttagctgggtgtagtttgttattactgaccttctgaagcttacgtctgtcaagtcatcaaacttattctccatccagttttgttcccttgctggtgaggacttgtattcctttggaagagaagagacgttctgatttctggaagtttcagcctttttgctctggtttctctccatctttgtggttttatctacctttggtctttgatgttggtgacctatggatggggttttagtgtggatgtcctttcctgttctgatgttgatgctgtcctttgctgatgttgatgctattcctttctgtttgttagttttccttctaacaggcccctcagctgcaggtctttgggggtttgctggaagtccattccagaccttattttcttgggtatcagtagaggaggtctctccgggctcgcgctgcctcggggattcccgtggcgtcctgggagttcccgtgccaccttccttccagctggcagctctgcagacacctccacccgtgaacatcacgctcaagtt

SEQ ID NO: 1631 - DNA, 471 bp, Homo sapiens
cgagcctgacaattccaagtctatccctagcatggaagaagcagggaaaacacagctcaaatccaaaggccctttttggcccaaatcatacttggctgattatgaaacaagatgaaccaggctccatttttgctcacctgaacctaatgtatcattatctagctgagcagctggtgagagctacttctccctgaacctcagttccttcatgtgtaagatgtaggtatatcatcctaagatcttcgtcagctctgacaaacatcctaggaacccactctaactcctcattttttcatgcctcctccagtgctcttcactcatgctgtttccccttcttctcttggcttcagactctggacattaatgtgaaggccccagccctgatgacaaaggcagtggtgccagaaatggagaaacgagggtacagagagtgagagagagcctgggtgagaggggacccaacactgtatt

SEQ ID NO: 1632 - DNA, 585 bp, Homo sapiens
  SIMILAR (153)..(281): 1001254mologous to Homo sapiens peroxisomal short-chain alcohol dehydrogenase,accession number BC003019,Smith-Waterman Score=219.
ctgggagaccatccctgtgtgttagtgaggtcttgcattgtaaagatcttgaagaaaggagactgtgtctgtgagtcctcaacaaagcagacacctgattggagttaggagtccaaagggtttatccgaagtggcacttgctggtctgatccatgcacaaggcggggctgctaggcctctgtgcccgggcttggaattcggtgcggatggccagctccgggatgacccgccgggacccgctcgcaaataaggtggccctggtaacggcctccaccgacgggtgagtgctccggccggagtttctgaggccctggctgcctggaaacaggcactggcctctcatcctcggcctccggtgcccctgtcctcagaccttacacgctgccaaagtctggccctggaaaaaaggtagccacgtggtccgcctgaagccactccgaatcccctagccctggaccctcccttgccagccctcctgtccctgctacctctggcacaactgtgccacctctgtgcagccctatcgatctagtctccccagtgttctgggctccctagtctaccacgcctcggccaagcttgcgt

SEQ ID NO: 1633 - DNA, 1053 bp, Homo sapiens
  SIMILAR (1)..(414): 661254mologous to Homo sapiens peroxisomal short-chain alcohol dehydrogenase,accession number BC003019,Smith-Waterman Score=431.
atgcacaaggcgcggctacgaggccactgtgcccgggcagggaagtcggtgcggttggccagctccgggatgacccgccgggacccgctcacaaataaggtggccctggtaacggcctccaccgactggatcggcttcgccgtcgcccagcgtctggcccaagacggggcccacgtggtagtcagccgccggaagcagcagaatgtggaccaggcagtggccacgctgcagggggaggggctgagcatgacgggcactgtgtgccatgtggggaagatgaaggactgggagcggctggtggccacaggcttcagtccttacaatgtcagtaaaacagccttgctgggccttgcccagacccctgcccatagagcttggccccaaggaacattagggttgaactgcctagcacctgggacttatcaagactagcttcagcaggatgctctggatggacaaggaaaaagaggaaagcatgaaagaaaaccctgcggataaagaaggtttaggcgagcccagaggattgtgctggcaatcgtgtctttcctgtgctctgaagatgccagcttacattcactggggaaaacagtggtggtggatggatggaaccccgtcccgcctctgaggaccggggagacagcccacaggccagagttggggctcttagctcctgggtgctgtttcctgcatttcacccactggccttttcccacctctgctcaccttactgtttcacctcatcaaatcagttctgccctgtgaaaagatccagcccttccctgccgtccaaggtggcgtcttactcgggattccctgctgttgttgtggccttgggtaaaggcctcccctgagaacacaggacaggcctgctgacgaaggctgagtctaccttggcaaagaccaagatattttttcctgggccactggggaatctgaggggtgatgggagagaaggaacctggagtggaaggagcagagttgcaaattaacaacttgcaaatgaggggcaaataaaatgcagatgattgcgcggctttgaaaaaaaaaaaaaaa

SEQ ID NO: 1634 - DNA, 408 bp, Homo sapiens
  SIMILAR (281)..(180): 581254mologous to Homo sapiens PRO1722,accession number AF119851,Smith-Waterman Score=97.
acgacaaggacttcataattgaaaaatatatagaaaacaatccttacttctttttacaaaaacaaaatcatgggaattattcttttctatatatttagttataaatctttctctgggccgggcgtggtggctcacgccagtaatcccagcactttggcgaggctgagacaggcgaatcacgaggtcaggagttcgagaccagcctggccaacatggtgaaaccccgtctctactgaaaatagaaaaaattagctggacacggtgtcaggcgcctgtgtgtggcgggcgcagctatctcaggaggctgaggcaggagaatcgcttgaacccaggaggcagaggttgcagtgagccaagattgcgccactgcactccagcctaggtgacagtgcgagactctgtctcaaa

SEQ ID NO: 1635 - DNA, 1703 bp, Homo sapiens
  SIMILAR (653)..(868): 661254mologous to Oryctolagus cuniculus NADPH-dependent retinol dehydrogenase/reductase,accession number AB045133,Smith- Waterman Score=228.
  misc_feature (1)...(1703): n = a,t,c or g
tgcggccgctccaacatcagtggacccagacttgctggtctgatccatgcacatggccaggctgctaggcctctgtgcccngggcacggaagtcggtgcggatggccagctccaggatgacccgccgggacccgctcacaaataaggtggccctggaaacggcctccaccgacgggatcggcttcgccatcgcccggcggttggcccaagacagggcccacgtgttcgtcatcagccggaagcagcagaatgtggaccagggcggtggccacgcttgcagggggaggggctgagcgtgacgggcaccgtgtgccatgtggggaaggcggaggaccggggagcggcttggtggccaccggctgtgaagcttcatggaggtatcgatatcctagtctccaatgctgctgtcaaccctttctttggaagcataatggatgtcactgaggaggtgttgggacaagactctggacattaaatgtgaaaggccccaagccctgaatgacaaaggcagtggtgccagaaatggagaaacgaggaggcggctcagtggtgatcgtgtcttccatagcagccttcagtccatctcctggcttcagtccttacaatgtcagtaaaacagccttgctgggcctgaccaagaccctggccataaaagctggccccaaggaacattagggtgaactgcctagcacctggacttatcaagactagctttcagcaggatgctctgggatggacaaggaaaaagaggaaagcatgaaagaaaccctgcggagtaagaaggttaggcgagccagaggattgtgctggcatcgtgtctttcctgtgctctgaagatgccagctacatcactggggaaacagtggtgaacttgagcgtgatgttcacgggtggaggtgtctgcagagctgccagctggaaggaaggtggcacgggaactcccaggacgccacgggaatccccgaggcagcgcgagcccggagagaatcaggccaggtcctctccccgcatggccctacgacccgagttccctcccgagtcagcaagtacaagctggatgggtcctgagccggtggggaatagagaaaggccctgcaagccggcaagaaaggtcggcgccagcccgcgggctctcaggaggctcggcagcgcgacgcgcatgctcagtcgggcagctctccgggccggcgtgggagcccgcgctccaaggcccggtggggggaggggcgctcacgcaaccgccactgtctggagcgggctcgcctctgcggcagccctcaccgcccgggctttactgaagcggagtctagcatgtgcggctgctccacagcggtgtgggtggcggcggctcctctgcagcagcctcggcattaggggttcagggtggccatgcccaccgtggagctcaatttaagagttgtaaggtacgggactgcctccgtctttgggacgccccgtctggtaacatcccagatccagcacgttacttccagccctgcaccccggcccggagcctcacaccccgataccccatgcatccagactctaaggcagcccctgcatctcaggcctgacatcgctgtccctggagcatcctacgctggagctggagcttgacagagccttacacaggttatctctagacctgacaacaacccaagcaaggcaaggactattctctcggtctgcagacgctggctcaa

SEQ ID NO: 1636 - DNA, 2316 bp, Homo sapiens
  SIMILAR (1717)..(2268): 261254mologous to Drosophila melanogaster eyelid,accession number AF053091,Smith-Waterman Score=81.
atggtgtaccgccaaaatcagcttccaagttcctgtgcaccagaaatgggaagggaagatgggctcagagccctccacccagcacagcctccacctccccgtgcacagcagagccctccacctcccctctccgcacagaagagcctccacctccccgtgcacagcaaagccctccaccgcccctgctcaccccccaccgtcgccatcctcaatccttcccagccccatcggcccccagtgcactctccaggcagcggcctgggctttactcagctgtcaccttctctggaagcctctctgggccacggacttcaacatgcacgcccagcccggcatcctctccctctgcacatgggctgggccacattcacactgacgctggtgtctgctccctggaagctcaggaggaggccaaggctccaggtggccggggtccctcatgttcagcgcatggagccttgggccccacatgcaccagcggagttgctggagactcaggcccagttgtggggtcacaggagagggcactggatcccagacggcagggcctgcaacactgagttcacacacccaggactcgagattggggccagggagagcggcagcgcctgcaaggggccgcctcctggctcactggttcccttccccgcatctcccctgggaagcaagataaatgggggaagttgctaccaaatactcacgggctcatcaggaaaaatatgcagaatcaatggctgcagctgccaaaacaaatggagtatgcccacctctgccacggcatcgctgcagacctgccctgcccgggccgtgcccgacctgggcatcgctcggaggagctggtcaccacatagaaggcccagctggacacacgaaaagagttcctgccccagtcagaaggcccctcagggaagggcagtacccctccagcctgggaaaggaggtgaacccgtgtccttttggagtccagggcaggctcccagcaaagcgagggggaggcgagctggcagcgcggctatgcgaggccgagctgccaagctgctatctcgttcccggagcacaggagggctctgcgtgctctgtgggcaggggactgtagggttgcagatgcagggccgggcagctcctccagcaccccccccagcccaccctctcttcccaagaccagtgtctcccttggatttctctgcttcaaaaagagccttgcagcatcctgcgcttctgggagggaaagacagctggaggcctgagtgtgggcatctcaacctctctcacctacccagtggagtgaaggacagctgggggtccgagtgtgggcatctcaacctctctcacctacccagtggagtgaaggacagctgggggtccgagtgtgggcatctcaacctctctcacctacccagtggagggaaggacagctgggggcccgagtgttatgtgttctgtatgttacatcgcctccccgagcagcacgactgcacattcgaccacatgggccgtggccgggaggaagccatcatgaaaatggtgaagctggaccggaaagtggggcgctcctgccagcgcatcggggaggggggccaagaggatgatgtcgtggcctccattctcgtttctatgcagccccatagtccaaggacacccagtccacatctaccatatagcaagtttaaggatttcagcagctgcaactgcgcacgccagggctggaaagagatgggggcctgtgtgcagagaccgtctgcagtacttggaggcactcgtccagttagtgtccaggctaaacagccgcttccttgctttctgttgggagcctctgccctgggaagctgcgggactggccttggggtaaaggacagagatattgaccgcatagttgtcatgagcgtgatgaaaatcctcagaggaaatcagaggcccagtggcgatgaacaagcacgggggcaaagggcaagagagggccttggtggcctgggtgtgaggcgggcctgcagggagcagtgggctgtgctctgcccactggtccacaggaactgggtctgcgtcagctccttcctgattgcttcacagagcaacagtccacagcaacaacataactgttgttatgccaacaacagtccacagcaagaagaggggatggtgggaagacaagcagaaaccttcctgctgggtggcgtgagaaacaggaaaccatgggtgggagtgggccgtggtcttcaagggagccatcagcagcacattcagggagctgtgagcagcccctctagccccaagaagggggtctccaagagagagggccccagatgggcacaacagtaa

SEQ ID NO: 1637 - DNA, 1824 bp, Homo sapiens
catacgattggtttaattttttttttcagcaggagaaaaaagaataaagttacaagaattcttttaattttttcacaatgttaaaactaaaactgacctctaggctatgtgtgtaagtaaatctaaaacacaaaagggttaaataaaattttcttttttaaagataccagaaattaaagctttccttacatttaacaaacttcacaagaacagatactgcaggggaacaagccccaccccccaccccccccagctctaagtcaggaagcgaacatgggcttcgctcccccaggccagctcccctgggctccttcccatgggctgcctccacgcagcaggcagaggagggggcggggggccctggggagggccgggaagggctcgcacaagcctcttcgggaaccagagcttggcggaagcctatggggggctgcctcactgaggatggcccgtatggtggccccaaagggctgtggccttgaacaaccaatgggtaaaaacgcctggggcaagaccctggccccctcctgcccccgggttgccccctagagcaaagacacccggtcctgggtccctgaaagcaagaattaaggctggggattttgcagccgggtttccactcttggtgggtggagggtgggaagagcatgacttccgtatttcagtacgtcggatcaaaaaaacatttgcagttgcaagtgttcaactgttaaatttgcaagacagagttgaaaccatttgttgtttttataaaaaggaaagttgctgggttaaactattccagtagcctatgtgtgggcagatccaccgctgcctccgaaggggcactcctgccctcacccacctggatctgatgcggcactaggaccactgggactgctcaccctgcctgggctttcaaggggatcctgatcctgtccacccagccccagccccacctgactggtagtgatttcctaacatggggcaaccaggcccacccccacccttccccacctggcgtgcgcagttgcagctgctgaaatcctctgtgaacatgagggggcacaggtggagaaatgtaccctcaggccctcacctaccagagcaaatatcactctcggagctgggccacagccacaaaccgctgttcctaagacagaatccaaaccccactgtcccctgggacgtaatgctgcccttccccttactaaacttgctatatggtaagatgtggaactgggtgtccttggacttatggggctgccatagaaacgaagaatggaggcccacgaacatcatcctcttggccccctggaggcacgggcggctccagctgaaaggggcaggagcccgtgggcggcagcttccccagctgctgctcccagcacttctactgattcttgttggctatgaaatgtctttttaaaaaactcccaatatagaaatctggctgcagaggccagtgtgcagacccagcccccgcgctgtgctgccattcgccacatctggtccgtgccagatccctgcactggagaatggcagaccagagccggcggaggcggggcactctggctgcttctcgtgaccttggatcctgtgtagaaaaggcgggtctcgttcgtggactagtcttgagtggagctaattttcaaagagaggtgggtgtttttcatcaggtgttatgagtttcttcctagcaagtcagggaaaaaaatttccgtaagagtagtccccctccccccttgagttgtgtggagagtagtcgccctcagtccagctgtggcaatccacagcctccctggcaggctcctgacctcaggttcaggctttggtaataagctt

SEQ ID NO: 1638 - DNA, 2316 bp, Homo sapiens; identical to SEQ ID NO: 1636
  SIMILAR (1717)..(2268): 261254mologous to Drosophila melanogaster eyelid,accession number AF053091,Smith-Waterman Score=81.

SEQ ID NO: 1639 - DNA, 1919 bp, Homo sapiens
  misc_feature (1)...(1919): n = a,t,c or g
tttttttttcatacgattcggtttaatttttttttttcagcaggagaaaaaagaataaagttacaagaattcttttaatattttcacaatgttaaaactaaaactgagctctaggctatgtgtgtaagtaaatctagaacacaaaagggttaaataagattttctcttttaaagatacaagaatttaagctttccttacatttaacaaacttcacagaacagatacttgcagggggaacaagccccaccccccaccccccccaggctctaaggtcaggaagcgaacatggggcttcgctcccccagggccaggctccccctgggcctcccttccccatgggctgcctcccacggcaggcaggcagggcagagggaggggggcggggggcctcggggagggccgggaaagggctccgcacagccctcttcgggaaccagagcttggcggaagcctatggggggctgcctcactgaggatggcccgtatggtggccccaaagggctgtggccttgaacaaccaatgggtaaaaacgcctggggcaagaccctggccccctctgcccctgggttgccccctagagccaagacacccggtcctgggtccctgaaagcaagaattaaggctggggattttgcagccgggtttccactcttggtggggttgaaggtgggaagagcatgacttccgtatttcagtacgtcggaatcaaaaaaacatttgcagttgcaagtgttcaactgttaaatttgcaagacagagttgaaaccatttgttgtttttataaaaaggaaagttgctgggttaaactattccagtagcctatgtgtgggcagatccaccgctgcctccgaaggggcatcctgccctcacccacctggatctaatgcggctctaggaccactgggactgctcacccggcctgggctttcaagggaatcctgttcctgtccacacagccccagccccaccagactggtagtgatttcctaacatggggcaaccaggaccacccccacccttccccacctggcgtgcgcagttgcagctgctgaaatcctctgtgaacatgagggggcacaggtggagaaatgtaccctcaggccctcacttaccagagcaaatatcactctcggagctgggccacagccacaaaccgctgttcctaagacagaatccaaaccccactgtcccctgggacgtaatgctgcccttccccttactaaacttgctatatggtaagatgtggaactgggtgtccttggacttatggggctgccatnagaaacgaagaatggaggcccacgaacatcatcctcttggccccctggaggcacgggcggctccagctggaaggggcaggagcccgtgggcggcagcttccccagctgctgctcccagcacttctactgattcttgttggctatgaaatgtctttttaaaaaactcccaatatagaaatctggctgcagaggccagtgtgcagacccagccaccgcgctgtgctgccattcgccacatctggtcccgtgcccaagatcccctgcaactggccaaatggcaagaccaagagccggcggaaggcggggcaactctggctgccttcctcgtgaaccttggatcctgtgtaagaaaaggcgggtctcgttcgtggactagtcttgagtggagctaattttcaaagtgaggttactgtttctcttcttgtgtgatgagttttttcatagcaagtcaggtaaaaaaatttccgtaagaatctgtcccccatcctccccatttccagctatgtgggagagtcaggcctgccctttagtccacccaggtggccaatctcatcagcctcccgtgggcaaggctcacgtggccatcaggtatcctgggctactgggactaaggataagtgaagaggtgaaaggccga

SEQ ID NO: 1640 - DNA, 1073 bp, Homo sapiens
  SIMILAR (267)..(845): 581254mologous to Homo sapiens HSPC263,accession number AF161381,Smith-Waterman Score=471.
tttaaagatggcggcggaggaacctcatcagcagaagcaggagccgctgggcagcgactccgaaggtgttaactgtctggcctatgatgaagccatcatggctcagcaggaccgaattcagcaagagattgctgtgcagaaccctctggtgtcagagcggctggagctctcggtcctatacaaggagtatgctgaagatgacaacatctatcaacagaagatcaaggacctccacaaaaagtactcgtacatccgcaagaccagggcctgacggcaactgtttctattcgggctttcggattctcccacttgggaggcactgctgggatgacagcaaggagttgcagcggttcaaggctgtgtcttgccaagagcaagggtagaccttgggtgttcccagggggtttcacttgaatttcacaattttgagggattttccacaacaagtttcatgggacctgattgagcaggtggagaaagcagacctctgtcgccgacctgctggcctccttcaatgaccagagcacctccgactgaccttgtggtctacctgcggctgcttcacctcgggctacctgcagcgcgagagcaagttcttcgagcacttcatcgagggtggacggactgtcaaggagttctgccagcaggaggttggagcccatgtggcaaggagagcgaccacattcacatcattggcgttggcccagggcctcaacggggccatccagggggaggacatggaccgcggcgagggcggcaccaccaatccgcacatcttccctgagggctccgagcccaagggctaccttctctaccggcctggacactacgatatcctctacaaatagggctggctccagcccgctgctgtcctgctgcccccctctgccaggcgctagacatgtacagaggtttttctgtgggtgtaaatgggcctatttcacccccttcttcctgtcacatgacccccccccatgttttattaaagggggtgctggtggggaacatggaacccctccacaagaaggggcccccccttttgaaatttgccactttcgcacccccagcctgcg

SEQ ID NO: 1641 - DNA, 2051 bp, Homo sapiens
  SIMILAR (612)..(1046): 701254mologous to Homo sapiens HSPC263,accession number AF161381,Smith-Waterman Score=427.
  misc_feature (1)...(2051): n = a,t,c or g
ataacattgtcgccngcggaaccggaccggaattcctggcacgacccacgcgttcgatggtgggggaggaacctcagcagcatatgcaggagccgctgggcagcgactccgaaggtgttgactgtctggcctatgatgaagcgcatcatggctcaacacgaccgaattcagcaagagattgctgtgcagaaccctctggcgtcagagcgtgtggagctctcggtcctatacaaggagtatgctgaagatgacaacatctatcaacagaagatcaaggacctccacaaaaagtacttcgtacatccgcaagaccagggcctgacggcaactgtttctatcgggctttcggattctcccacttgggaggcactgctgggatgacagcaagggagtttccagcggtgaggaagggtgggcactggggcaccgaggcaggtgggtgtctacctcctccccggggcgagtaggatgtgtctcgagtagggtgtctccctccttcccgggcgatgggctggactctggccttgctcaggcggggcagtgctgtctcggccctggcgtctgggctggtcgaggagcccatgctgggcccgcctttccatcccacccccaggttcaaggctgtgtctgccaagagcaaggaagacctggtgtcccagggcttcactgaattcacaattgaggatttccacaacacgttcatggacctgattgagcaggtggagaagcagacctctgtcgccgacctgctggcctccttcaatgaccagagcacctccgactaccttgtgggctacctgcggctgctcacctcggggctactttaaggcccgagagcaagttcttcgagcacttcatcgaagggtggacgggactgtccaaaggagttctgccaagcaggagttggagcccatgtgcaaaggagagcgaccaccattcacatcattgcgctggcccagggccttcagcgtgtccatccagggtgggagtacatgggaccgcggncgagggcggcaaccaccaatccgcacatctttccctgagggcttccgagcccaaggtctaccttctctaccggcctggacactacgatatcctctacaaaatagggcttggctcaagcccgttgctgccctgctgcccccctctgccaggcgctagacatgtaacagaggtttttctgtggttgtaaaatggtcctatttcaccccctttttcctgtcacatgaccccccccccatgttttattaaagggggtgctggtggtgagccgtgtgtgcgtgtccctgctctgctgcccgcctggctgctctgtctgctgccccctccccccaggggggtccccctgcttttcacctatctactcctgagcttccccaacaggagcaggtttgaggggccaggcctcttggaggcccctcctcgcttcgttgggttctgcttccttcccttcttagctggctcaggggcttctatgggatcctggaagttccttagggacttgcccagggtcccagggccaccaacaacttcatctgctccctcataggccccacctccacgtcccggctgggccccagaccccagcttcctgccctccaccgggagtctgcatggttgggaagtcctggttggaggggcctttgtgaggcttggacccggctcagggcaggtggaggagctgggcctccccacaagggtgcccgggcaagtgcaatcctggtgggggagggcagcccttcaaacgtgtgggggtctacagtcctcaggtctcaggcagggctgccgggttctccacctccccaatccgccatcaggccccctgctctgtgcctgccttgcaccccctctgcttgggccacggtgtctctgcattgcctgcctttttgccttcacctcttttcttccccgccccctgcacattcggggtcttcagcccccaggctgtgagctccttgggggcaggccctcaataaatgtgaactgctgctgccgcaaaaaaaaaaaaaaaaaaaaaaaaaaaaaaacaaaaaaaaaaagggcggccgctc

SEQ ID NO: 1642 - DNA, 432 bp, Homo sapiens
  SIMILAR (156)..(266): 1001254mologous to Homo sapiens Human secreted protein, SEQ ID NO: 5362,accession number AAG01281,Smith-Waterman Score=194.
cacagtgtcaaccgaaagcgtctgaaccggaatgctcgacggaaggcagcgccgcggatcgaatggtgagggggctggggttccgggtggccgtgggcctcggccgggacggtccgcgagatgacggatccgcgatgtctctctttgccggtagctcccacatccgacatgcctgggaccacgctaaatcggtacggcagaacctggccgagatggggttggctgtggaccccaacagggcggtgcccctccgtaagagaaaggtactgacatggcagggtctcggtccttgtcttctttactcttcccccgccatactgacctaggtgtcagaacgtggtactgcccattccttccctcaggcccttccgagttttcgacctccccacagtcagaacgtcaactgacgttgagcaagggtctctttacgac

SEQ ID NO: 1643 - DNA, 1851 bp, Homo sapiens
  SIMILAR (903)..(1424): 321254mologous to Homo sapiens HSPC111,accession number AF161460,Smith-Waterman Score=133.
  misc_feature (1)...(1851): n = a,t,c or g
ttttttttaaatacaagtggatttttagagtttattaagcaggggagtggaggggagatgtggcacaaatagaactatgtaacattcaaacaacagcatctaggatttttgaaaaaactttcggttacagttacacaaagggtcacttcctccccaacgacacatgggcctctcaaaggagaggagggagtaattccccacggtagggccaagtggttgctcccctgggtttttggaaatccatttctgcggagcttttcaagncccaaaaccctgggctttagggtcgagacttcaataagcagtgacagccagaccccagcaaaaatggctgcgaaccgtgaaaacccctgggcggcgaatccgggtgccgcaatcaatgaagctgaaaagcgcctggctgttgcccccggtggaaaggagtaagaggccgtaaggtgaagggcggccgccgtggcccaggcaacctatgggtaccaccgggttctcgcgggtcttgcgaacgaacttttccttgaaactctctggattcctgtaaacagtggggctcagcccctcaatgactggaggcttcgatggttcaaaggggacctccggaattcacagggccgggagtcgccatgtccgggccacagcagcaggagaaaatcgggactccgacctcagcctcccggtgaaggtcatgaaaggggcggggaaacgaataaattgagccttgtacgcaggcgcaaatgctcgttgcatcctgggagtcgtagtgctcagcacggtagtgctacaaaaggactacatttccccaaatgcccgcaaagccttgtgcacgccttccggaaggagtttgttacacgaggtctgagagacagaggcagcgtgtttgagctgctggtgcggtggtcagcgcgatgcccaaggccaagggcaacaacccggtagcatgaagtttggttacagtaccctccgaaagcgtgatgagccggaatgctcgacggaaggcagcgccgcaggactcgaatgctcccacattcgacatgcctgggaccacgctaaatctgtacggcagaacctggcctagatggggttggcttgtggaccccaacagggccggtgccctcccgtaagagaaaggtgaaggccatggaaggtggacatagaggaagaggcctaaaagaacttgtaccggaagccctatgtgctgaatgacctggaggcagaacccagccttccagaaaagaaaggaaatactcttgtctcgggaccttcatttgactatgtaccgctacatggttagagaaccacggggaaggactataaggccattgccccgtgattgagaagaattactatccaagatacccccaaacagatttcggagttaagatcaaacgtctattaaacgcttttacccagcagagtggcaagacttccctcgattctttgcaagaagaggaagatggaggtgaaggtgcctggtttacatcacagctgccccagtgctgaggcgtcccccggacccagtgaagctggancccagggtgtaaggcaaggaggtggagtgactggtttacatcacagctgccccaggctgaggcgtcccccggaccagtgaagctggagccagggtgtaaggcaaggaggtgcctgtgtggctccagaggagctggccaggtcccatggaaatcagaggttacacacaacacgtgcacactccccgctctggggaaggaactgttctcagaggctccaatttattaatcatcttggggttcaccgaaaaagccagaacctgctggttttcagggtgggtgatgtaaatatagtgtgtacataataaagcaaatatattttacttca

SEQ ID NO: 1644 - DNA, 310 bp, Homo sapiens
  SIMILAR (16)..(309): 831254mologous to Bos taurus phosphoprotein,accession number M27444,Smith-Waterman Score=399.
  misc_feature (1)...(310): n = a,t,c or g
gaaaagaagcccaaaccaaggcccccagagaggtcccccaggcccctttgggtccctgagcctcagctggagatccggcgcaggagaccaacgcctgccatgctgttccggctctcagagcactcctcaccagaggaggaagcctccccccaccagagagcctcaggagaggggcaccatctcaagtcgaagagacccaacccctgtgcctacacaccaccttcgctgaaagttgtncagcgcattgctgagtctcacctgcagtctatcagcaatttgaatgagaaccaggcctcagaggaggaggatg

SEQ ID NO: 1645 - DNA, 1200 bp, Homo sapiens
  misc_feature (1)...(1200): n = a,t,c or g
cagagccaggctgctgtttttcctttgctgatgccagggagactggacggcttggtcccaagaggtattccccacagcgcagcatactggctgtggcagatcatggccagactgcctctttaggctgaccctcacccatccctcctcactgggtggggcatccctgcaggaactccagcaactcaagccagggaattagggagagaactctgatctctctaagtctgagtccctatcaggaggggtggctggctgttgtctccacaaaccagaagacttattctttccccctgctcactctgaggaatccaggcagcccagatggagtgggaattttccccggtacagcataccccctttcccaaagggacaaatcaaaagtgctttcattaagcaaagtcctggatcctgtgcctctcaactgggtgaaacaccccaggtgggtcaccagacaccttatacagggagcatttctactggcatcaggtgggtgcccctcaaggacagaagatcccagaggaaggagtggggtccccatctttgctgttctcccagcaccctctggtgacctccttcaggtgtgggagggaccccagataaatagggcttgaagtgaatcccccagcaaacccacagcagcccctacagaagagggtnccctgactgtcggaaagaaaaacagaaagcaacaacaacatcaaccaaaaagtccccacggaaaacctcatcttaaaggtcagcagccttcaaaggttcaaattgaggacaaattccttggaagatgaggaaaggaattgaaaaaccccttcacaactcaaaagggccagagtggctttgtttactccaaattgattcacaacacctcttacaggcaggggcacagtcctgggtggaggttgagatggatgaattgacagaagtaggcttcagaaggtgggtagtagcaaacttcactgagctaaaggagtacgctctaacccaacatattggaacgaatcccagaacttaaagattggttctctaaaataagacagacaaaaataaaaaagaataaaacggaaggaagaaaacctccaataagtatggggttatatatagaggccaattctacaaatcactggcatccctgaaaggagggtggagatatcaatgcattgggttagagcatgctcatttagctctgtcaaatttgttataccc

SEQ ID NO: 1646 - DNA, 1520 bp, Homo sapiens
  SIMILAR (142)..(714): 731254mologous to Bos taurus phosphoprotein,accession number M27444,Smith-Waterman Score=676.
tcagccttacagagactggaaaagaagcccaaaccaaggcccccagagaggtcccccaggccccgttgggtccctgagcctcagctggaggtggggggtgcctgcagtgcgctggctcagtctccttctgaaaagctggatccagcttgtttgaagcccttgagctgatcttagatccggcgcaggagaccaacgcctgccatgctgttccggctctcagagcactcctcaccagaggaggaagcctccccccaccagagagcctcaggagaggggcaccatctcaagtcgaagagacccaacccctgtgcctacacaccaccttcgctgaaagctgtgcagcgcatttgctgagtcttcacctgcagtcttattcagcaattttgaatgagaaccagggcttcagagggagggaggatgagctgggggagttttggggagctgggttatccaagagaggaagatgaggaggaagaggaggatgatgaagaagaggaagaagaagaggacagccaggctgaagtcctgaaggtcatcaggcagtctgctgggcaaaagacaacctgtggccagggtctggaagggccctgggagcgcccaccccctctggatgagtccgagagagatggaggctctgaggaccaagtggaagacccagcactaagtgagcctggggaggaacctcagcgcccttccccctctgagcctggcacataggcacccagcctgcatctcccaggaggaagtggaggggacatcgctgttccccagaaacccactctatcctcaccctgttttgtgctcttcccctcgcctgctagggctgcggcttctgacttctagaagactaaggctggtctgtgtttgcttgtttgcccacctttggctgatacccagagaacctgggcacttgctgccttgatgcccacccctgccagtcattcctccattcacccagcgggagggtgggatgtgagacagcccacattgggaaaatccagaaaaccgggaacagggatttgcccttcacaattctactccccagatcctctcccctgggacacagggagacccacaggggcagggaccctaagatctggggaaaaggaggtcctgaagaacctttgaggtaaccctaagatccttttctacccactttccctatggaggattcccaagtcaccacttctctcaccggcttctacccagggtcccaggactaagggcgttttttctccatagcctcaacattttgggaatcttccccttaaatcacccttgctcctccctgggtgcctggaaaaatggactggcagagacctctttgttgcgttttgtgctttggatgccaggaatgccgcctagtttatgtacccggtggggcacacagcgggggggcgccaaggttttccttcctccgtgcagctggctctgcccctttccccttcttccctgactccaggcctgaacccctcccgtgctgtaataaatctttgtaaataaaaaaaaaaaaaaagggc

SEQ ID NO: 1647 - DNA, 721 bp, Homo sapiens
aaaaaaagctggaaatttaaacagaaacttgtgactgacgtggatggagcttagtccagactccaaaccctaggtttaaaaacgtcccagggccccccaccccacaggtcatcgctgagtgtgaggagtcacagtgtggggggctgggcaccctcgggggtctttgactctccccagggcctgtggtgaactgactctaggggtccccctatgatgccctcagaagcccaaggtgggggcgctgcctccaaggggcccttggggcctccccaagcagcagggattcaccagggaaccccgctcaggatgggtgaggctctggaaggacaggctgggcaaacagctggacccagggtgcaggatggcctctgactttctttggaagaggagacagggtgctctcacaggtacaccccacgcatgcacacggtgcacgcctccacggcaccgcagatagtccagagcggccccttggtggccactcagtaatcaggcacacacacggctcccacgtgctcagacgcaccccagtttcacccacacacataaagggcaggacaggagactttggggtccaaggcagggaggcttctctgctgtagttgcccaagagcatggggaccaagctagccccctctaacacatgatacttcaccaggcaccgtcacccacgaacacctccagcagccacgctgaagaggctgagtccagatcacactga

SEQ ID NO: 1648 - DNA, 358 bp, Homo sapiens
  SIMILAR (356)..(228): 1001254mologous to Homo sapiens bA554C12.1 (RBX1 or ROC1 (ring-box or ring finger protein 1)),accession number AL080242,Smith-Waterman Score=241.
  misc_feature (1)...(358): n = a,t,c or g
ctcannnnnnnnnnnnnnnnnnnnnnnnnnnnnnnnnnnnnnnnnnnnnnnnnnnnnnnnnnnnnnnnnnnnnnnnnnnnnnnnnnnnnnnnnnnnnnnnnnnnnnnnnnnncannnnnnnnnnnnnnnnnnnnnnnnnnnnnnnnnnnnnnnnnnnnnnnnnnnnnnnnnnnnnnnnnnnnnnnnnnnnnnnnnnnnnnnnnnnnnnnnnnnnnnnnnnnnnnnnnaagatccataatgtggttcctgcagatggcacagttatcaaccacaatatcccaggcccagagggctactgcattccactttttcacttcaaagcgcttcttgcccgcgccgctgttggtgccgctcgggg

SEQ ID NO: 1649 - DNA, 386 bp, Homo sapiens
  SIMILAR (384)..(256): 1001254mologous to Homo sapiens bA554C12.1 (RBX1 or ROC1 (ring-box or ring finger protein 1)),accession number AL080242,Smith-Waterman Score=241.
  misc_feature (1)...(386): n = a,t,c or g
tttttaaaatatctcannnnnnnnnnacatcannnnnnnnnnnnnnnnnnnnnnnnnnnnnnnnnnnnnnnnnnnnnnnnnnnnnnnnnnnnnnnnnnnnnnnnnnnnnnnnnnnnnnnnnnnnnnnnnnnnnnnnnnnncannnnnnnnnnnnnnnnnnnnnnnnnnnnnnnnnnnnnnnnnnnnnnnnnnnnnnnnnnnnnnnnnnnnnnnnnnnnnnnnnnnnnnnnnnnnnnnnnnnnnnnnnnnnnnnnnaagatccataatgtggttcctgcagatggcacagttatcaaccacaatatcccaggcccagagggctactgcattccactttttcacttcaaagcgcttcttgcccgcgccgctgttggtgccgctcgggg

SEQ ID NO: 1650 - DNA, 509 bp, Homo sapiens
  SIMILAR (302)..(508): 1001254mologous to Homo sapiens bA554C12.1 (RBX1 or ROC1 (ring-box or ring finger protein 1)),accession number AL080242,Smith-Waterman Score=406.
tttcgttccgcccctttttgaagcttggggtcctctcacttggaggggtcctctcacttggagggatcctcgctgaaccgaggcctcacactgcctggttagagtctggagtgtaatgcttggctcttctgagacgtctgttggcttttcacacaaccaccccactcttgggttctctgtcacgtccagaatctcccccttccaaaataataataaaaagcatggtggaacttgttaagaaaatccgagcccaaatcctgtggcagttagggagggttgagtactagtcgcgaacgacttgtggaatgcagtagccctctgggcctgggatattgtggttgataactgtgccatctgcaggaaccacattatggatctttgcatagaatgtcaagctaaccaggcgtccgctacttcagaagagtgtactgtcgcatggggagtctgtaaccatgcttttcacttccactgcatctctcgctggctcaaaacacgacaggtgtgtccat

SEQ ID NO: 1651 - DNA, 3386 bp, Homo sapiens
  SIMILAR (1)..(1143): 981254mologous to Homo sapiens putative p150,accession number U93564,Smith-Waterman Score=2059.
atggccatactgcccaacgtaatttacagattcaatgccatccccatcaagctaccaatgactttcttcacagaattggaaaaaactactttaaagttcatatggaaccaaaaaagagcccgcatcgccaagtcaatcctaagccaaaagaacaaagctggaggcatcacactacctgacttcaaactatactacaaggctacagtaaccaaaacagcatggtactggtaccaaaacagagatatagatcaatggaacagaacagagccctcagaaataatgccgcatatctacaactatctgatctttgacaaacctgagaaaaacaagcaatggggaaaggattccctatttaataaatggtgctgggaaaactggctagccatatgtagaaagctgaaactggatcccttccttacaccttatacaaaaatcaattcaagatggattaaagatttaaacgttagacctaaaaccataaaaaccctagaagaaaacctaggcattaccattcaggacataggcgtgggcaaggacttcatgtccaaaacaccaaaagcaatggcaacgaaagccaaaattgacaaatgggatctaattaaactaaagagcttctgcacagcaaaagaaactaccatcagagtgaacaggcaacctacaacatgggagaaaattttcgcaacctactcatctgacaaagggctaatatccagaatctacaatgaactcaaacaaatttacaagaaaaaaacaaacaaccccatcaaaaagtgggcgaaggacatgaacagacacttctcaaaagaagacatttatgcagccaaaaaacacatgaaaaaatgctcatcatcactggccatcagagaaatgcaaatcaaaaccactatgagatatcatctcacaccagttagaatggcaatcattaaaaagtcaggaaacaacaggtgctggagaggatgtggagaaataggaacacttttacactgttggtgggactgtaaactagttcaaccattgtggaagtcagtgtggcgattcctcagggatctagaactagaaataccatttgacccagccatcccattactgggtatatacctaaaagattataaatcatgctgctataaagacacatgcacacgatctcatccaggataccacattgcatttagtcatcaggtcttcttaggctttgctaacattttcctcattttggatgaccttgaaagttctgagtactggtcaggcctatgcatgctttgtgatgaatttgtagccacagtgcagtgcttgggcgaaaagacatatgcccagtgtggattggcagcagatggtgctcatcagaatgcattgaacagtaatccaagccctcatgaagccatcattagcaaagcctttcctactgatggtgtgggccctgcccatgggggcgtgggacctgttgcatggatgatctggtttgtaggagagccagagaggtggcaggagtctcagactggaagccccaccctgagggatggtctggcagacaggccatccttgaagggcagcagccagcagccccaggcagagggagagaaaaaagaagcagcacagacacctgtagaaatagcactaatttggcctgatttaaattcaggtgctaacttgtggcagtcctgtgaatgtcaggctcagggcctgaggagttgcttgtggcctcactcacagggaaggcatgcatctgatggaagaactcagccacagccaaccccagcagtagaacccactctggaggtcaagggctccttgagggcagggacttactgcatggtagaccctgagcagcctgtcctccagggcaggagagaatgcagcacatggctattggagtccaagtcattcacctgctggttatttgacagggacttcctgagtgcctactcgagagaaacagaaccaatagagggtgtgtgtgtggacagaaaaagggagagggagagggagagggaaattgtattgaaggaattggctgatgcagttatagcagctggaaagtccaacatctgcagggttccacttcttggaccacctgcagggccatctcacagcattgtgaacattccttcaggctcctatttggggaaggagaaccttgtgggaaaatgtgccctgaatgtgagtgtgaatgtgaatgtgcaatttattgctgatgtggtagatgggactgaggcaaaaggacctggtggagaatggaaaagaaccagtgacaaaaaccacgatttctcaatagacgccaaaaaggccttcggcaaaattcaacaacgcttcatgctaaaagcactcaataaactaggtattgatggaacatatctcaaaataataagagactctggcacccctggagatgctgctggacctttgttgcaagaaagagtcaatgctaccacccttccatcagcccatatccccatggcaccatccactctaaaccagggcaatgatgaaaaagcaggggatcagagaagagcaagggcttgcgtgaagagcaacaacttgtacactgagggttgtgagagctggaagtctgagggagtgtgggtcccaaccttgcactcaagtgcatggtctgtatcttgtggaggagcctgcacagacaaggagttgcggaaccttgcctcccggctgaaggattggtttggagctctccacgaggatgcgaacagagtcatcaagcccaccagctccaacacagcccaaggcaggtttgacactagcatcctgcccatctgcaaggactccctgggctggatgttcaacaagttggacatgaactatgacctcctgcttgacccttcagagatcaatgccatctacctggataagtacgagccctgtatcaagcctcttttcaactcgtgtgactccttcaaggatggcaagctttctaacaatgagtggtgctactgcttccagaagcctggagagctcatcgcgtttgggcctctaaaggttaagggccctgtaattttgactaatagccaaccatccccatcctctgctgctgaccctgcagcagatattctgacatgggccttcatacctcggtgtaatgaggagggctattacaaagccacacagtgccacggcagcacggggcagtgctggtgtgtggacaaatatgggaatgagttggctggctccaggaaacagggtgctgtgagctgtgaagaggagcaggaaacctcaggggattttggcagtggtgggtccgtggtcctgctggatgacctagaatatgaacgggagctgggaccaaaggacaaagaggggaagctgagggtgcacacccgagccgtgacagaggatgatgaggatgaggatgatgacaaagaggatgaggtcgg

SEQ ID NO: 1652 - DNA, 4255 bp, Homo sapiens
  SIMILAR (724)..(1368): 431254mologous to Homo sapiens testican,accession number X73608,Smith-Waterman Score=369.
cactttgttcacatacaccaagagagagcatccgttccagaatccaaacttggactttatttgacacagaatacaataaggctaacagaaacagccaaactgaaaaaaacaaagccagaaaaaaacaccagttcccatcccaatttggtaattaggttaacagccagggaaaagtccattaaatgaataacaaaacaattaagcttgatggaagaagtcttttcctagtgccccatacctgaaagacaaagtaaattactttttggaattccccactctctgttgtccaaatggacacacctgtccgtgttttgagccagcgacgagatgcagtggaagtgaaaaggcatgggttacagacttccccatgcgacagtacactcttctgaagtaggcggacgcctggggttaggcttgacattctatgcaaagatcccataatgtgggtttctgcagatgggcacagttatcaaccacaatatcccaggcccagagggctactggcatttccacttttttaacttcaaagcgcttcttgcccgcgccgctgttggtgccgctcggggtatccacatccatcgctgcgggctcacaaagcggccagacgctcggcggcggcgtgtggcaggagcgcaggggcgcgagccggcgatcagccttcccggcgaccgtgccgcgggagctcgagcaactcggactaggggacccgggccggcccccaagatgccggcgatcgcggtgttggcggcggccgccgcggcgtggtgcttcctccaagtcgagagccggcacctggacgcgctcgccggaggcgcgggccccaaccacgggcaatttccttagacaatgaccaggtggctgagcaccgtctcccagtacgaccgggacaagtacatggaaccgctttcgagacgaagttgaggatgattatttcagaaactgggaatcccaacaagccctttgaccaagccctgggacccatccaaggacccctgcctgaaggtaaaatgcagccctcacaaagttgtgtgtgacccaggactaccagaccgccctggtgtgtcagccgcaagcacctgctccccaggcaaaaagaatggggaacgtgggcccagaaacactggggtttggacctttgaattttggtcaagttgcaagccctgttcccgtgggcacagtcagccatggtctggcggctcaagatgggccactcctaacagcattccaagttgcaaatttggagttccatgcttgttctactgggcaaaagccttcgccaccctctgtgatggggccctgtccctgttcttcccagagcctggagccaccaaagcacaagggcagaaagggagtgccttgcacagacaaggagttgcggaaccttgcctcccggctgaaggattggtttggagctctccacgaggatgcgaacagagtcatcaagcccaccagctccaacacagcccaaggcaggtttgacactagcatcctgcccatctgcaaggactccctgggctggatgttcaacaagttggacatgaactatgacctcctgcttgacccttcagagatcaatgccatctacctggataagtacgagccctgtatcaagcctcttttcaactcgtgtgactccttcaaggatggcaaacctttcctaaacaatgaatggtgcctactgccttcccagaaccctggaggtctccccttgcccagaatgaaatgaacagaattcaagaagctgagtaaggggaaaagcctgttgggggccttcatacctcggtgtaatgaggagggctattacaaagccacacagtgccacggcagcacggggcagtgctggtgtgtggacaaatatgggaatgagttggctggctccaggaaacagggtgctgtgagctgtgaagaggagcaggaaacctcaggggattttggcagtggtgggtccgtggtcctgctggatgacctagaatatgaacgggagctgggaccaaaggacaaagaggggaagctgagggtgcacacccgagccgtgacagaggatgatgaggatgaggatgatgacaaagaggatgaggtcgggtacatatggtagtgcccacaagaaagaggacacaagttttgcacaaaattgcaagtcacttcctattcctgcatttgtatctaagactccaaggcaccaaggtctcttctccattgttgctctctatacccgaccctaaggtttggaagacaactgcctgttccccagaggattctgattttgcatatgtttgtatgggagaaagggtgttgtgttttttttttttgttgttgtttattttttggatagggaagtcattggcttaattagagcctccttcctttctgtgagatttttccaacaagcatgtgatttacgtggaattctgacagtgcagggagcccccaccctcttaaatgtcaaagaccctttttgattacccacactggtggttattacagcatggttcccagccttacagtgtcctaagtgcttctcttgtgtcctgtagatgttgtgaaaaagaaaaaaacaaaaaatacaccacactgtactttttccccctgcccccgttactgccggtgattattattaaaaattagtttttttcacatcattctatctggcttcctataaacaacagccttaattcagtcaagactccctttggggaattcattttattaaaaattggtgtctggatacttccctgtacatgcataaatatgcatgcatgtacagaaagactgtatgtgtgtgccttgcacacacacccatacctctcagaaaaagtgtttgggtatcttaaaaactcgaaaaacaatgataaatttctcagcttgtccagacctggaacaaaatttctggaataagaaatttgtattaaagtccttttttgcactaacagttggctcttgtagcctgcaggctgaggaagtctcttctctgtgcatcagcagagttactgaaagcctctgattgagaaaaaacctccgtctgcctaaatcacttttctcgcagaagccatgcgactcccacacgacacgggcagcttcacaagccatctctttcatttctgcttgaagcccccttggctggcagcaatcctgtctggccataggtttcttccttccttacctacttcaaggggctttttctaagggcatggcacacatatcttcctgtttctctggaggagtaccatggggttccttaaaagaagaaaatttctaattctgaactcaatgttttgcttttactccctttctactgacaaatcatgataagggcacaaaagctgtacagatttttttttttaaccactcaatcccaaatggaggcctacaaagaacatcgtaataacacatggaagcaaaccctgggtttttaagagcaaattctgtccccccctcactcccccaagtgacaagatactaatgaagaaagttcttcaccatagtgtttgttttaactaaactcattggagtctagttccaaatttgggtaggggtcatcatctctacattccttaggatttctctccctatcaagctggcccagatacaagtaccaaacagtagtctctgaagttcccccatttccttcagtaccagtctataagctactgtccgccactgattttcatctatcagggtgtcctaatcagaatcagccacccaagcaagcctctctggcccacatatctatctcttgccttcccccatgaacttcagcctgtccacacaaaagccacataaactcaagcaagaaatatgttcagccaaaacatgattatagtggcagctgaccaatcccccatcccaaattgaccatttagatgtaccaactcaccttaaattagcatgttcctatccagtcgggcattgcctggaatacagtaggcatcatacctatagttgggtcttaggataaggaaatggaacttacttggatataggcaaagtcctttggcttcgtaaataaccctgaggttttgtacttactttccccataggaagacagaccataggcaaactctgttttgggatctcaactccatcacctttgattcaatattttttttctctcttgaacaaaactgagataatttagaaaacaggtgcttaattgcaataaaattactatgaagtatattaaaaatcacgacattgtaaaatctcactttagatcatcaaagaaaaccattgttactatctcctttgagcttaggaa

SEQ ID NO: 1653 - DNA, 904 bp, Homo sapiens
  SIMILAR (724)..(401): 661254mologous to Mus musculus putative,accession number AK015720,Smith-Waterman Score=330.
ctacaccaacaggcagctgtggcctggctgcccacctccttccttcccagccaggagcactgctgcagcaccgagtggagagccccacagccagcagcttcgggggtccatggtatttgctttgcgaaccttttgcctcttccactgtctccacagaggtttctggaagtttctgttatctgcctgctcctctgggtatacggctttctgctctgaactgagagacctttggcctggtggtgcttgggaaagtactggcttcaagaacttcttggctgtcatccagtccctctcgccatgctctgagactgtcttgctcttctgaagtcctccctggtcccaatgggctcgcccacccactgcaaggccatagtcactgaggaaccgctccatctccctgaacctgccgctgcagctgcacacacatcgtctcccagttcctcctgccgctgcaagggttgcctcggctgggtgtggcccggagggtctgcaccaggtcctctagggccgctatcttttgatccttggacagtatctcatcagtctgggccttcacctgctgctccaggtcccacaacttcctcgtcatgaaggccatcagctccgagtcatgggatgcagggacttgccgactcacaggggcacctatgccgccatagcaggaagggactgagatcttttcttctgagccacacccatcactcaacatgtccacctcatcttctgcagacagggatgcctaggtcaccgctcatctccatagatgcggattcctcgcctcccaggattcataggctccgagggcaggggcacttttcgggtcttgctaagggaggccaaaggtgagctcatagttctacttctagaatccagctgtcaggaactcccacgcagggccctagcc

SEQ ID NO: 1654 - DNA, 446 bp, Homo sapiens
  SIMILAR (210)..(1): 701254mologous to Homo sapiens hypothetical protein,accession number AL050209,Smith-Waterman Score=248.
  misc_feature (1)...(446): n = a,t,c or g
gaaacaaaggacaaaggaaacaatagatgctctgcagaagctgatacaagtcaaaggatttcgtttcctgctgcttttcaaagcaatggcaggataagcggaatctttcaaatagaatgccgtgtgttggtaatttaacagtaatatactgaaaacgtagtgtataactccaggaaccaaataatggtacagtggtaaaatggaatagtgcccgctgaaataaatattatttcataagggtttgtggtttcgctggatagtaggtagggacagtgggaatctcgttcatccattcatgcgcgtcactaattagannnnnnnnnnnnnnnnnnnnnnnnnnnnnnnnnnnnnnntcccgccgtttacccgcgcttcattgaatatcttcacaaagacattcagagcactgggcagaaatcaccggacgcgtgggtcgcggggggact

SEQ ID NO: 1655 - DNA, 680 bp, Homo sapiens
  SIMILAR (244)..(678): 961254mologous to Mus musculus putative,accession number AK019849,Smith-Waterman Score=731.
gagcagtgccggagccccgccagagcccgacttcagccccagccagatcccgcgtcaacggaggcggaacggcggaccccgtaccctggcagcatcggagcaccggcgggtgaaggcaaggtccctggactggtcatatacctcttgtggccctggcagaatcaagatgaggccctgtcatgcctccccagtgaggcctacagtctgagcagacagcatggcctgccactggcagtgaacaccatgtctgcaggaggtggccgggcctttgcttggcaagtgttcccccccatgcccacttgccgggtctatggcacagtggcacaccaagatgggcacctgctggtgttggggggttgtggccgggctggactgcccctggacactgctgagacactggacatggcctcgcacacatgggtggcactggcacccctgcccactgcccgggctggtgcagctgcggtagttctgggcaagcaggtgctagtggtgggtggtgtggatgaggtccaaagcccggtagctgctgtagaggccttcctgatggatgagggccgctgggagcgtcgggccaccctccctcaagcagccatgggggttgcaactgtggagagagatggtatggtgtatgctctggagggaatgggccctgacacggccccccaggcccaggtacg

SEQ ID NO: 1656 - DNA, 520 bp, Homo sapiens
  SIMILAR (144)..(311): 391254mologous to Homo sapiens line-1 reverse transcriptase,accession number U83303,Smith-Waterman Score=90.
  misc_feature (1)...(520): n = a,t,c or g
gtggccnaggcggccnncctgatnacaactgaacacgtttacgccaagcttnnnnnnnnnnnnnnnnnnnnnnnnnnnnnnnnnnnnnnnnnnnnnnnnnnnnnnnnnnnnnnnnnnnnnnnnnnnnnnnnnnnnnngcatagattggaaaggaagaaataaaacttttattatttccagacaacttgatggaatatacagtaaatttttaaatgtataaaccattagaattaataagttagtttagcaaggtcactgagtatcaggtgaacacagaaaaataaactgtatttatacctaacagctacaaatagaaaatgaaattgccaaaacaatataatttatgatagcatcaaaaagcatcaaatacttagaaataagtctaacaaaatgtaactaaatggagggatatactatgtatatgcattggaagactcagtattataaaggtgttggttcttcccaaactgatgtgtgggggggaaaagatttttaacccaaatccaacagggttttgggg

SEQ ID NO: 1657 - DNA, 483 bp, Homo sapiens
  SIMILAR (63)..(158): 871254mologous to Homo sapiens Human secreted protein, SEQ ID NO: 4473,accession number AAG00392,Smith-Waterman Score=147.
atgggccaggcgcggtggctcacgcctgtaatcccagcactttgggaggccgaggcgggcggatcacgaggaccctcagctgcaggtctgttggagtttgctagaggtccactccagaccctgtttgcctgggtatccgcagcagtggctgcagaacagcggattttcgtgaaccgtgaatgctgctgtctgatcgttcctctggaagttttgtctcagaggagtacccggccgtgtgaagtgtcagtctgcccctactgggagaatgccttccagttaggctgctcagggacggtcacagttggtagcacgacagtgactctagctgagtgtttaaaatggctgacaactttccagctggtttccatcggcttggccgcagtggcgatggacgtgctgaacacaggcgatgttgtctggcttctcaacgttgctgctgagtggaacagttttgtgaatatcccaaatgacagtctctcatga

SEQ ID NO: 1658 - DNA, 1050 bp, Homo sapiens
  SIMILAR (514)..(1047): 1001254mologous to Homo sapiens hexokinase IR,accession number AF016365,Smith-Waterman Score=887.
atggtctcgatctcctggcctcgtgatctgcccgcctcggcctcccaaagtgctgggattacaggtctgattggggccctggtcctgtctgtgggcatctatgcagaggttgagcggcagaaatataaaacccttgaaagtgccttcctggctccagccatcatcctcatcctcctgggcgtcgtcatgttcatggtctccttcattggtgtgctggcgtccctccgtgacaacctgtaccttctccaagcattcatgtacatccttgggatctgcctcatcatggagctcattggtggcgtggtggccttgaccttccggaaccagcagttgctcttaaggcagcaggtgctgtcccacaccctgggttgtgcagacctctcagatggcccaggatctggccctgtgaaaatgttcatgggagtgcctgtgattccagcccagccaccagagctcctggccagcctgcggctttccaggggctacgggttagtgctttcctggctggagcccaggtatgagaagatgatcagtggtatgtacctgggtgaaatcgtccgcaacatcttaatcgacttcaccaagaagggattcctcttccgagggcagatctctgagacgctgaagacccggggcatctttgagaccaagtttctctctcagatcgagagtgaccgattagcactgctccaggtccgggctatcctccagcagctaggtctgaatagcacctgcgatgacagtatcctcgtcaagacagtgtgcggggtggtgtccaggagggccgcacagctgtgtggcgcaggcatggctgcggttgtggataagatccgcgagaacagaggactggaccgtctgaatgtgactgtgggagtggacgggacactctacaagcttcatccacacttctccagaatcatgcaccagacggtgaaggaactgtcaccaaaatgtaacgtgtccttcctcctgtctgaggatggcagcggcaagggggccgccctcatcacggccgtgggcgtgcggttacgcacagaggcaagcagctaa

SEQ ID NO: 1659 - DNA, 693 bp, Homo sapiens
atggtcttgatctccggacctcgtgatctgcccgcctcagcctcccaaagtgctgggattacagccctgccctctgcatcttctatcatgccatctttgcagtttcttaaatacatcaagcttatccttgctaaccctgtgcttggaaagagctacacggttagatccttctgtatgtttacatctcagttcccatctcctcttccgttgtgcagatactttgctgctgctgttgatgacatgaatctgggcctaagtcgagccccagccaacccctttgacccctcggtgcccctggactgcctggaggctactcatgtgctggacaaacaggccaattgctggagcatgcagcttgctgtgcttggcacagctgctgctggatcgcaattccatgtaagatgtgcctacttccccttcaccttccaccatgattgcatcacagggctggtcccagattggcatcagaatcccagattgggttctccattggaagcagatgccttaaaaggtttcttggctgacagatgcatcccccagaccacacatttttgttctcctctgaccattccagattcagcagctacctcttccaagtgtctatccatgaaaccaggggaaagtaataggtaccgagctgattaccgatcggggttaaatagaggaaatgttaaaggccgagaacggctgtga

SEQ ID NO: 1660 - DNA, 424 bp, Homo sapiens
  SIMILAR (2)..(340): 841254mologous to Homo sapiens dJ657E11.4 (similar to 60S acidic ribosomal protein PO (based on GENSCAN)),accession number AL035413,Smith-Waterman Score=489.
tgggatagcgcgcgaggccctcggtcggacgggacgctcgggattcagggactgcctcggcacacgggaagttgccctacaggcgcgggagaaagcgcaggcggcggcttggcagggagaggcaggctgcagtgcacattgggtcaggcacacgcgaggggcagcccccgagggccgtcccagagtcccccgcgccgccggggtcctaacggggtgcaccgtcttccgccgcacgtggattcagcgcgatgcccaaatccaagcgcgacaagaaagtctccttaaccaaaactgccaagaaaggcttggaattgaaacaaaacctgatagaagagcttcggaaatgtgtggacacctacaagtaccttttcatcttctctgtggccaacatgaggaacagcaagctgaaggacatccggaacgg

SEQ ID NO: 1661 - DNA, 1268 bp, Homo sapiens
  SIMILAR (558)..(334): 901254mologous to Homo sapiens glucose transporter-like protein,accession number M20681,Smith-Waterman Score=359.
tcaacaagatggtgaattgactagtgggtagatccacaggacgggtgtggtcgccatgatcgcgtagtcgatagtggctccaagtagcgaagcgagcaggactgggcggcggccaaagcggtcggacagtgctccgagaacgggtgcgcatagaaattgcatcaacgcatatagcgctagcagcacgccatagtgactggcgatgctgtcggaatggacgatatcccgcaagaggcccggcagtaccggcataaccaagcctatgcctacagcatccagggtgacggtgccgaggatgacgatgagcgcattgttagatttcatacacggtgcagcagcagaggggaagagcaatccgactaggaagttggaggtccagttggagcagccggccactgccatcgcagctgggcgggggccctggctgaagagttcggccacaataaaccagggaatggggcctggtccaatttcaaaacaggccacaaagaccaagatagccccaatacagacaaagctcatcccattatagtgattagaaagtaaagtgaagatagtattaaccacacccgcgctgatggtggcatagatgggctgttgaacacctgcatccttgaagattcctgttgagtaatagaacaccttgttagccaagatggtctcgatttcctgacctcgtgatctgcccgcctcggcctcccaaagtgctgggattacaggcgtgagccatcgtctgcgcttctatttcgatcaccaagatgtggctccggaatgcggggcttacttcttccatgaattggccaaggagaagcgcaagggtgttgagcgtctcctgaagatgcaaaaccagcgtggtggccctgctgtcttccaggacatcctgaagccaggtcaagatgagtggggtaaaaccctggaagccatggaagccgccatggccccggggaaaaatctcaaccagagtcttttggatcttcatgcactgggttccgcccctacagacccccatctctgtgacttcctggagagtcacttccgagatgaggaagttacctttatgcctcggaagagtgcagacctccatgcagcgggtgaggctgccagcctaggtggggtgtcattgaatgtcatgaagggagccagccttcatgcactctgcctgcgtctcctgaacagctttggaccaggagttgctaccttgtgcggagaacgtgtggtgcataagaacaaccgagcctctgctcttcgaaaatgtatattctggccag

SEQ ID NO: 1662 - DNA, 755 bp, Homo sapiens
  SIMILAR (159)..(650): 631254mologous to Homo sapiens dJ657E11.4 (similar to 60S acidic ribosomal protein PO (based on GENSCAN)),accession number AL035413,Smith-Waterman Score=440.
tttcgtcaagaaaggggggcgaagggggagtcgggaccctggggggagctccgtgggctggctacccagcctggggggagggcttcggggcggcgggggcgcagattggaacgccaggacatcctcgaggggttccgctgcctcgctgcgagctggaatgggggcttcggggctgtaaaaccgccagaggtggctgacgcccggtcgggtctggggagcggagactcgttttgcctattttcaggtgctcttgcaaggccaactgggtcgggaggcagctcctgaacaccgcccccggctatgcctgctgccgtttcggcccacttttcccaacttcggccctttctcatcttcctgcgctcccgccaccctggctgcctttcccttctttcagcacagtctccttaaccaaaactgccaagaaaggcttggaattgaaacaaaacctgatagaagagcttcggaaatgtgtggacacctacaagtaccttttcatcttctctgtggccaacatgaggaacagcaagctgaaggacatccggaacgcctggaagcacagccggatgttctttggcaaaaacaaggtgatgatggtggccttgggtcggagcccatctgatgaatacaaagacaacctgcatcaggtaagtctctggccctcacggggtggagctaaggcaaagccgccctctcttccactactcccatgtgacagcctcccccagccattggcaggccagaggctcagggagagc

SEQ ID NO: 1663 - DNA, 4037 bp, Homo sapiens
  SIMILAR (1)..(1152): 771254mologous to Homo sapiens dJ657E11.4 (similar to 60S acidic ribosomal protein PO (based on GENSCAN)),accession number AL035413,Smith-Waterman Score=1425.
atgatgcgagcgcatgcaccacccaccgccgtcccggcatgcaccgcgccgcgggctccgcctccgcgggaccacagagctgggatagcgcgcgaggccctcggtcggacgggacgctcgggattcagggactgcctcggcacacgggaagttgccctacaggcgcgggagaaagcgcaggcggcggcttggcagggagaggcaggctgcagtgcacattgggtcaggcacacgcgaggggcagcccccgagggccgtcccagagtcccccgcgccgccggggtcctaacggggtgcaccgtcttccgccgcacgtggattcagcgcgatgcccaaatccaagcgcgacaagaaaggtgggcgaagggggagtcgggaccctggggggagctccgtgggctggctacccagcctgcggtgagggcttcggggcggcgggggcgcagattggaacgccaggacatcctcgaggtgttccgctgcctcgctgcgagctggaatgggggcttcggggctgtaaaaccgccagaggtggctgacgcccggtcgggtctggggagcggagactcgttttgcctagtttcagtctccttaaccaaaactgccaagaaaggcttggaattgaaacaaaacctgatagaagagcttcggaaatgtgtggacacctacaagtaccttttcatcttctctgtggccaacatgaggaacagcaagctgaaggacatccggaacgcctggaagcacagccggatgttctttggcaaaaacaaggtgatgatggtggccttgggtcggagccccatctgatgaatacaaagacaacctgcaccaggtcagcaaaaggttgatggggtgaggtgggtctcctgttcaccaaccgcacaaaggaagaggtgaatgagtggttcacgaaatacacagaaatggactacgcccgagctggtaacaaagaaggatttcactgttgagcctgggatccaggggcccctggagcaagttcccccacttccatggagccacagctcaggcagctgggcctgcccacccgccctcaagagaggtgttggtgactctgctgtctgacttacgaggtgtgcaaggagggcgatgttgctgaccccagagcaagggcttcgcgttcctgaaagctttttggggtaatgagatggctgaatttcaaggtgaccattccaaattacatgtgggattcacagtcgggaaggttccagcagattgggaagaccgactttgccagagagcgcattctgagttcccagaagagtcagactcagaagatgatgactgaaagggactcgggactgaaggtctcctgggaagcttctgggtctcactggaccatcaggactgctgccgcccctctggagagagcagctttttatttgtctgtagacagggaacatgatgggcactgacctcctgtaaagaataaaactgtgggccgggcgcggtggctcacgcctggaatcccagcactttgggaagccgaggtgggcagatcataaggtcaggagattaggaccatcctggctaacacggtgaaaccccttctctactaaaaatagaaaaaaaaactagttgggcatagtggcatgtgcctgtagtcccagctactcaggaggctggaggcagggagaatcacttgaaacccgggaggcggaggttgtagtgagccaagatcgcgccagtacactccagcctgggcaacagagcaagactccatctcaaaaaaaaaaaacagtttcctgaaatattgagaagttatttttattttacttggttccaaaactagtgtgaataaggttgcttctgcaactttagtttatatgtgattcttaattttttacggtttgtagactctgagaatttgatgaaagccacagattctcttcctctagtacccatacacatctaattgcatgtaattttgggcttttgttagcctccctggagcccgggtcccagccatgtgtctaaggccaacataatggtaatagttaaaggacttcatgtagcaagccagaactgaactaaatacatggacatctcaaacatgagtgtcatttaggactgaaggcaaattaatgtcatggggtggagatcaataagaaggtaaggagccactggcagtatgagtccaaacagggtataccatggaaatcacctgtggaagaggaaggtggattccagaagaaagaaaacttgtgggagtgagcatttcaaggatggagagatcttgaagatactcacagggaagatagtggtggggcatgccatccacaacgacttcaaagcccttcagtactttcaccccaagtccctcacccgtgacacctcccatatcccccccctcaaccggaaggctgactgcccggagaatgccaccatgtctctgaagcatctcaccaagaagctgctaaaccgggatatccaggttgggaagagcggacattcctctgtggaagatgcccaggccaccatggagctatataagttggttgaagtcgagtgggaagagcacctagcccggaatccccctacagactagtggcagtggggacgctggtgatatgaggaggcagaggcagcacccaggagaaacagggcagtggaccaatggacagctccaccagctccacatctttgggaagctagatttgggggagagagaagctctaccccagacttaatacccattgaaatttcacctcaggtgttgtgtcctgtgtctggttaagtgtcccatggaaggggaacatgccttcacgtcagaacccaaccgtataccttgtacttcttaaatggtgctaaccacaggagtcccagggcgctctgtgccagctaagatttttaactttcacggggcagggcatactgggaaatgtagtttcccagactgccttatcacttgggtggacatatgtctccttttatgccttttggtcttgagtaattaacagcattctcttccacgctcagaagtgttctggttggggccaggcatcgagacgtcacgcctgtagtcccaacacttagggaggccgaggcgggcggatcaccctgagatcaggagttcaagaccagcctggccaacatggcgaattcccgttctctactaaaaatacaaaaaatgtgtggggtgtggtggcaggagcctgtaaatcctagctactcaggaggcttgaggcaggagaatcgcttgagcccaaggaggcggaagattgcagtgaacccgagatcgtgtcactgcactccagcctgggtgacaagagtgagactccgtctccaaaaaaaaaaaaaagaatttattaacctggttggttaataaattgtgtggtccctgccgggcgtggtggctcacgcctgtaatcccagcactttgggaggccgaggcgggcagatcacgaggtcaggagatcgagaccatcctggctaacacggtgaaaccccgtctctactaaaaatacaaaaaattagccaggcgtggttggcgggcacctttagttccagctacttgggaggcttaagcaggagaattgcgtaaccccaggaggcggactttccagttagccgagattgtgccactgcactccagcctgggccacggccacagagcgagactctgtctcaaaaaaaaaaaaaaattaaaattgtgtggtccctttccatgtcacagagtctgcttttggctcagagtctgtatctagcctgtgtcaggatattgcctgttcttcccaccttgacttccagagcagccatcgctggtgagctttagttctccttagggttccaaggcattagaagtaagagtgtagcttggaaaccaacttctgtgatttaggaaagctgtctctttcctaaggtaatagggggtttatttcatttaggccccagttggtaggttttaaaataatttataaagtgttttaataatttggttgtcttttttaccttgctaaaccaagcctctaaaaactcaaattattcccttgataaatttttataatggaaaaaaaaaa

SEQ ID NO: 1664 - DNA, 405 bp, Homo sapiens
  SIMILAR (145)..(372): 761254mologous to Homo sapiens synaptobrevin 1 (SYB1),accession number M36200,Smith-Waterman Score=278.
cggacgcgtgggcagctaaaccgtggggtatacggccctaggcggagcttgtcagttccgtccactttagccggggcgcccctcgccgggcgtctcgacgaaacctccggagaggaacagaccctcactctctgtggcggaaaaatgtctggtccaactcagccacctgctgaagggacagaagggactgccccatgtgggggtgcccctgtccctcctcctaacatgaccagcaacagacgactacagcaaaccaaggcccaagtggaggaggaggtggacatcatacctgtgaacggggacaacgtcctggggagggaccataagctgagagagctggatgaccgatcatgatgccttgcaggcacgagcatgaccatttgagagcagcgctgcaagctaaaa

SEQ ID NO: 1665 - DNA, 779 bp, Homo sapiens
acgtgtttttatttttcaaactccgtgtttcctaacgtggagtgtatgggtctaagagagcctgctgtcctccctgccttccaccttggagaggaggctggacgcatcagcagtggccagggcaggtcgcaaaatctcccagcctagagaccacacctgaaacggctgaagccagcttgcacatgggcacaacagggccttgtccttagagcactggggggtcatggctgggaggggcatggcaggggctggcatccctgtagagccagaggggccaccccagggcagtgacattccagatatgttgggctcacctcatccttgctgtgagactggagttccgatggggaccatgaaagtcagtacatccgcagagctgctcagctgctctacctctcgctgacttttttgttgcacatatacattttctttcaattagcatttatttcagcttttatttaagctttttgacagtacatgtaaaatatatgattataaccatttaaaaataccttatgtacctggttttttttggaaactaaatagaaatatatttatcttttacataaaagaagcgtgtagtgggggggtccagggctttgtggtggcttagtggccatcggggacccaggctcttcccacctttctcttttgggtccacctcttggctcctggcttccttcctctggggcctgactgtccaggatggcagctggagctcctgctctgggcacgggtggcatcagaacccactgtttcccattcactctttaatacaa

SEQ ID NO: 1666 - DNA, 805 bp, Homo sapiens
  misc_feature (1)...(805): n = a,t,c or g
tttatttttaaatggttataatcatatattttacatgtactgtcaaaaagcttaaataaaaagctgaaataaatgcttaattgaaagaaaatgtatatgtgcaacaaaaaagtcagcgagaggtagagcagctgagcagctctgcggtgtactgacttcatgtccccatggaactccagtctcacagcaaggatgaggtgagcccaacatatctgggaatgtcactgcccggggtggcccctctgggctctacaggggatgccagcccctgccatgcccctcccaggccatggaccccccagtgctctaagggacaagggccctgttgtgccccatgtgcccatctgccccttnctccctgcccctggtcccatgggtgtctatgactgctctgtgacccctgccccccaccagctctgcctgccgcagagggacagcagcccttgtgcaagctggcttcagccgtttcaggtgtggtctctaggctgggaaattttgcgacctgcccctggccactgctgatgcgtccagcctcctctccaaggtggaaggcagggaggacagcaggctctcttagacccatacactccacgttaggaaacacggagtttgaaaaataaaaacacgttaatctactggcaaaagcagctggcagaagctaaaatcactggcctaggaagcacttcaaaatcaacaacagggcttaggtgaaggagttattgggtatcacagagcaagaaaaaaaatcatgggtacgtggtctcaggacctcttgagattgtgccttaggcaaaaaaaaaaaaaa

SEQ ID NO: 1667 - DNA, 588 bp, Homo sapiens
  SIMILAR (304)..(555): 971254mologous to Oryctolagus cuniculus PKC-gamma (AA 1- 672),accession number X04796,Smith-Waterman Score=453.
atggcagagctgctgctccagcctttgctgcagcaagactgtgatggcagctgctccatcccggtgggtccccgaatgcaaccagcagaggcctctctgaccctcaacgtacagatgaaagccacacgtccccctgatggcacagaaaggaacatctcaagattaaacaagaggattctgtacaagcgctggtccttgctctgcctttctgacgctaagctcaaggttacgcagccaaagggggagcattacggaatttcccatgaacgctttcctcctgtgccatcccgccagagtgaccgggaacctccatttgatggtgaagatgaagacgagctatttcagtctatcatggagcacaacgtttcctatccaaaatccttgtccaaggaggctgtttctgtctgcaaaggactgatgaccaaacacccagccaagcggctgggctgtgggcctgagggggagagggacgtgagagagcatgccttcttccggaggatcgactgggaaaaactggagaacagggagatccagccaccattcaagcccaaagtgctggacagctgcagagcacccccgcacgactag

SEQ ID NO: 1668 - DNA, 1050 bp, Homo sapiens
  SIMILAR (205)..(624): 971254mologous to Homo sapiens protein kinase C alpha (AA 1- 672),accession number X52479,Smith-Waterman Score=699.
atggcagcactgagagccatgggggtctccagcctgtggactgctgctcagagcctggagtggtctgaatggaaccctcaggtgttcgcaggtgtgcaggacagaaagctcaggtgtttgcaggtgtgcaggacagaaagctcaggtgttcgcaggtgtgcaggacagaaagctcaggtgttcgcaggtgtgcaggacagaaagcgcaggtgttcgcagaaagccaaacttggccctgctggcaacaaagtcatcagtccctctgaagacaggaaacaaccttccaacaaccttgaccgagtgaaactcacggacttcaatttcctcatggtgttgggaaaggggagttttggaaaggtgatgcttgccgacaggaagggcacagaagaactgtatgcaatcaaaatcctgaagaaggatgtggtgattcaggatgatgacgtggagtgcaccatggtagaaaagcgagtcttggccctgcttgacaaacccccgttcttgacgcagctgcactcctgcttccagacagtggatcggctgtacttcgtcatggaatatgtcaacggtggggacctcatgtaccacattcagcaagtaggaaaatttaaggaaccacaagcagtggatctgaagttagataacgtcatgttggattcagaaggacatatcaaaattgctgactttgggatgtgcaaggaacacatgatggatggagtcacgaccaggaccttctgtgggactccagattatatcgccccagagggcctcttgccaagatccatccttcctgtgaacaccgccctgctggcgtatgcactcctgtggccagtggaggagtcagtggatggctgttttcaggggcagtgggacgcagttagacatgcaggggctattggacttaccactaatgtaattgatgtgtttgttttcacacagataatcgcttatcagccgtatggaaaatctgtggactggtgggcctatggcgtcctgttgtatgaaatgcttgccgggcagccgagcacagatcagttacataggatatcttag

SEQ ID NO: 1669 - DNA, 1677 bp, Homo sapiens
  SIMILAR (994)..(1431): 671254mologous to Homo sapiens protein kinase C- gamma,accession number M13977,Smith-Waterman Score=540.
atgaggagtcagggtgaagttcggaggtacctaaagagacagtcctgccgatttggacttggcagtcgagaaaaagacatggttacaccttctgcctcctctgtgtgtttaatagatgaacaaataccagctgctggggaatcttatgacattatagaccccaggagcaagcacaagttcaaaatccacacttacggaagccccaccttctgcgatcactgtgggtcactgctctatggacttatccatcaagggatgaaatgtgacacctgcgatatgaacgttcacaagcaatgcgtcatcaatgtccccagcctctgcggaatggatcacactgagaagagggggcggatttacctaaaggctgaggttgctgatgaaaagctccatgtcacaggtaaggcttgctcatcccggagcagcatcgtgggcaggcatttggatgaaggttacactgatattaaggcagggccccaactggatgctttcctatgtatttcatcccaaccaccttttgggaaaaatgctatcatcatcaccagcagcagcagcagcatcattacccttttaaaacatggccctagacgattctacagcttcgcctcttgcagctgcatgtcttctactgtgtcagtcacaaatccaaaaattctgggaaagggattcatcgactcagtgtgggtcacatgccaccctggaccaatggactgtgactggagggcagatatggggtgggggcctgtgaggctgtgcatttggtttagtaccaggaatcatcaagaacaagagaaattcatgggcccagtcagagaacccaaaggtccctcccacaacacatggggattaggggaactacaagatgagatttgggtgcagacacagggccaaaccacatcaaggaaccacattcaaaagccacccacacagggacaagttaacaacatgaaagcaaagaggaccaaaatagtgtcttctctcatctttccatacagtctacaaatagactgtaacttccaaaggaaaaagaaaagggctgttgttgtacgagatgcaaaaaatctaatccctatggatccaaacgggctttcagatccttatgtgaagctgaaacttattcctgatcccaagaatgaaagcaagcaaaaaaccaaaaccatccgctccacactaaatccgcagtggaatgagtcctttacattcaaattgaaaccttcagacaaagaccgacgactgtctgtagaaatctgggactgggatcgaacaacaaggaatgacttcatgggatccctttcctttggagtttcggagctgatgaagatgccggccagtggatggtacaagttgcttaaccaagaagaaggtgagtactacaacgtacccattccggaaggggacgaggaaggaaacatggaactcaggcagaaattcgagctgatgatcttggataagttccttaaactctctgacctttgttttccttgtttacgaagtggagatgataatagagactgccgcataggactgctgggaggattcactcagttcacttacgtcaggatcatccatatggctgtccctcacctctgcatcttgtcccactggaaggtcttcaggggcagtaatacacatggagctgtcatcacccctgataacaatgccttctggaatacctcctga

SEQ ID NO: 1670 - DNA, 2090 bp, Homo sapiens
  SIMILAR (671)..(1333): 751254mologous to Bos taurus beta type protein kinase C,accession number M13974,Smith-Waterman Score=886.
agcggccgcagctccccggcggaggcaagaggtggttgggggggaccatggctgacgttttcccgggcaacgactccacggcgtctcaggacgtggccaaccgcttcgcccgcaaaggggcgctgaggcagaagaacgtgcacgaggtgaaggaccacaaattcatcgcgcgcttcttcaagcagcccaccttctgcagccactgcaccgacttcatctgggggtttgggaaacaaggcttccagtgccaagtttgctgttttgtggtccacaagatggtgccatgaatttgttactttttcttgtccggggtgcggataaggggacccgacacttgatgaccccaggaggcaagccacaaggttccaaaatccacactttacggaagccccaccttcttgcgatcacttgtgggttcactgctctatggacttatccatcaagggatgaaatgtgacacctgcgatatgaacgttcacaagcaatgcgttcatcaatgtccccagcctctgcggaatggttcacactgagaagagggggcggatttacctaaaggctgaggttgctgatgaaaagctccatgtcacagtacgagatgcaaaaaatctaatccctatggatccaaacgggctttcagatccttatgtgaagctgaaacttattcctgatcccaaggaatgaaagcaagcaaaaaaccaaaaccatccgctccacactaaatccgcagtggaatgagtcctttacattcaaattgaaaccttcagacaaagaccgacgactgtctgtagaaatctgggactgggatcgaacaacaaggaatgacttcatgggatccctttcctttggagtttcggagctgatgaagatgccggccagtggatggtacaagttgcttaaccaagaagaaggtgagtactacaacgtacccattccggaaggggacgaggaaggaaacatggaactcaggcagaaattcgagaaagccaaacttggccctgctggcaacaaagtcatcagtccctctgaagacaggaaacaaccttccaacaaccttgaccgagtgaaactcacggacttcaatttcctcatggtgttgggaaaggggagttttggaaaggtgatgcttgccgacaggaagggcacagaagaactgtatgcaatcaaaatcctgaagaaggatgtggtgattcaggatgatgacgtggagtgcaccatggtagaaaagcgagtcttggccctgcttgacaaacccccgttcttgacgcagctgcactcctgcttccagacagtggatcggctgtacttcgtcatggaatatgtcaacggtggggaccctcatgtaccacattcagcaagtaggaaaatttaaggaaccacaagcagtattctatgcggcagagatttccatcggattgttctttcttcataaaagaggaatcatttatagggatctgaagttagataccgtcatgttgggattcagaagggacatatcaaaattgctggactttggggatgtgcaagggaacacatgatgggatgggagtcacggaccagggaccttctgtgggactccagattatatcgccccagagataatcgcttatcagccgtatggaaaatctgtggactggtgggcctatggcgtcctgttgtatgaaatgcttgccgggcagcctccatttgatggtgaagatgaagacgagctatttcagtctatcatggagcacaacgtttcctatccaaaatccttgtccaaggaggctgtttctatctgcaaaggactgatgaccaaacacccagccaagcgaatgggctgtgggcctgagggggagagggacgtgagagagcatgccttcttccggaggatcgactgggaaaaactggagaacagggagatccagccaccattcaagcccaaagtgtgtggcaaaggagcagagaactttgacaagttcttcacacgaggacagcccgtcttaacaccacctgatcagctggttattgctaacatagaccagtctgattttgaagggttctcgtatgtcaacccccagtttgtgcaccccatcttacagagtgcagtatga

SEQ ID NO: 1671 - DNA, 1138 bp, Homo sapiens
  SIMILAR (845)..(1135): 871254mologous to Homo sapiens a gene isolated from a CpG island between STS and KAL,accession number U03886,Smith-Waterman Score=433.
atgactcagataagtaacataaagcagccttttgccatgcagcacaggttcttcatttcccttttgcactggaccctgcaaattgtgtatccagcactgttcctaggactttgtgaacggggaagaaatgggaggtgtgatcaagtaccagaaggctctgtgctgtctctgctggtctgggtggttcctggactggcgttccctgaggttgcacctggcacgtgtggcaccagctatgttcctgatgctggactccatggtcctgaagtggaatcaaaactggggcttgaccccggatcgatgactgggactcagcctacgcggacgccagcgcagcctgcggcggccgagccacctgccctcacagggcctggccgggtgcatcaggaacaggcggtcttagcgtgtggatttctgggcatttaccacttgggggcagcatctgcactttgcagacatggcaaaaaacttgtgaaggatgtcaaagccttcgctggggcgtctgcgggatcgttggttgcttctgttctgctaacagcaccagaaaaaatagaggaatgtaaccaatttacctacaagtttgccgaagaaatcagaaggcagtctttcggggcagtaacgcccggttatgacttcatggcccgactaagaagtgggatggagtcgattcttcctcccagcgctcacgagctggcccagaaccgactgcacgtatccatcaccaacgccaaaaccagagaaaatcacttagtctccactttttcctccagggaggacctcattaaggtcctcctagccagcagttttgtgcccatttatgcaggactgaagctagtggaatacaaagggcagaagtgggtggacggaggcctcaccaacgctcttcccattcctgcccgtcggccggacagtaaccatctcccccttcagtggacgactggacatctccccgcaggacaaagggcagctagatctgtatgttaatatcgccaagcaggatatcatgttgtccctggcaaacctggtgagactcaaccaagccctttttcccccaagcaagaggaaaatggaatctttgtatcagtgtggttttgatgacactgttaagtttttacttaaagaaaattggtttgaataa

SEQ ID NO: 1672 - DNA, 2843 bp, Homo sapiens
  SIMILAR (372)..(992): 461254mologous to Homo sapiens a gene isolated from a CpG island between STS and KAL,accession number U03886,Smith-Waterman Score=315.
  misc_feature (1)...(2843): n = a,t,c or g
cattgatgatcattcgtccagtgcggtggaattcggcggtaccaacccctgccgcaagactttcctgggccggctcgcggagagcgtagcgcggccttggtggcggaatggcgttgagtgacggcccggccccgcgcatctcggttaaagggactcgttcaacacggaagtgtcccggggctgcattgtgctacagctagaatgaagcacatcaacctatcatttgcagcgtgtggatttctgggcatttaccacttgggggcagcatctgcactttgcagacatggcaaaaaacttgtgaaggatgtcaaagccttcgctggggcgtctgcgggatcgttggttgcttctgttctgctaacagcacccagaaaaaattagaggaatgtaaccaattttacctacaagttttcccgaagaaatcagaaggcagtctttcggggcagtaacgcccggttatgacttcatggccccgactaagaagtgggatggagtccgattcttcctcccagcgctcacgagctggccccagaaccgactgcacgtatccattcaccaacgccaaaaccagagaaaatcacttagtctcccactttttttcctcccagggaggaccctcaattaaggtccctccttagcccagccagttttgtgcccaatttatgccaggacttgaagcttagtggaatacaaaagggcagaagtgggtggacggaggcctcaccaacgctcttccccatccctgccccgtcggccggacagtaaccatctcccccgttcagtggacgactggacatctccccgcaggacaaagggcagctaagatctgtatgtttaatatccgccaagcaggatatcgatgttgtccctggcaaacctggtgagacttcaaccaagccctttttcccccaagcaagaggaaaatggaatctttgtatcagtgtggtttttgatgacactggttaagtttttactttaaagaaaattggtttggaataaaatgcataaaagttttataatgcaaaacacgttttagatagtttttgatggaagtttctaatcaaatcctttttagaaaatctatcatgactcgattgtattactccttgtaatatttgtgtttatttgtaatatttgaattattacttagcacatggatataagaggcactttattagaatttgccaccgtcattaagaaggatacacttaggtgataaggaatcatttttggtgagctgttgtgtcctttaaaaaatggaggaggataggttctttgggtaaattcaggaacatggaaaatggaggcccgcctcttaggttccatggagaatatgtggcatgatcttgacgtgaagcatgggtgtttccgtgacttaactgtgtccctgtagctctggaactgaaggaactaggtaggagaggaaggatttgagaaataggcaactcatggttaaagacctttgatcaggactggaggaacaaaggtttgtgtattagtccattttcacactgctgagaaagacatacccaagactgggcaatttacaaaagaaaggtttaatgggctcacagttccacatgactgaggaggcctcacaattgtggtggaaggtgaaaggcatgtctcacatggcagcagacaagagaagaaaacttgtgcagggaaactcccctttataaaaccatcggatctcttgagacgcgttcactatcatgagaatagcatgggaaagacctgcctccatgattcagttacctcccactgggtccctcccacaacgtgtggcaattgtgggagctacatacacttcaagatgagatttgggtggggacacagccaaaccataacagtttgctttccacaggtgtgtgcagttgctcccagtgcagttaggggcagatatccagaagcctaggagattttgaagaggcttatcccctctcatcttcctcccctaaaccccaccccagtttaggagattatcaagctggttgtcattcattctctctctctctctctctctctctctctctctctctctctctctctcgccatacctctctgagtatttagctattgttctatatactggatacatctattatgggaacttaaatagataaaatactactaaacacaaagaaccaagtagcctagtaaataagaattaaatccagaataatcattcacttctcatttttaaatcacgttgtactgatcccaggttttttactttctgagtagttgtcgatcactttgaggacttgtgtatgggcttgtaccaatttactgacactgtcttaaatcctaaatctgtttttatgaggttttgccaagcaagaactcttgattactaagaggcagttagagacaaaccaatttaattccatgtcttcaattgtcacgncatttcttcttttacctcctttgaaactattctttgagtccaattttatggttctccagaagcccaaaatacacaacttttagccacataaacaccaacggatgggcctctttttggagggagttatggcataggacccactctagagtaatgatggtccctgtggtatatactttctcctactctagcaaacatgtagtttaatcttaatgtgttgtttccataagtgacatgaagtggatagattctcaattgttatgtccacttattcactaggtaaattttcagttttaatacttttctccttaccccttcctttgatcatttcatgtgaatattctatttgtatgatacactgtatttcaataaattccttgttgatgtacccttaaattgaagaaatttaagctgcaaaaccaaaaaaaaaaaaaaa

SEQ ID NO: 1673 - DNA, 499 bp, Homo sapiens
  SIMILAR (19)..(387): 831254mologous to Homo sapiens XAGE-1,accession number AF251237,Smith-Waterman Score=524.
ggccccttcgccagtgtggggaacgcggcggatgtgcagccggcgactcgggtccctgaggtctggattctttctccgctactgagacacggcggacacacacaaacacagaaccacacagccagtcccaggagcccagtaatggagagccccaaaaagaagaaccagcagctgaaagtcgggatcctacacctgggcagcagacagaagaagatcaggatacagctgagatcccagtgcgcgacatggaaggtgatctgcaagagcttgcatcagtcaaacaccggggataaatcttggatttgggttccaggcgtcaaggtgaagataatacctaaagaggaacactgtaaaatgccagaagcaggtgaagagcaaccacaagtttaaatgaagacaagctgaaatatacgcaagctggttttatattagatatttgacttaaactatctcaataaagttttgcagctttcaaaaaaaaaaaaaaaaaaagtcgacg

SEQ ID NO: 1674 - DNA, 4123 bp, Homo sapiens
  SIMILAR (3085)..(4122): 941254mologous to Homo sapiens dJ1182A14.5.1 (novel gene (isoform 1)),accession number AL137798,Smith-Waterman Score=1662.
atggaggaggtagaagaggacagattcaaggaaaatttggaaggcgcgctggctgggcagctcctgggagatgaagcgacgcaggcgctccaggtactggctgtagagctcgatgtcgttgtgcccggcgccctccacccacagcggctccaccgccttggggcagcgctcgtagagcgccagcccgtgcgagaagtcgatcacctcgtcctccctgccgtggatgatgagcacgggagacgtgatcttggacaccttctcgatgttagggaaggcgtcgaagcagtaggtcttcttggtgtcgcggaaggcgacgcgcatgcccgaggtgagcggcgagtgcagcaccaccgcggcacactcgtagcgcgaggccaggtccatggtgggcaccgtgccgatgctctgcccgtacaggatgatgctgtccgggctgatgccgtacctggcggcgccggagcagggtcagccgcggcctccaacgcgcgcgcacccttcccaccagcgggcgtccccgggcccagctccggatgcgaccctccagtctccccactcagccaagtcagtgcacactgggaactgtgtggcccccacatcctgaatgcttcataccttcctgcccgggttagaaagccgttcctggtgcactggccaggacagcggacactcttcctccctgcagcccttgcccacccccttggccatgaggaattcaggcagctgtgtccccaaatgtctccacccaattttggactctcggagtccccacgcccagtgagatgccagtgcaacccaggtcagcatcgagggtggtggctgcggaggtggcaccccctcccaccagcaccttcccttgggagtggacaagtcctcggccacctcagcaccaccagctcccacccaggggcaccctcacccccaggtcattggtgtgcggcccctgacccagctgatccagcaccagttacaaggcctcctcgtgcccagtcccaagcacgcgggacccacctgccaccctgcccatgccgggaccccacaactctcctcccacacgctctaggctctgatcccaggcagacgccctcttgcaaggcaggagcatgggcaggcaggagcccccagctgccacctggatgtcaccactcaaacgaacgggacacatccccagtggaggccctgggcacgctctggcctccccctcatggctctgggcctaggttcctgcaggacaaaggggcagcaggacagatggccgagcagacagagctcagagctggccatggcaggatggccaagctccgcagccacagggcctcatgggccagtcctccggacctggatgcagcagcctcgcctcacttggccccaagtgctgcctcagccgatgggctcccagccacacgtgcacagacccccagaccaccacccactccctcccgccaggctgagctgcccccagggtcgccctcacctggtgcgcagggcctgccaggtggcgtcgatgtcggcatagaggttcctctcggaaggcctgcccgagctggcaccgtagccggaggagtcgtaggtgaagatgttgcagtggaggcgggagcccaggccaatgtagaagctgctcatctggcccaggtccacggcattgccgtgcgagaagaggaccgtgtacctggcaccaggcacgcagcgaacatacatgcaggagacacggttgccgcgggcgctcttggtggggaagacctcgatggtgtccagctcgcgctggctgtactggaagtcggcacgctccgtcagggcttctggtggactctccgaggcaccgatgtagaaacttacccattcagtgcaccaagagcagcttcacatggtgtgggccgacatgaagagctgccagatccaacaggaccttgtggtggacgccttctttcactgaccattcatggggtgactattaggtaccatgccctgctctgggctagaggccccataatgagtaaatctcaggtcctgggggagtgggagccagtgcaaggagggaagtccagtgagaatgacaaatggacgatgtcagacccaggggctgaggcccccacctgcagccgggcagcttctggagtggacaaggagcagcagggaaggtggcaagggctctggaacagccacataaagcccttgaagataaggatggtcaaacaaaataatatcatacctggagaaactcagatcttgctaagatttactggttgggaatccaaagttaatgccaagaagcagctgccagttgggatcaaatgtgagcctatggatcaagaaaatgagcaaacaggtggccatgaaacagatggtcatagaattgtttcagtgcttatccactttccactcatttccatcctgtcttacgccacttggggcttgtcccttctagaatgcatccctggctcccctgtgtgcacacttctagttaggtttagcaatgtgggcacccgatggagcctggaagtgagaggaagcccatgtggttttggcagcaataaggtgtgtggggtaatgactcctgaaattaaaatggtgtgtgtatgtgaaggaaaggcgggcaaagctgtggggagcggtggagtggaaggaacaaaggaggtcagtactgggaacgctgaaggtcccgtccgccacgaggctgtagatggaggtgtccacctggcctttgcgttgctgcaggggctcctctggtcgctgctgctggggccgcctgggctggcgggttggggaggcggagagctcgatgcagtccctgactccacctcttctgccacaaacgtcagcatggtggtatcagccggcccttggtccagcgagaaggcagagatgaacattctagaaatcaacgagaaattgcgcccccagttggcagagaacaaacagcagttcagaaacctcaaagagagatgttttctaactcaactggccggcttcctggccaaccgacagaagaaatacaagtatgaagagtgtaaagacctcataaaatttatgctgaggaatgagcgacagttcaaggaggagaagcttgcagagcagctgaagcaagctgaggagctcaggcaatataaagtcctggttcactctcaggaacgagagctgacccagttaagggagaagttacgggaagggagagatgcctcccgctcattgaatgagcatctccaggccctcctcactccggatgagccggacaagtcccaggggcaggacctccaagaacagctggctgaggggtgtagactggcacagcaccttgtccaaaagctcagcccagaaaatgacgaagatgaggatgaagatgttcaagttgaggaggatgagaaagtactggaatcatctgcccccagggaggtgcagaaggctgaagagagcaaagtccctgaggactcactggaggaatgtgccatcacttgttcaaatagccacggcccttgtgactccatccagcctcacaagaacatcaaaatcacatttgaggaagacaaagtcaactcatctctggttgtagacagagaatcctctcatgatggatgtcaggatgctctaaacattctcccagtccctggccccacctcttctgccacaaacgtcagcatggtggtatcagccggccctttgtccagcgagaaggcagagatgaacattctagaaatcaatgagaaattgtgcccccagctggcagagaagaaacagcagttcagaagcctcaaagagaaatgttttgtaactcaagtggcctgcttcctggccaagcagcagaacaaatacaaatatgaagagtgcaaagacctcataaaatctatgctgaggaatgagcgacagttcaaggaggagaagcttgcagagcagctgaagcaagctgaggagctcaggcaatataaagtcctggttcactctcaggaacgagagctgacccagttaagggagaagttacgggaagggagagatgcctcccgctcattgaatgagcatctccaggccctcctcactccggatgagccggacaagtcccaggggcaggacctccaagaacagctggctgaggggtgtagactggcacagcaccttgtccaaaagctcagcccag

SEQ ID NO: 1675 - DNA, 393 bp, Homo sapiens
ggcacgagacaaggataagtttccttcttgcacactaaccattacaatcttgacacagttttgaaaaatgagctattcagttcagtgtgtatatctgtgttcctgggatttgtatatcacctgacagagagagaaaaagagacaggggcaaagatggagggaggcacagaacgaggtggaggcagggtgagtaaaaaggagaggtaggcagagaaagaaggagggggagagaaaggagacagacagagggacagagacagaatatacagccctgattagatttctgctgtgactaaaatgaactgaagcctggaattagtccatactcttgctcacgcaaacagaagacagtatgagagtaaggaaatagaaatgggattcactcaagctgct

SEQ ID NO: 1676 - DNA, 1236 bp, Homo sapiens
  SIMILAR (1236)..(793): 981254mologous to Bacillus amyloliquefaciens precursor (AA - 29 to 443),accession number X52988,Smith-Waterman Score=786.
tcaggggagagctacccagtccctttcacggacagtaaattcactgtggtgggaggtgaagatggactgaaaacaaataccttctttgcccatcagcaggcctagcgtcttggcagtcatggtgacaatgacgttgaaggtgggggctccaccgatgctcttcatacaaagatccgtggtcaattccccatcctgcagcagtgagtccaggaccacagtatatttctggccccccagtgtcagcccattcatgacaaagcttgaccagtctttgccaaccaggacaccaacctcagctggcgtgatgttgaggaaggttttccctcccacgtcaagagaaaagccaacatgtttttcctccaatgcataaaaggaacttccgtagggctggcaggagtcaggctgttcaagacaatgcccgctttccagtcgggaaacctgtcgtgccagctgcattaatgaatcggccaacgcgcggggagaggcggtttgcgtattgggcgccagggtggtttttcttttcaccagtgagacgggcaacagctgattgcccttcaccgcctggccctgagagagttgcagcaagcggtccacgctggtttgccccagcaggcgaaaatcctgtttgatggtggttccgaaatcggcaaaatcccttcctctcacttccaggctccatcgggtgcccacattgctaaacctaactagaagtgtgcacacaggggagccagggatgcattctagaagggacaagccccaagtggcgtaagacaggatggaaatgagtggaaagtggatctgcgctgttgtcaggctttgtttgccgtaatgtttaccggaatagtcagtgtagaataaacggatttttccgtcagatgtaaaggttgcagaaccggaccattcttgcgtctgatctttcaggatcggatcgttggcgtcgaacttatcgctgtctttaaagacacggcccgcgtttttccagctgtcgattgagttgtcgccgaccttttgataaaacatgtagattgatgtgtcatcagcgtctttcgggcttcccgcaagagcaaacacaacgtgatagccgttgtattcagctactgttccgtcagcgttttgcagcggccagctgtcccacacatcaagtccttttgcagactcaatatttttaatcgttgattgatcgaattgaggcacttggtatttttcgttttgctgctgtttagggatctgcagcat

SEQ ID NO: 1677 - DNA, 604 bp, Homo sapiens
tcaaactcacatagagcattcagcaagatagaccacatgtgctgagccatcgttagtattttctgtcctttctctttgactcgtgtatagtgtgctcaaactcttaaaattatacactttaatgattatacactttcatgcatctcaattgcatgtaagttatatttcaatatatttgttaaaagtttataattaaaaaaactgtcctagcttgattcaagaaatcttttttatatttaagaaaatgtaatgttatgtattatcagggcaaaagagaaaaaccatatgattaccttgtcatacacagtaaaagcatttggcacaattgaaaacttttttcatgatttataaaaacaaaccccagaaaactctcagcatgataagaagagaaggcaacactttcaaccctattaagggtagatttgaaaaaaactcagaggtaacattatattaaatggcataggattgaatgcttttctattaaatcagagaaaaaagtagaatatctgttgttattctttcaattcagcattatactagagatctaaatcaatgcaataaagtaagaaaaataaataaaagtattgaaaagattgaaaaaaaa

SEQ ID NO: 1678 - DNA, 1987 bp, Homo sapiens
  SIMILAR (1694)..(1906): 731254mologous to Homo sapiens Human myelin oligodendrocyte glycoprotein gene,accession number AAZ29204,Smith-Waterman Score= 250.
atgaaatataactaaccctttataatacaactgttggaacaacagttgaaaataacaatatcttgactcctggctgagtgctttacactgagctgtcttttccgaatatgagcacagacttggggatattagtgtcacctagcgttattagctagtattctccttttgtttccccataacatcccctcctccttcccacagatccactctccactcatttccatcctgtcttatgccacttggggcttgtcccttctagaatgcatccctggctcccctgtgtgcacacttggagttaggtttagcagtgggggcacccgatggagcctggaagtgagaggaaggtgagggccgtatttcttccctctccctccctgctctggcactgagtatctgggcaatagctgcatctgtctattacttcagtgggccacttcttccacagccccaatttttcagtggggtcccattaggcattattttacctttgttcctttagctcccatcaagggaagacccagaggcattctcctcaccaagggcatttaaggaaatggcatggggtgagggggaacagcgggcgttgcgtgttaaaggtcctgttggcacctctcctctgcaggctgggaggtcatggcgggagatgctgcatggatttgtcctccctgctgtcagaacaacagggttctggaagagtagaggacaggccgtgggacttggctgtctagagacaaggcgggagggatttccttgagaggcagggacatgtggtggttactaatcattcgaatcattgtgaggtgtctgggaatgtaatggatgggaaatctactaagaaatcaacttacgttacacttataaaagctcctagttctgaggacagagacctgttggagtccccatagtgggaatttttgccctggcatccagttcagatccctggagcttcttgactgaggggagattggatcccttggggaagagtgaagccttcaatgctgccacaagtgtgatccgcccgcctcagcctcccaaagtgctgggattacaggcgtgagccaccatgcccggcctcttttttatatttaaaaaatatcattttatatattatcagggcaaaagagaaaaaccgtatgattaccttgtcatacacagtaaaagcatttggcaaaattgaaaacttttttcatgatttataataacaaaccccagaaaatgctctacatgatgagaacagaaggcaacacttccaaccccattaagggcagatttgaagaacccacaggtaacattatattaaatcggcataagattggatgcttttctattaaatcagagaaaaaagtagaatacctgttgttactcttttaattcagcattatactagagctctaagtcaatgcaataaagtaagaaaaattaataaagtattgaaaagaaagaattgaagctgtctttattcacagataatgactgtgtttgttaacaatgctagaaatctacaaaaatctaccagaactaatcagtgagtttggtagtgttgcagaatgtaagctctcaatgtaaggggtcttttgtatttctgtatattagcaatgagcatttggaaaatgaaataagaatacaatttcatttaaagtaacatctaaatacatgttgtgcttataaataaattcaacagactgggcaccatggctcacacttgtaatctcagcactttgggaagccgaggtgggcagatcatgaggtcaggagatggagaccatcatgcctaacacagtgaaaccccgtctctactaaaaatacaaaaaaaaaaaaaaaaagaaaaattagccgggcgtggtggcatgtgcctgtattcccagctacttgggagtctgaggcaggagaatagcgtgaacctgggaggcagagcttgcagtgagcctagatcgcgtcactgcactccagcctgggcgacagagtgagactctgtctcaaaaaaaaa

SEQ ID NO: 1679 - DNA, 1667 bp, Homo sapiens
  SIMILAR (1476)..(1360): 921254mologous to Mus musculus TAFII140 protein,accession number AJ292189,Smith-Waterman Score=210.
ggggggtttcccccctaaacccctaaaaaatttttttttcccccaaagccttaaaatttttggggggggggggccccaaaagccccccccccaaaaaaagggttttttcccaaaatcccccgcggggttttaaatcgccccccccaaaaagaaaaaaaattatttttccccccccccgtaaaattgggcccccccaaggattttttaaaaagggccccccccctcttttcatttttttttgtcttttccccgctttcatggaaactacatgtccttttagtaaaagtctgtcaaagaaatttacaaaaacaaaatagacaacaaacaaagcaacttcaagtcataaactctaaatttaaattgccttgttttccttccaactgctcgggccctttccccaccatgtttccgggcactgcgcaggctgagctcaagggaaatttctttgaacgatggctttttctctagccttgtttctgtccagcgtcattacagacctggctgaaatcacagtggatttcagagaaagccagaattaaacacgataaaaatttaaaaaataactacttcataaatatttattatttacattaggggcaatcttttagtctgaagagtttttatacaagttgatgaaatgtacaagcagtgagaagagactccagcagtttaaagaagggcaaaattagaatgcaacgaagatataaaatacattaaacaaaaataatttgcacaaaagcaaacaggacatgatagaaacctttttcttaaaaaatataaggtatttcacaaaagcctgaacattttacatgttagtactaaaaacgggggaaggagggaagcttcatatattcttatcacaaaaatatttaccggtactccaactggagttttcttttatgttattctgattatcttactatagagggaaaggggctgaaaactgtatacagactctatcatccttaaattacagttgaggcagtttgtacattatcttctcatctaatacctcaatgaaaaggccctggagagaataaaggaaatcaaaagggaagatgtccgctctttattaataatacttgtcactggtattagagaagtggaggaggggcagcccccaggccacgcctctgcttgagtttccttctgtcgcactgccacggagccacaggccaaggcggctcgggagtgaacaatccaggtgcgcggtgtgttccagcctcagtcctcctgggttctttatccacaggcatctgggggtggatgtgacggcagacttgcaccagctcccttccagaggcgccagggaagaagcccgggctgaccccgcttggtccagcccctcgggagtcgtcagtgggctcgatgcttcctcttcttgtgctttttgtccttcttcttgttcgcacacttggggcagaaccactgcatctcttctgggggtgcagtcatgattccaacacagggcttgtgtgtagcactattgttgggcatgcggactatgagatcacagatgctccctttacaggccccctgcagagactcatccgttcattcatcctctcagccaggaatagaagtcttccgagccacggctttgtctttatctcacagatatcgtctatcataactgaacaggttgctatcttttttgtatctgacat

SEQ ID NO: 1680 - DNA, 1075 bp, Homo sapiens
  SIMILAR (191)..(694): 371254mologous to Danio rerio=zebrafish|embryos, Peptide, 215 aa casein kinase 2 beta subunit, CK2 beta=protein kinase,accession number S76877,Smith-Waterman Score=153.
  misc_feature (1)...(1075): n = a,t,c or g
cccacgcgtccgcctaatttccactccccccaccccacttcgcctgccgcggtcgggtccgcggccttgcgctgtagcggtcgccgccgttccctggaagtagcaacttccctaccccaccccagtcctggtccccgtccagccgctgacgtgaagatgagcagctcagaggaggtgtcctggatttccctggttctgtgggctccgtggcaatgaattcttctgtgaagtggattgaagactaccatccagggacaaattttaatcttacctgacctcaataagcaggttccctcactatcggacaagctctaaaccatgatccctggaccctgagcctgattgaagaacttggaagacaaccccaacccagagtgaccttgattgagcaggcagccgagatgcttttatgggatttgatccacggcccgttacattcctttaccaacccgtnggcatcgccccagatgtttgggaaaagttcccagcaagggagactttgggttactgttcctcgtgtgtactgtgagaacccagccaattgctttcccattggcctttcagacatccccaggtgaagcccatggtgaaagctcctactgcccccaagtgccatggatgtgtaacacaccccaagtcaatcaagacaaccatcaacacggatgggcgcctaacttcgggcaactggtttcccttcacatggctctttcatggtggcaatccccgagttaccgggcccaaagagacctgcccaacccagttttgttgcccagggtttttacggggtttcaagatccattccgatggcctacccagctggcagcttccaaggccggccagcaactttcaagaagccccagttcaagacggattcgctgattccctcccccacctgtcctgcagtcttttgtcttttcctttcttttttgccaaccctttcaggaaccctgtatggtttttagtttaaattaaaggagtcgttattgtggtgggaaatatgaaataaagtagaagaaaaggcaaaaaaaaaaaaaaaaaaaaaaaggggggggccttttaaaagaaacccattttc

SEQ ID NO: 1681 - DNA, 438 bp, Homo sapiens
  SIMILAR (44)..(430): 951254mologous to Homo sapiens GDP-mannose pyrophosphorylase B,accession number AF135421,Smith-Waterman Score=618.
ggccctggatccggcgtcagggcgacctggcggacgaggcgcgatgaaggcactgatcttagtggggggctatgggacgcggctacggccgctgacgctgagcaccccgaagccactggtggacttctgcaataagcccatcttgctgcaccaagtggaggcgctagccgcggcaggcgtggaccacgtgatcctggccgtgagctacatgtcgcaggtgctggagaaggaaatgaaggcacaggagcagaggctgggaatccgaatctccatgtcccatgaagaggagcctttggggacagctgggcccctggcgctggcccgtgacctactctctgagactgcagaccctttcttcgtcctcaacagtgacgtgatctgcgaattcccctttcaagccatggtgcagtccacccgcacctatggcaggagggctcc

SEQ ID NO: 1682 - DNA, 309 bp, Homo sapiens
  SIMILAR (123)..(52): 1001254mologous to Homo sapiens unnamed protein product,accession number AK026968,Smith-Waterman Score=150.
atggaataataatttaatgctcactgtggccctgactgaaagtcaagctcaggcacaattagggccatggctgggctcccaccaatgaggatacaggcaggcaaggaggttggatgtggtggtgtgggatacaggagaagggcaaagggagctcataaatagggcccagcctggctctgggttcaaaggtgtttttgcagaagaagcagtccttgttgttcatcaggtgctggttgatacaggctttgcaggacttgtggccacagggctggaacacagcagagatggggtgggcatagcagatggggc

SEQ ID NO: 1683 - DNA, 2695 bp, Homo sapiens
  SIMILAR (640)..(1551): 961254mologous to Homo sapiens GDP-mannose pyrophosphorylase B,accession number AF135421,Smith-Waterman Score=1503.
atgggtcctggatctggacctggagccctgccgaaaactgggggaacaaccagtccaaagcatggcagagcagaacatcaggcagcatcgaaggctgctgccaagccaaagaccatgccgaagaaagggccatctgcccactgtgccaagccgagctcaacgctgggcagcaagagcccagccaactataacacatgcaccacctgcaggctccaggtgtgcaacctgtgtggcttcaacccaacaccccacctggtggagaaaaagcctcctactttccgggtgaccgtagagggcagtttgacaagtctcagccccgggcgatggaagaatttgcccgtgggaccgtcacgaagcaccggtcatctccccgcgcccggctttcgggtcctcaggcctcgctcacaggaggcaaagagtccgaaggtggagctgcacagccactcagaggtccctttccagatgctagatggcaacagtggcttgagttctgagaagatcagccacaacccctggagcctgcgttgtcacaagcagcagctgagccgcatgcgctccgagtccaaggaccgaaagctctacagtatcctcgttgcccctccttcaggagtgtctactgggcgcgatgaaggcactgatcttagtggggggctatgggacgcggctacggtcgtgacgctgagcaccccgaagccactggtggacttctgcaataagcccatcttgctgcaccaagtggaggcgctagccgcggcaggcgtggaccacgtgatcctggccgtgagctacatgtcgcaggtgctggagaaggaaatgaaggcacaggagcagaggctgggaatccgaatctccatgtcccatgaagaggagcctttggggacagctgggcccctggcgctggcccgtgacctactctctgagactgcagaccctttcttcgtcctcaacagtgacgtgatctgcgatttccccttccaagccatggtgcagttccaccggcaccatggccaggagggctccatcctggtgaccaaggtggaggaaccctccaagtacggtgtggtggtgtgtgaggctgacacaggccgcattcaccggttcgtggagaagccacaggtgtttgtgtccaataagatcaacgcaggcatgtacatcctgagccctgcagtgctgcagcgcatccagctgcagcctacgtccattgagaaggaggtcttccccattatggccaaggaggggcagctatatgccatggagttacagggcttctggatggacattgggcagcccaaggacttcctcactggcatgtgcctcttcctgcagtcactgaggcagaagcagcctgagcggctgtgctcaggccctggcattgtgggcaacgtgctggtggacccaagtgcccgcatcggccagaactgcagcattggccccaatgtgagcctgggacctggcgtggtggtcgaagatggtgtgtgtatccggcggtgcacggtgctgcgggatgcccggatccgttcccattcctggcaagagtcctgcattggagggtcaggtgggagctggaagttgctcacaattgaccaggacctcatggtggcacagttttccacacccagcctacctccaaccctgaaagttgggttcctgccttctgcagggaaggagcagtcagtgttgtgggtgtccctggaggaggccgagcccattcccgacatccactggggcatccgggtgctacagccacctcccagagcaagagaatgtgcagaggtacgcatggagaacgtgacagtgctgggtgaggacgtcatagttaatgatgagctctacctcaacggagccagcgtgctgccccacaagtctattggcgagtcagtgccagagcctcgtatcatcatacacgatggtggttttgcagaagaagcagtccttgttgttcatcaggtgctggttgatacaggctctacaacaggggaggggatgaggactgccctgcatgtacctactgctctccccaccaccaagctgtggggcccactacttgcggacttgtgggcacagggctgggacacagcagagatggggggaggcagctgctgcctgggcagatgcagaggtcaggtgcgccaggatctgttccaattgggccagctcatcggcactgatataatccgcatctggggagtggtaggtagtgtcaagtcagaggtagctgaggatgtgatgcctcttgaatattcccagcctacgactttgctgttcttaaggctgctgacccgacccagccccagatttccctgacctgccccaccagcccactcacagctctgcaaggagaagcgcttccggtcaggggctggcagagcagtgccaggtgctgggggctctggctgtcccaggagatagcatattgagcgtagctggaaaccagggatctgccaggagcactgatgtggcttgctctctcctaggtaggggagggtgcaagggcagtcagaaggcttggggcctggctaaaagtctctcttgggattgccaatgaggagtgccatggctcgtacatgatcaccccccctgcatcctttccgtctccctgcttcccaaaccccaagtcctgtattctagtaaggtgccacacagcctgtttttttttttttttctcgagactccatctcaaaaaaaaaataaaaaa

SEQ ID NO: 1684 - DNA, 2621 bp, Homo sapiens
  SIMILAR (467)..(1054): 921254mologous to Homo sapiens GDP-mannose pyrophosphorylase B,accession number AF135421,Smith-Waterman Score=946.
  misc_feature (1)...(2621): n = a,t,c or g
cggacgcgtggggccagcagccgtcttttcggtttcgcgttctgtgttgtggcggccctggatccggcgtcagggcgaccgggcggacgaggtggagccagagtctgtcaggcgggttggtgaagggcgcggggccgggcacggcgttgggagtgcgcggcagggaccggccaggcgggctgcaggcacctcagagcccgggacaccccctcaacgtccgcaggcgcgatgaaggcactgatcttagtggggggctatgggacgcggctacggccgctgacgctgagcaccccgaagccactggtggacttctgcaataagcccatcttgctgcaccaagtggaggcgctagccgcggcaggcgtggaccacgtgatcctggccgtgagctacatgtcgcaggtgctggagaaggaaatgaaggcacaggagcagaggctgtgaatccgaatctccatgtcccatgaagaggagacctttgggaacagttgggcccttgccgctggcccgtgacctactctctgagactgcagaccctttcttcgtcctcaacagtgacgtgatctgcgatttccccttccaagccatggtgcagttccaccggcaccatggccaggagggctccatcctggtgaccaaggtggaggaaccctccaagtacggtgtggtggtgtgtgaggctgacacaggccgcattcaccggttcgtggagaagccacaggtgtttgtgtccaataagatcaacgcaggcatgtacatcctgagccctgcagtgctgcggcgcatccagctgcagcctacgtccattgagaaggaggacttacccattatgggcaaggaggggcagctatatgccatggagttacagggcttctggatggacattgggcagcccaaggacttcctcactggcatgtgcctcttcctgcagtcactgaggcagaagcagcctgagcggctgtgctcaggccctggcattgtgggcaacgtgctggtggacccaagtgcccgcatcggccagaactgcagccattggccccaatgtgagcctgggacctggcgtggtggtcgaagatggtgtgtgtatccggcggtgcacggtgctgcgggatgcccggatccgttcccattcctgggcttgagtcctgcattgtgggctggcgctgccgcgtgggtcagtgggtacgcatggagaacgtgacagtgctgggtgaggacgtcaatagttaatgatgagctcctacctcaacggagccagcgtgctgccccacaagtctattggcgagtcagtgccagagcctcgtatcatcatgtgaggggatgcagtggggctggccgagccccggttttcccatcagcaaggggagtgcctggacctgacacatcagaaagaccgctggacttgtcattatttgtctggggggcactgggtgaagctgaagctgttggacacctgccttctcatgtggacatcatctggcaggatccctgctgggcacacccccacaaaccccactccctcaagaagggccagggccagggctgtatggaataataatttaatgcctcaactgtggcccctgactgaaagtccaagctcaggccacaatttagggccatggctgggctcccaccaatgaggatacaggcaggcaaggaggttggatgtggtggtgtgggatacaggagaagggcaaagggagctcataaataaggccccaacctgggctcctgggttcaaagggtggaggttccagggatgggcacaggctgtgagggctaggcagctgaggaagggtagtactcgtattggcctcccttctcccagtcctctacagacacgaatggtggttttgcaaaaaaaacaaacccttgtttgtttcatcagggtgctgggttgatacaggctttgcaggacttgtgggccacagggctgggaacacagcagagatgggggtggggnatagcagaatgggggcagaggtcctcctcactggtgggcagggaaggcagctgctgcctgggcaaaatgcaaaaggtcaaggtgcgcccagcatctgttcccacttgggccaagctcatcggcactgatataattccgcatagctctgcagggagaagcgcttccggtcaggggctggcagagcagtgcccaggtgctgggggctctggctgtcccaggagatagcatattgagcgtagctggaagcagggatctgcccaggagcactgatgtggcttgctctctcctgtacgcgctggtgggtcggtccctgaggctttactgcaacaccagcgtcccggccatgcgcattgcctgggtttcgccgcagcaggagcttctcagggcgccaggatcccgcgatggcagcatcgcggtgctggccgacggcagcttggccataggcaacgtacaggagcagcatgcgggactcttcgtgtgcctggccactgggccccgcctgttcgccccaccctgccgctgctgccgccgtgcctgccgctgccgccgctggccccaaacacccagcccgctccaagagctgagcgcacagtcctcagtactcagcaccacaccgccagacgcacccagccgcaaggccagcgtccacaagcacgta

SEQ ID NO: 1685 - DNA, 396 bp, Homo sapiens
  misc_feature (1)...(396): n = a,t,c or g
ggcacgannnnnnnnnnnnnnnnnnnnnnnnnnnnnnnnnnnnnnnnnnnnnnnnnnnnnnnnnnnnnnnnnnnnnnnnnnnnnnnnnnnnnnnnnnnnnnnnnnnnnnnnnnnnnnnnnnnnnnnnnnnnnnnnnnnnnnnnnnnnnnnnnnnnnnnnnnnnnnccccaaattcctccccccccggggatcccaaggaaaagagaaaacctttcccgggaacccggagggcaaacccttgggggggttaggcctaatttccccttcttgaaaaatttttagggaaaaaaaatttggggcctcccccagggggggggcccacccctttccccccctttaatcccaaccttttgggagggccaaaagggggggatcaaaaggccggaaaaaaacctt

SEQ ID NO: 1686 - DNA, 395 bp, Homo sapiens
  SIMILAR (293)..(150): 891254mologous to Homo sapiens paraplegin,accession number Y16610,Smith-Waterman Score=222.
  misc_feature (1)...(395): n = a,t,c or g
acaaacaacaggaatccgttcagnaagtttctgcaagagaaacttaaaatnatgaaaaagggtcatcaatcaaacagatctcagaagtcactgtgcagggactactgtttactncctctgggcgtcgatccacctctgcggtgcgatnattttcttcggcnatggggcggcgggccaatgagagcctcaatgtcctcatagtttatcacttccttttccagaagggcgtttgccagcgcctgcaacttgtccaggttgtcctgcagcaccttctcggtgtgtctgtagccttggccaccagcagtcttgcttcatggtccatcatctgctgcaggccttggctgaaaggcgccgcccgatgcccatgaggccctcctgcgcctcagggaaggaga

SEQ ID NO: 1687 - DNA, 510 bp, Homo sapiens
  SIMILAR (2)..(250): 981254mologous to Homo sapiens paraplegin,accession number Y16610,Smith-Waterman Score=420.
gcacgtcttcattgatctccccacgctgcaggagaggcgggagatttttgagcagcacctgaagagcctgaagctgacccagtccagcaccttttactcccagcgtctggcagagctgacaccaggattcagtggggctgacatcgccaacatgtgcaatgaggctgcgctgcacgcggcgcgggagggacacacttccgtgcacactctcaacttcgagtacgccgtggagcgcgtcctcgcaggtacagggggcgcgccctgggtgaaggccctccttagcagggcttgaaccccagaaatacccaggcaggtattgagaggtgaggtggatggaaccatcacacaggaaggaacacacgttgcgtttcagttctgcgtaactcatgtctttatgataccttgtacttttccttagtttaaaatatcacagatttacctaagagtagacgctcgtccaacagaaataaaaaatgccttgccaaagaaagtgaaaaaaaaaaaaaaaaa

SEQ ID NO: 1688 - DNA, 2982 bp, Homo sapiens
  SIMILAR (1848)..(2108): 981254mologous to Homo sapiens paraplegin,accession number Y16610,Smith-Waterman Score=460.
tttcgtcttgtggcctggggggccagcacggcctcggcgctgcccgtgtgcggagcctctttaaggaagcccgagcccgggccccctgcatcgtctacatcgatgagatcgacgcggcgggcaagaagcgctccaccaccatgttcggcttctccaacacggaggaggagcagacgctcaaccagcttctggtagaaatggatgtgttctacgcaaaaatagaagagctgaaactggtaaatagaagagctgaaactggtgtatccttatcacggtgttctacgcagaaatagaagagctgaaactggtgtatccttatcacggtgttctacgcagcaatagaagagctgaaactgatgtatccttatcatggtgttctatgcagcagtagaaggaaactttcttcctgcagcaacaaggaaatgacgcaaagtgagaagagccaggcttagtatcgtatgactccacttggaatgggtaccacagaccatgtcatcgtcctggcgtccacgaaccgagctgacattttggacggtgctctgatgaggccaggccgactggaccggcacgtcttcattgatctccccacgctgcagagaaagggtgttgcgctgtcacccaggctggagtgcagtgctgcgatcaccactcactgcggcctcaaccttcagggctcaagctgaggagctaggactactatgggcgtgcgccgccgtgctggttaatttttaacagagtctcgctgtgttgccaaggctggagtgcaggccgcgatctcggctcactgcaaccaccatctcccaggagaggcgggaagatttttgagcagcacctgaagagcctgaagctgacccagtccagcaccttttactcccaacgtctggcagagctgacaccaggattcagtggggctgacatcgccaacatctgcaatgaggctgcgctgcacgcggcgcgggagggacacacttccgtgcacactctcaacttcgagtacgccgtggagcgcgtcctcgcaggtccccayggctttcagctttgggaaagcagtgggttcctgccagaggagtgggggcagctgctgtgccagacactgcaaaacacacctggcttctctccgacagccctgcggggtcgagaggactggcgctgcctgtgtcttactgaaaatttattttcgtgtaaccatttacttttatgtggaaatcgaaaagctttttataatagtagcaaagcaggaaggactgagtgggaaccacaagccagttgaaagaaaatacatgacgtacttgagtgctcaggaccacgagctgattcaagttgtacagaatggacacttacagatgtgtggaaaatctgagacaggaaatgaagcctcaccaggactgccaaaaagagcaagatcctgtccaaggaagaacagaaagtggttgcgtttcatgagtcgggccacgccttggmgggctggatgctggagcacacgaggccgtgatgaaggtctccataaccccctcggacaaaacgccgccctgggctttggtcagattgctccccaaagaccagcacctcttcacccaaggagcagctttgagcggaggttcattgccctgggaggacgggcctcgggaacacttttccctcaacgaggtcacttcctggggcacaggacgacctgaggaaggtcacccccatcgcctactccatggtgaagcaggttgggatggcacctggcatcgggcccatctccttccctgaggcgcaggagggcctcatgggcatcgggcggcgccccttcaaccaaggcctgcagcagatgatggaccatgaagcaagactgctggtggcccaaggcctacagacacaccgagaaggtgctgcaggacaacctggacaagttgcaggcgctggcaaacgcccttctggaaaaggaagtgataaactatgaggacattgaggctctcattggcccgccgccccatgggccgaagaaaatgatcgcaccgcagaggtggatcgacgcccaggaggagaaacaggacttgggcgaggaggagaccgaagagacccagcagcctccacttggaggcgaagagccgacttggcccaagtagttgggaggtgttggctgcacgtgcgggtggtccgggaagtgagggctcactcagccaccctgagttgcttttcagctgaggtttgcacttcctctcgcggccctcagtagtccctgcacagtgacttctgagatctgttgattgatgacccttttcatgattttaagtttctctgcagaaactactgacggagtcctgtgtttgtgagtcgtttcccctatggggaaggttatcagtgcttccccgaggtgagcatggaacacttcggagttcccaggggttatagacagtcgttccccaagtttggctgaggcccaccccagaggccagccagagccattcagactccaaaacagaccccctgttccatgcccgaacgcttgcacggaccgcccccaagttccttgtggctccctcgggaatgcttaaggggatcggacatgaaaggaccctgggagcacgattgtcctatctcccagcggccctgtcatcccagctcactcatcaatggggccacacagtcaggcccaggcactgggctccggaggactcaccactgccccctgctgccaatgtggactggtgcaagttgaggacttcttgcctggtctaatcaccgcatgcagtgttggggatgcctttggtttttactgctctgagaattgttgagatactttactaataaactgtgtagttggaaaatctaagaaacaaaaaacaattaataatgaaagggggggggccctttttaaagattccttgggggggccaaatttaacgggggttggaaagatttaatttttttctttaaagggggcccaataaaaaccaacctgggaatttttgggaagaaccttttttttgggggggg

SEQ ID NO: 1689 - DNA, 3146 bp, Homo sapiens
  SIMILAR (2277)..(2414): 631254mologous to Homo sapiens paraplegin,accession number Y16610,Smith-Waterman Score=141.
ctttcaggccaacatggccgtgctgctgctgctgctccgtgccctccgccggggtccaggcccgggtcctcggccgctgtggggcccaggcccggcctggagtccagggttccccgccaggcccgggagggggcggccgtacatggccagcaggcctccgggggacctcgccgaggctggaggccgagctctgcagagcttacaattgagactgctaacccctacctttgaagggatcaacggattgttgttgaaacaacatttagttcagaatccagtcagactctggcaacttttaggtggtactttctattttaacacctcaaggttgaagcagaagaataaggagaaggataagtcgaaggggaaggcgcctgaagaggacgaagaggagaggagacgccgtgagcgggacgaccagatgtaccgagagcggctgcgcaccttgctggtcaatcgcggtggtcatgagcctcctgaatgctcttcagcaccagcggaggcagcatttcctggaacgactttgtccacgagatgctggccaagggcgaggtgcagcgcgtccaggtggtgcctgagagcgacgtggtggaagtctacctgcaccctggagccgtggtgtttgggcggcctcggctagccttgatgtaccgaatgcaggttgcaaatattgacaagtttgaagagaagcttcgagcagctgaagatgagctgaatatcgaggccaaggacaggatcccagtttcctacaagcgaacaggattctttggaaatgccctgtactctgtggggatgaccgcagtgggcctggccatcctgtggtatgttttccgtctggccgggatgactggaagggaaggtggattcagtgcttttaatcagcttaaaatggctcgtttcaccattgtggatgggaagatggggaaaggagtcagcttcaaagacgtggcaggaatgcacgaagccaaactggaagtccgcgagtttgtggattatctgaagagcccagaacgcttcctccagcttggcgccaaggtcccaaagggcgcactgctgctcggcccccccggctgtgggaagacgctgctggccaaggcggtggccacggaggctcaggtgcccttcctggcgatggccggcccagagttcgtggaggtcattggaggcctcggcgctgcccgtgtgcggagcctctttaaggaagcccgagcccgggccccctgcatcgtctacatcgatgagatcgacgcggtgggcaagaagcgctccaccaccatgtccggcttctccaacacggaggaggagcagacgctcaaccagcttctggtagaaatggatggaatgggtaccacagaccatgtcatcgtcctggcgtccacgaaccgagctgacattttggacggtgctctgatgaggccaggccgactggaccggcacgtcttcattgatctccccacgctgcaggagaggcgggagatttttgagcagcacctgaagagcctgaagctgacccagtccagcaccttttacttcccaacgtctggctgagctgacaccaagattcagtgtggctgacatcgccaacatctggcaatgaggctgcgctgcacgcggcgcgggagggacacacttctcgtgcacactctcaacttcgagtacgccgtggagcgcgtcctcgcagggactgccaaaaagagcaagaatcttgtccaaggaagaacaagaaagtggttgcgtttcatgagtccggcccaccccttggtgggctggatgctggagcacacggaggccgtgatgaaggtctccataacccctcggacaaacgccgccctgggctttgctcagatgctccccagagaccagcacctcttcaccaaggagcagctgtttgagcggatgtgcatggccttgggaggacgggcctcggaagcactgtccttcaacgaggtcacttctggggcacaggacgacctgaggaaggtcacccgcatcgcctactccatggtgaagcagtttgggatggcacctggcatcgggcccatctccttccctgaggcgcaggagggcctcatgggcatcgggcggcgccccttcagccaaggcctgcagcagatgatggaccatgaagcaagactgctggtggccaaggcctacagacacaccgagaaggtgctgcaggacaacctgggacaagttgcaggcgctggcaaacgcccttctggaaaaggaagtgataaactattgagggacattgaggctctcattggcccgccgccccatgggccgaaggaaaatgatccgcaccgcagaggtgggatccgacgcccagagggagaaacagtacttggggcgaggaggagaccgaagagacccagcagccttcacttggaggcgaagagccgacttggcccaagtagttgggaggtgttggctgcacgtgcgggtggtccgggaagtgagggctcactcagccaccctgagttgcttttcagctgaggtttgcacttcctctcgcggccctcagtagtccctgcacagtgacttctgagatctgttgattgatgacccttttcatgattttaagtttctctgcagaaactactgacggagttctgtgtttgtgagtccgtttcccctatggggaaggttatcagtgcttcccgagtgagcatggaacacttcgagttccccaggggttattagacagtccgttccccagtttggcttgaaggccacccaagaggcagcagagcattcaagcctcccaaacagaccccctgtttcatgccgacggtttgcacgaaccgccccagttcctgtggctccctcggaatgctaaggggatcggacatgaaaaggaccctgtgaagccgattgtcctatctccaagccggccctgtcatccagctcactcatcaatggggccacacagtcagcgccaaggcacttgggttccggaagacttcaccacttgccccctgctggccaatgttgggacttggtgcaaagtttgaggacttctttgctggtctaagtcacgcatgcagtgtttggggatgccttagtttttactgctctgagaattgttgagatactttacttaataaactgtgtagttggaaaatctaaaaaaaaaaaaaaaaaaa

SEQ ID NO: 1690 - DNA, 1343 bp, Homo sapiens
  SIMILAR (380)..(1126): 511254mologous to Homo sapiens human elongation factor-1- delta,accession number Z21507,Smith-Waterman Score=506.
tttccggcagaatggccttgcttgaggtttttgcaaatctctcgggtgtctggcttagagggaggcagctgggccctcatacctgcctccgcacttcagctgtttgacataaacccagcttcgtgtgagtgaaagggaagggcctggggaccctcagaggttctcggaccacacacttgagaacttctcgtctggaagacaggcctggggatgccatgtggggtgagggcttacgggcttggtgtcgctttgtggagaaccgctggtgtctgaagcgggtgtcagccccactgcaccttggtgcttctgggctgtcctgatgccgaggcccacttcccagccatgctgactttgcctctttcccctcccagcaagaaaaatggctacaaacttcctagcacatgagaagaatttggtcgacaagttcaaatatgacgacgcagaaaggagattctacgagcagatgaacgggcctgttgcaggttgccttcccgccaggagaacggcgccagctgtgatcctccgtgacattgcgagagccagagagaacatccataaatccctggctggaagctcaggccccggggcctccagcggcaccagcggagaccacggggagctcgtcgtccggattgccagtctggaagtggagaaccagagtctgcgtgggcgtggtacaggagctgcagcaggccatctcaagcctggaggcccgggctgaacgtgcttgaaaaagacttggcctggcccaccgggccacgggcccacaggacccagcacgtatctcccatgcgccaaagtggagccccccagcccaagaagcccacccacaccagcagagggaatgcgagggatgatgacattgccctgttttggcagtgacaatgaaggaggaggacaaaggaggcggcacaagcttgcgggaggaagcgggtttcgggagttcccgggggaaaaaaggcccaaaaaaccgcgcttggtgggcccagctctccttcttgttgggttgaaacccttgggaatagataaaaggacatggctcagctggaggcctgtgtgcgctctatccagccggaacgggtcgttcttggggggcttccaagcttggtgccccgtgggctacgggtatccggaaagctacagattcagtgtgtggtggaggacgacaaggtggggacagacttgctggaggaggagatcaccaagtttgaggagcacgtgcagagtgtcgatatcgcagctttcaacaagatttgaagcctgagtgtgtgtacgttgcgcacgtgcgtgaaggccctgccacgattaaagacttgagaccggcaaaaaaaaaaaaaaaaaaa

SEQ ID NO: 1691 - DNA, 477 bp, Homo sapiens
  SIMILAR (134)..(301): 831254mologous to Homo sapiens CGI-105 protein,accession number AF151863,Smith-Waterman Score=223.
ggaaaaaccttcgacaccttctgccctctgggccctgccttggtgaccaaggacagtgtagcagatccacacaccttaaagatctgctgccgagtgaatgggaaagtggtccagagcggcaacaccaaccagatggtattcaagacagaggacctgatagcctgggtctcccagggatgtcatcctaactgggacccccccaggtgtcggtgtattcaggaaacctcctgtctttctcaagaagggggatgaagtccagtgtgagattgaagaactaggtgtcatcatcaacaaggtggtgtgatggctcctgcacaggccctgcacataggatgagggcatctgctcccactcagcctagcccagggaaaggcccagtgacaggtgtggacaggtgccagccctgcaagccgcctcttctcggtagaagggagaaggacagagctctcttcaataaattcgtcaggtcaaagcaaa

SEQ ID NO: 1692 - DNA, 930 bp, Homo sapiens
  SIMILAR (55)..(846): 951254mologous to Homo sapiens CGI-105 protein,accession number AF151863,Smith-Waterman Score=1316.
atggctctgggatcctccgtctcctggatcctgcatttttctctgcaggctctgatggtggtgtctggtagaaggttactcacagctctgctgcaggctcagaagtggccctttcaaccctccagagacatgagactagtgcagttctgggcaccccacctggtggggcctcacttgggcctggagacagggaatggtagagggattatcaacctcaatgcctttgaccccacactcccaaagacaatgacgcagttcctagagcagggagaggccaccctctcagtggcaagaagagccttggctgcccagttgccagtcctaccacggtcggaggtaaccttcctggctccagtcacatggccagataaggtggtgtgtgtgggcatgaattatgtggaccactgcaaagaacagaacgtgcccgtgcccaaggagcccatcatcttcagcaagtttgccagctccatcgtggggccctatgatgaggtggtcctcccaccacagagccaggaggtagattgggaagtggagctggccgtggtcattggaaagaaaggcaagcacatcaaggccacagatgccatggcccacgtggccggcttcactgtggctcatgacgtgagtgctcgtgactggctaacaagatgcaatgggaaacagtggctgctgggaaaaaccttcgacaccttctgccctctgggccctgccttggtgaccaaggacagtgtagcagatccacacaacttaaagatctgctgtcgagtgaatggggaagtggtccagagcagcaacaccaaccagatggtattcaagacagaggacctgatagcctgggtgtcccagaaacctcctgtctttctcaagaagggggatgaagtccagtgtgagattgaagaactaggtgtcatcatcaacaaggtggtgtga

SEQ ID NO: 1693 - DNA, 847 bp, Homo sapiens
  SIMILAR (123)..(413): 891254mologous to Homo sapiens CGI-105 protein,accession number AF151863,Smith-Waterman Score=445.
caccgagcggcagtgacttcgccgctgctgtagttccccggctggatgcggtgactggtgccagtgctcaggcgcccgctgcccttgacctcccgccccgcgagccctaactcagcgcaggaggaccggttgccgccgccgccgccgccagagccttggctgcccagttgccagtcctaccacggtcggaggtaaccttcctggctccagtcacatggccagataaggtggtgtgtgtgggcatgaattatgtggaccactgcaaagaacagaacgtgcccgtgcccaaggagcccatcatcttcagcaagtttgccagctccatcgtggggccctatgatgaggtggtcctcccaccacagagccaggaggtagattgggaagtggagctggccgtggtcatttggaaaagaaaggcaagcacatcaaggtgaagtggaaagggtgggctcccagtccagagtgcagcagaggccccagctcctgcctctcctagttctgacctcactcaccaacacacggtgccagctgtccctgacactaggaagcagtcagcctccttgctccctgacactgcctttcccttcacccacctttggctggctctggctactaacatgggataacagcttagagatcccttgccataggtgttggtgtcacccatgatctaacctcctgtatggccaaatcccctgcccccataggccacagatgctatggcccacgtggccggcttcactgtggctcatgacgtgagtgctcgtgactggcaaatgagacgtaatgggaaacaatggctgctgtgaaaaaccttcgacaccttctgccctctgggccctgcctt

SEQ ID NO: 1694 - DNA, 421 bp, Homo sapiens
cgtcttcctatcgctggccttcctttcccatcctaaaaacttgccgaggccctatggctccctccctttctttcccaggcagcttcttatctgggctgtctgtaccccttcctttgcaccacccaccatgccccacgtagctgaaagctgcttatcccaattgtcaactctggcctttcttagcctctgtagcaccagacactgcacctcctgaatgtccttcttgcttcttcttgcttcagagggcccaggctcgccatttcttcttgacctcttcccatatgactgctaaggactctgctgcacctgacctcaccagcctcggggaaatccacttacccccaggcaaggcctgtggcttggcttaaaaacccactgcatgggcacaaaagccgggcctgggatccccagataacaaggg

SEQ ID NO: 1695 - DNA, 758 bp, Homo sapiens
  SIMILAR (270)..(356): 961254mologous to Homo sapiens Human isomerase homologue-3 (HIH-3),accession number AAY52296,Smith-Waterman Score=154.
gataactccaaggttccatctttgcatttcagatccacacaacttaaagatctgctgccgagtgaatggggaagtcgtccagagcagcaacaccaaccagatggtattcaagacagaggacctgatagcctgggtctcccagtgagtgactagggctgtcctgtcagccccgctccacctgccacacatgtggaggctgacctgagccctccacctttggctgtggccactcagccagcccctggtctcactgggtccttttgctttgctccaggtttgttaccttttacccaggggatgtcatcctaactgggacccccccaggtgtcggtgtattcaggaaacctcctgtctttcctcaaggtaggtttagcgaaaagcaaagagagcaagggcccccaaagcccctggcaggcttgccctcagacttgagaagtacaggcttgtgtatgtgtgtctgacggaaagggctgacactgtcatggcctgctctgttgcagaagggggatgaagtccagtgtgagattgaagaactaggtgtcatcatcaacaaggtggtgtgatggctcctgcacaggccctgcacataggatgagggcatctgctcccactcagcctatcccagggaaaggcccagtgacaggtgtggacaggtgccagccctgcaagccgcctcttctcggtagaagggagaaggacagagctctcttcaataaattcgtcaggtcaaagcagcagctttgcttctgctgtttgtc

SEQ ID NO: 1696 - DNA, 1824 bp, Homo sapiens
  SIMILAR (1053)..(1421): 651254mologous to Homo sapiens CGI-105 protein,accession number AF151863,Smith-Waterman Score=345.
  misc_feature (1)...(1824): n = a,t,c or g
tcaaatagaagtcgggccatggcacgccactgaggaccttccagcggtctcctgtgcacttaaacgaggtccagactcctttgtgggacaagtaaagctcttgatgatctggtccttgagtaatgtgggggccacttgtacagagcccctcacactgttcaaagtcggcagctgaagagctgagcagtagctgtctgtggagttcagctgccactccctacacgcctgccctctgcaggggatggagtcccgtttccccacttccccacctgcgcccagcagtgcaggtgaaggcctggctgcggagagtggctgggaaacgctgcgctaagggatcaggaatgccagctccactactcaccgcctgtgtcaccctgggaaaacagctctggccccaggttctccataagtaaaacagggtcactcatccctcccctccttaacgacatatgtcagaatcagaagccacaaatcattctctcccacccagcacgctgccttggtctcctagaccactttccccaacaatgggaaaggcgccaggcccagaacaaggccgagaccggatgaggccagcgaagcgcccagggacaaactttcaggcagcgcccactctcggtctcgggcaattgcaaggtacctccgagagcgaccgtctccagaaaacgcggccggcgcctgcctatgccctgagcctgaagagcccccggcgccgcccgccccgcactgggcccgcccctccgggattggtgccctgctaggggtggttgcctgtgacgtcaccggacgcgcccgcttctcgctggagtgcgcaccgagcggcagtgacttcgccgctgctgtagttccccggctggatgcggtgactggtgccagtgctcaggcgcccgctgcccttgacctcccgccccgcgagccctaactcagcgcaggaggaccggctgccgccgccgccgccgccaggaggtaaattgggaaggggagctggccggggtcattggaaaaaaaggcaagcccatcaaggccacagatgctatgtgcccacgtgggcgggcttcactgtggctcatgacgtgagtgctcgtgactggcaaatgagacgtaatgggaaacaatggctgctgggaaaaaccttcgacacgttctgccctctgggccctgccttgtgtgaccaagtgacaggtgtagcagatccacacaacttaaaagatctgctgcccgaatgaaatggggaaatggtcccagagcggcaaacacccaaccagatggtaatttcaagacagaggacctgaatagccctgggtctccccagtttggttacccttttacccccaggggatgtcattcctaacttgggacccccccacctccacccaggtgtcggtgtattcaggaaacctcctgtctttcttcaagaagggggatgaagtccagtgtgagattgaagaactaggtgtcatcatcaacaaggtggtgtgatggctcctgcacaggccctgcacatacgatgagggcatctgctcccactcagcctaccccacggaaaggcccaccgacaggtgtggacaggagccagccctgcaagccgcctcttcttggtagaagggagaaggacagagctctcttctataaattcgtcaggtcaaagcngcnnnnnnnnnnnnnnnnnnnnnnnnnnnnnnnnnnnnnnnnnnnnnnnngnnnnnnnnnnnnngggggccgcggnnnnnnnnnnnnnnggggggggttattttttgggggggcggggggggttttaaaaaannnnnnnnnnnaaaaaccccgggggccccccaaatataattg

SEQ ID NO: 1697 - DNA, 1460 bp, Homo sapiens
  misc_feature (1)...(1460): n = a,t,c or g
gaccttacagaaggatggatggtaaaggcagtccatcatcagcacaatctgacttacatttcattgagtaannnnnnnnnnnnnnaaaattctggagggcagcactttcagttgcccttgggggccggccacagccgcacaagtgggcttggggttaatcccccgctataagggaaagctggaaaaacttcaactccataggtctaaaggaaacattgttttaggttatttttgtccacccctgggcgatactattaattgacccaaccaaaaaagcttggggacactgagtcaaaagggggacatgggattgaaacctggccactgctgctgcatgagctgtgtgtcctggggtgtgccggcctttctgtgaagggggttggtggcagtgcccacctcactagatgcctctgacccagcctcccctgggggagtgggtggccacagaccctccctgccagagctcctggaaggctcctgcaggcctgacccatctattcctgtagacctggtttaggatgaagtctcggtgcgatttttgcagagttgggtttatcttttaactatagacccttctggctgttctcagccatatcatgtgactctgaatagttggatgaggaattggaaagaaagcaaggatgagagccgggcatgtggcagtctccgcccagcatcggctgtccgcacagaggcacagggcaggcctcctgtgcactccccacctagcactggcctgtcctgaatccccgccttccctggttggaggccagctgtggcatttgcaccctcttctcacctcaccatgcacatgctaactttaaagccttggggtctttcctgtaccccctcctcaaccctggtccaccccctctcaggatcttgacaacgatatttttcctgtcccgccttcctatcgctggccttcctttcccatcctaaaaacttgccgaggccctatggctccctccctttctttcccaggcagcttcttatctgggctgtctgtaccccttcctttgcaccacccaccatgccccacgtagctgaaagctgcttatcccaattgtcaactctggccttcttcagcctctgtagcaccagacactgcacctcctgaatgtcctctgcttctctgcttcagaggcccaggctcgccaattcttttgacctctcccatatgtctgcttaggactctgctgcagctgtcctcaccagcctccggggaatcccactacccacagggcagggctgtgggctgggctgaaaaaccatctgcatggtccacaagaagcctggcactgggtttccccatgaataacaatgaaaattaatggatgcacaaccttcctggaacgtggaatttctctgggagattccatgcagaggccactggggaaggtggcaggcatgcattgttgactgtaggtggctgcagtgttggaaggctcccagcagaa

SEQ ID NO: 1698 - DNA, 435 bp, Homo sapiens
  misc_feature (1)...(435): n = a,t,c or g
ggctttccctgatcgacccacgcgcncgtccgtgtgtgggttgggaatgccgggtgtaggctctgtttcagagctgacggggttgcgagcggcgtggggtgtgcctgggacggtgaccggatgtgtcttcctgaatcgttgtattcgagctccagttctctctgtttctacagctgggcctcagtcctcacagggctctagtgggcgttcagccacaccaggagaaggcgcccaggggattaacaggacccttccctctcctgctcttccctcgccccccatggctccccctccctcctatttagtaggtacttctccagcaccccacagcgatgatggatgctggccctaaagccaggcactggcgccctgcactgtagcagatgcctaaataaagtgtggagcctgaagccgaaagtttgggagatgcttgcg

SEQ ID NO: 1699 - DNA, 3378 bp, Homo sapiens
  SIMILAR (1533)..(1886): 471254mologous to Homo sapiens Similar to dCMP deaminase,accession number BC001286,Smith-Waterman Score=176.
  misc_feature (1)...(3378): n = a,t,c or g
gagctccagttctctctgtttctacagctgggcctcagtcctcacagggctctagtgggcgttcagcacaccaggagaaggcgcccaggggattaacaggacccttccctctcctgctcttccctcgccccccatggctccccctccctcctatttagtaggtacttctccagcaccccacagcgatgatggatgctggccctaaagccaggtgggaaaccaggctgattcagcacctgtcttttcctgttaggggggttgccaggcctctcagatgtggggcagcgtaatcagtgggtgaccgtggttcccagcacccactctccactgcatccttgtcttaggcactgccgccctgcactgtagcagatgcctaaataaagtgtggagcctgaagcagaagttttgggagatgcttgccttcctttagaccacattcctcgcctttctcaagatttctccgtggtacccaccccgtttttgtgttgtcttccttccttgcccttgtttcattccttttgaaagcgaccactcccctgaagtcctaggacccccttcgtgggctctccctgccgtagacagtctctgcttgcccctggtaaactacgttccaaaaaccttgctttaggagtagcacttgacgtttttcatagtttcttctcatgtaattcattactcggagttgataacttctgtcccatctggattattgaggagaaagggaagggaaaaattatctggttaatatcagagttgggaaggcttcagatgttttctttgaatccgtctggcatggatgataatcctgtgtggtttaggttaagttacctaagttctctgagtctgtgtaagatgggatggcactgtctaccttagctaggagtaaggcttgagtgacatgatgtgtataaactttaacaatgtctggaatctatagatgatcaataaatatttcttttttccaccctcctcctgtgctgactccgctttgtaagggagacaggtaaaggacacaacaatttgtaggctggcataaaaaatcctatgagagaaagcagtaaatagatgttatatttgggaacgtgaagctataggtttcaaattcaaacttctgaaataggaaatttcttaagtttttacttaagaccagagactgtttagggcccatgtgctgtgatttctgattgataaatgtagctgaagttgcccatatttagagatttaaaggttcagtgtggttgggttgaactggaaaacagacttactaaaatgcttctctcaacttctgttttgtcatgtttttcttctagacccaacatgagtgaagtgtcctgcaacaaacggtacgactatttggaatggccagagtattttatggctgtggccttcttatcagcacagagaagcaaagatccttattcccaggtcggcgcctgcatcgtgaattcagaaaacaagattgtcgggattgggtacaatgggaagccaaatggggtccataattactttgtttccttgaagaagaacacccaaagaataagctggacaccaaatacccgtacgtgtgccatgcggagctgaatgcccatcctgaacaaaaaattccgacccgatgtgaaaaggcctgaagtatgtatgttcgccctggtcccccctggtaaatgaaatggcggcctaagcctcatcatccccaggcaggtattaaaaggaagttgatttttcatgtcttgattaattaccctggttagttgacgggggccactgctggcgaggctcctgttttaatatgggcccggggtgacattcccggaaattcatacccgaagtgcagcaagattgtcattgactttgattcaattaacagcagaccgagtcggaagcttcagtgagttacatctcattcaatctccagaagattgggattatcgtcttctaagaggtgtgctaatgcctttcatcttgaagttacacataacttcttactagccagtatggcaaaaagtaggcatcctcaagaatataaagcctcaaatcttccttactgtctctcttgtcacatggaatctacatgtgtttgaactattgctttagggatttaaaataggggagcctgtgggtgggcctgggtgcacaggggctaagaaccgagagtgcctccccttcttgtggtcctgggctgggctggggatgctgggtggctctttcagagggagccatcagcatgtctgtcatcctgcnggcgatccggcagcctctctttcactgctacatgtgctgggaaggacaaattaaataattgtgggttgtgttctttaatggggggacgagcagacacactgatcttgaacatctgggcccaagtgaagcatggcatatagtgcccttgggaagaaatttagggcctcaaatgacagttagcattgaagtgttttgctgcagagttgaggggaaacccccaagccaccctcccgggaatccgagatagggtggcacatctgtcctgacagacgaggagtgtaactgaaccatggaatatttcctccattcctgctctccccactgcacacagggtgggtngcaacattatccctcctgggggggtgggggaccgcctggtttggttttgggctccaatttgggtttgttggtcacatggagctcttcccatttcgtttagctgaataaatgaagttgttccctaggagggagccagcctgttcttcttccttgttgcccccaaaagcccatggcccttgccgtgggtgggcagctgggggctgttgggatggggaggggttccccaacatggaatgtgttgcccctctctccggcatagccaacgcacggttcatagtacaaaggcccctgctgcaacatggtagagcaaaaattaattcctatccccggtgaagtggattgtgaagaaatttccccaccccacgtggaagaacagcttactgcaagcactgttgggtgttcggagcctccttcctgtgcccctggctcccatgctttcacctaacacaaagcatcacccttccctaatacaacccggggcggggagccgtgtggctgtgcccccttctctttaatcctcatttaattttgtattaacaatgcctcagtacctgtgttgagaaaaggctttctttatctctacagcttattacctttttaaagtgctcttatattttcatgagtttttattttgtctctgaggattttgtattccacattctagggggattctgtaaatttggctcccttacccatattatttaaaaatcttatttaaaatctaccctaccaaagcatgtccatttttatgttattataattatatgatataaaaaaaaaaaaaaaaaataaaaaagctgt

SEQ ID NO: 1700 - DNA, 2301 bp, Homo sapiens
tttttttttttttttttaagggtataataaaattatttttattgcattttgtgcaagaccgggagctaaaaaagtaatacagtaaaagccataaagcattaaatgggagcattcaacaataaaggaaagaaccaaccctctccttttcatattggcacaaagaacacaagatcaatactgaggcaggatgcggtcatactgaacacttacactggaaaattaaagggcagggcctaataataataggcagtaatagtaattaaagtactcttgatttgggtttgcaacctctcctattttacaaggggtttttcaacttcattggcattgccctgcacataggatccatcttaaaacaaaaggcaacactaggtttattcacttacaagggcttattggaaatattgcactcagaaataaaagtcacttgaatggacatgaaacatctaactacagtgattataaagataacttgatgaatgacttgtgataacattcataacaaatattgcacatgtagcacagaaaacttgggtttttgttgtgggatgtctgtttcatcaacggaaactttgctcttgccaaccatacaaactgggcccagatagtgcaactttggttcgctaattgatgttgatacagcccccttctgcacagcccatcacatcagctctggaatagtccaggctgatagaaggcaggacctggctgtggtgttccagagggaggtctactgaaggatgcagggggctggtgtctaacacctccagcttcctgattgagtacctgaaagaatctatccaatcccctgaatcgaaatctcaaaagggaacttggccgttaactggcaagacctccaaaacctacccccagccacacctgacgctgtctgggtggcgcccagctccagctctagctctgccttgggctcaaaggaaaagaggtggtgaggtccggattactcagtggcgccagctctgggaggtgcgtgagatgtcaagctaggtgcgcaggtcagggcccctgggggctggaggtacttgtacccagtcccagatggtgctggaacgagcatgcagtgcctgacccccttagtaatgtgccctaggggaagggaactccggccaccgcgccttctctaaggacagagcacgcctcagaccaggctggtggagcggaagggccaaggatgagctggggaaaccaaagcccctgggtcctagttagaggagagcagacaggcgctaaggacaaagcgcgtgcgactccagccctccctcaggcccaggtccccgggagacggagctagaggccgctgctaagcagcgaggcccggccccagagcacggagaaggcggctgggtccctcaggcgaagacaggagctgccagatggggacgggggaggaacatcacgggcggctctggggcctctcagtgggtccggcccctaaaccagaatcggccccctcctccctcacttgtcccagggaggaaactccggggagggggcgccctccagctccacaatttcagtctttggcgaggagccatgggatacggggagcaggcgacaagccgactgaagaaaaaagcctgctcccccaacaaaggcaccggggcggggcttcctcggtggggcgcgggcctctcggtttcttccctcttgaagaagcacccctcccctatccctggcccccaaacttgcaataagagcccgatgaagaagaggttgctcgcgtcctctgcagccgcagtggaagctcacgtccgctgggaggcgaatcccaggaaaagttggacccttgtctcacctcatctcggaaaaggactggagaggagggtgggaagccaagggcgcgcggaaagggcgaagaggcgagagcaggacggaggtgtcgagggaacgaggcccacgaaccccgcctgggcctaaagcactttcgctctcaaactcttggacgttcaaggaaaattcagccttccccgaggcctcgcctccccgcagtgcccccagcgggagagctcgactatggcgaagaagtctgttgcgcttctagtcacataaatcatggggacgttaaaaatgcgcacgatgtctcctgtacactatgtataggctcggccggccgcgcccctcggctcgacgagaaggggcggcggagacggcaagagcgtccttcccacccctcgggcctccgggccgccgggagccagggagcagctccgggcttagatgtattcccagtcacacccttgtgcccctcggccaggctggccgtaatcatggtcagagcttgta

SEQ ID NO: 1701 - DNA, 903 bp, Homo sapiens
  SIMILAR (163)..(459): 881254mologous to Homo sapiens Human secreted protein encoded by gene 3 clone HNHCT15,accession number AAB38012,Smith-Waterman Score=439.
atggataaatttctggacacatacacccttccaagactaaaccaggaagaagttgaatctctgaatagaccaacaacaggctctgaaattgaggcaataattaatagcctaacaaccaaaaaaagtccaggaccagatggattcacagccaaattctaccagagaaccaatgacaaaaactgcacaattatctcaatagatgtagaaaaggcctttgacaaaattcagcagcccttcatgctgaaaactctcaataaacaaggaactgatggaacgtatctcaaaataataagagctatttatgataaacccacacccaatatcatactgaatgggcaaaaactggaagaatttcctttgaaaactggcacaagaaagggatgccctctctcaccactcctattcaacatagtgttggaagttctggccagggtaatcaggcaagagaaagaaataaaggccccggccccagacgctacagccgccgaaatgttgatgcctaagaagaaccggattgccatttatgaactcctttttaaggagggagccatggtggccaagaaggatgtctacacgcctaagcagccagagttggcagacaagaatgtgcccaaccttcatgtcatgaaggccatgcagtctctcaagtcccgaggctacatgaaggaacagtttgcctggagacatttctactggtaccttaccaatgagggtatccaccatctccgtgattaccttcatctgcccccggagattgtgcctgccaccctatgccacagccgtccagagactggcaggcctcggcctaaaggtctggagggaagtgaggagcatctctgcgcggccgcccatcgtctgagatgtggggagcacctctgccccaccgccctgtctgggatgtga

SEQ ID NO: 1702 - DNA, 2497 bp, Homo sapiens
  SIMILAR (804)..(1190): 331254mologous to Xenopus laevis, splenocytes, Peptide, 165 aa 40S ribosomal small subunit protein S10,accession number S57432,Smith-Waterman Score=121.
caggttgacacagttctggattttatccacagtcatacaatcacaactgatatatatatatatttgtatttatatacctttaaattacacaatcatgtacaaaacaggtgcattgctgagaccacagcacttctcggagtttcacaagtgtcggaactaatggagtcaggaagcctagggcggcagacggcgggcggtggggcagccctggttccttgcagaaccaggccgcagaatggtggttaactggggacaaaacacattactcgccgagccccaccagggcgggcccgtgcagcatcgtgggtgcaggcaggggctacaggaggaggccgtgggcatggcaaggggcgtggcccccacactcggtgttgagtgccctgacaccagcactggcagtggctccgcccctgggaaggcagagtcctccctgtgccctctgcattacaccctgtcccctgtgaacgtcctcttcctgctcttgccatcctccaccgaatgcctgctgccgaggaacatcgagtgtcctctctcagaaggccgggcaggcacctcatttaccagggccaacgggaaagcccctaagaagctcaggctctctcagggctgtcagggcacccggccctatcggtggcggtcaggctccgtggtcagatccgccagttcttcaggcaccgccgaggccaccccaggctccccgcgggtcctggcggggggcgggtccacgccagcccggaagagacgcagcaccgcgcatgctccttcctttccagccccggtaccggaccctgcagccgcagagactgttgatgcctaagaagaaccggattgccatttatgaaactcctttttaagggagggagtcatggtgcccaagaaggaatgtccccatccctaagcacccggagctggcagaccaaaaatgcgcccaacttacgtgtcatgaagcccatgcaagtctctcaaggtcgcggaggctacgtgaaaggacagttttgcctgggagacatttcctactggtaccttaccaaatgaggaagcaaatgccagctgcatacggaggctgcgcggctggggcagccagcattattcccacttgacggacaagggcgctgtgacctgctacggggcacctgtccatgcgtgcccgcagcctggaggtacagaggcccaccgcagccccaagtggaccatcgtggctgagtttactccaaaaggggatgtggactggaaagaacgaagacctccacttcaggaggtgcaggtgacaccctgccctgttccctccataggagagaccctgggatccaacctgagcctgatcagatctctgtgtccagctgccaattcaccagaaatgcagagaacagaggaacatgctgaattgcaccgggagtgtacaattagcaaaatccagactataggaaactctacaggttatacagcccagggccagacctcctacctgggggcaggagctccggggaccatcggcggcgactcggggcgaagcgggacgtctggggcccggcctcaagcccggccgacttcccgggggaggagggggctggcgctgccgccgccaccgcgtcgctatgggatctcgcctgtacagcgtgctgtacacacgtctcatttacctcgccgcgacgggtaccgagctcgaattcgtaatcagggggacttcccagacagagagacaggcttggaagatcaacacccggatgatgatgagcagaatggtcatgaggatgtccacaatcagggctcagatgttcaggcacttggcggtggaggcatacgcctgggccccagtcaggaggaaccagaaccaagaattcctgccccacccacttccccccggcccccgcacccgccaccaccccccaacgcccaggagaccggctggcaaatccaactcctacacagccttcaagggctcagccccaaccctgctctgagatcagaggaggtgctgagagaggagagaggccaggcagtggaagcagcagacaccttcgagcctgcagggacagggcaagtggcagtgctgcacagaaaccgagatgtgggccctgagttccacccggtgctctccacgcttgcctctggtgggccagtggccagagaggaccaatgtggggaggaagctcaggccaactgctccagaaattgctggtgccgacaagaaagccgaggctggggctgggtcagcaaccgaattccagtttccctcgtcaccaccggacacggcatccacagcacggcattcatcacgttgcgtgtcctccttcccacaggaatgtcacttagtccagtcagcggtgtttatctgtctggttatctgccgtatttccagcatccagtgcagtgccggcaacatagggtactgcagcacgcaggcggcatcaacaacacaaccatttttgagcgcctactgtgtgccattgtgagcgcctcctcacatgctttatctccaaacctcacagcccactga

SEQ ID NO: 1703 - DNA, 565 bp, Homo sapiens
  SIMILAR (1)..(414): 981254mologous to Homo sapiens product is related to clathrin -associated protein,accession number D63475,Smith-Waterman Score= 689.
  misc_feature (1)...(565): n = a,t,c or g
ttgaacctgctcatgtccccacaagggcaggtgctgagtgcccatgtgtcgggccgggtggtgatgaagagctacctgagtggcatgcctgaatgcaagtttgggatgaatgacaagattgttattgaaaagcagggcaaaggcacagctgatgaaacaagcaagagcgggaagcaatcaattgccattgatgactgcaccttccaccagtgtgtgcgactcagcaagtttgactctgaacgcagcatcagctttatcccgccagatggagagtttgagcttatgaggtatcgcacaaccaaggacatcatcctgtccttccgggtgatcccgctagtgcgagaagtgggacgcaccaaactggaggtcaaggtggtcatcaagtccaactttaaaccctcactgctggctcagagctccccgaaaggccagtaatggatccccggcctcagtccctactctgctttgggatagtgtgagcttcattttgtacacgtgtgattcgtccagttacaaacccaataaactctgtagagtggnnnnnnnnnnnnnnnnnnnnnnnnnn

SEQ ID NO: 1704 - DNA, 534 bp, Homo sapiens
  SIMILAR (77)..(481): 961254mologous to Homo sapiens product is related to clathrin -associated protein,accession number D63475,Smith-Waterman Score= 670.
cggcagagcagggggccgaggacaccaggtctgttctcagagcgatgggccgcggagactgatctgccgccatgattggaggcttaagcggtccaacatttggctggcagcagtcaccaagcagaatgtcaacgctgccatggtcttcgaattcctctataagatgtgtgacgtgatggctgcctactttggcaagatcagcgaggaaaacatcaagaacaattttgtgctcatatatgagctgctggatgagattctagactttggctacccacagaattccgagacaggcgcgctgaaaaccttcatcacgcagcagggcatcaagagtcagcatcagacaaaagaagagcagtcacagatcaccagccaggtaactgggcagattggctggcggcgagagggtatcaagtatcgtcggaatgagctcttcctggatgtgctggagaaggtgaacctgctcatgtccccacaaggcaggtgctgagtgccctgtgtcggcccggtggggagaaaactacctgagtgcatgcc

SEQ ID NO: 1705 - DNA, 966 bp, Homo sapiens
tttttgtgagtgagaagcaccaggtttaatattaaaatctttcccttaaaaaaaagtacacagatagaaaaacttaacagcatacaaaatagcatttctgctgtataaatgtgagttaacgtgagtcctaaaaatatttgtaaacctaggtgattatatctttggtaccgtattgagaacccactctccctccttggaccaactctggggatcccagggaagtaaggtgccaacctgcaatgcagggttggtgcccagaggggttgagcttcctgcacccccttcccaaccctccccgtgcgggggcgtcttggctacaaccctgactcccctggcacctccaatgcccactgggctggggacaatgagatgtcactggtaggtctgggcccagtgacaaaaccatacccccatggagcgctgcctcagggatggggcagctggtgggtgagggggctttccaggacaccggctgtcactctaagtcaaggcctgtgcagctgtgttcttgagacttgctgggggcctggggaaggggcatggttcctgagtccccagagtgtgatgtgtgatctggaatctcccaggagcccagctgacccccaggatggaagtttaggggtatatggccttgcttcatcttggaccaatgtgcaaccaacctggaatacctctagaattggtagtgcttgccaggcacctcagagtttaataagtcccacttattcatttttttggagggggaaacttgaggcccacaaaagggtggaggggttcctccaaagcctcattacaaggccccaatgcaaagcccgggccctatactgtggacacaaccgcgggcccctcccactggggccatttacttttttttacaaatgggggggcccccctggcgtttttcactttttggggtgggtggataataaggggggggaaaaaaaaaaccccacaacgtggggcccg

SEQ ID NO: 1706 - DNA, 2033 bp, Homo sapiens
  SIMILAR (109)..(246): 911254mologous to Drosophila melanogaster clathrin-associated protein,accession number AJ005962,Smith-Waterman Score=218.
  misc_feature (1)...(2033): n = a,t,c or g
tttcgtggacatcttgggatccggagagtggccgggccggcagagcagggggccgaggacaccaggtctgttctcagagcgatgggccgcggagactgatctgccgccatgattggaggcttattcatctataatcacaagggggaggtgctcatctcccgagtctaccgagatgacatcgggaggaacgcagtggatgcctttcgggtcaatgttatccatgcccggcagcaaggtgcgcagccccgtcaccaacattgctcgcaccagcttcttccacgttaagcgggccaacatttggctggcagcagtcaccaagcagaatgtcaacgctgccatggtcttcgaattcctctataagatgagtgacgagatggctgcctactttggcaagatcagctgaggaaaacattcaagaacaattttgtggttcattatatggagctgctggatgagattctagaatttggctacccacaagaattccgagacagggcgcgctgaaaaccttcatcaccccagcagggcattcaaggagttcaggcttcagacaaaaggagggcagttcacagttcaccagccaggtaactgggcagattggctggcggcgagagggtatcaagtatcgtcggaatgagctcttcctggatgtgctggagagtgtgaacctgctcatgtccccacaagggcaggtgctgagtgcccatgtgtcgggcccgggtgggtgatgaaaaactacctgagtggcatgcctgaatgcaagtttgggatgaatgacaagattgttattgaaaagcagggcaaaggcacagctgatgaaaccaagcaagagccgggaagcaatcaattgctcattgatgactgcacctttccacccagtgtgtgcgactcagccaagtttgactctgaacgcagcatcagctttatcccgccagatggagagtttgagcttatgaggtatcgcacaaccaaggacatcatccttcccttccgggtgatcccgctagtgcgagaagtgggacgcaccaaactggaggtcaaggtggtcatcaagtccaactttaaaccctcactggctgggctcagaagatcgaggtgaggatccaacccccactgaacacaaggcggggtgcaggtgatctgcatgaaggggaaggccaagtacaagggccggcgaaaattcctttgtgtggaagatcaagtcgcatggcaggcatgaaggaatcgcagattcagcgcagaggatttgagcttctgcttaccaacgacaagaagaaatggggctgccccccccatttcccatgaactttgaggtgccatttcgcgccctctggcctcaaggtgggctaacttgaagggtgttgaacccgaagctgaactacagcgaccatgatgtcatcaaatgggtgcgctaaaattggccgcaagtggcatttatgaaaactcggcttgtaaggccactaggcagctagcccaacttccccagccacccttccttcaacaggtccaggtgccgctccttccccaaaccacacatcaagtgtctccttccctccctgctttgctgccttcccctttgcaccaagcccgaagtcttaggtctgggccaaagcaacattacaaagtgggaccggtggaaccagccctggggctccctgggcaaggggagttctgaggctcctgctctcccatccaccgtgtctgttcctggcctaatgccaggctctgagttctgtgaccaaagccaggtgggttccctttccttccccacccctgtggccacagctctggagtgggagggttggttgcccctcacctcagagctcccccaaaggccagtaatggatccccggcctcagtccctactctgctttgggatagtgtgagcttcattttgtacacgtgtgacttcgtccagttacaaacccaataaactctgtagagtggnnnnnnnnnnnnnnnnngnnnnnnnnnnnnnnnnnnnnnnnngaggggggcgccctttaaaaaaacacaatttcaccccccccgcg

SEQ ID NO: 1707 - DNA, 398 bp, Homo sapiens
caccccaacagagatgggtttcgtgccccacgagagtgcctgtgccttgtgacgagaatttcaaccatgtttttgtctctgcaggcagagaacagcagttacttcgtcagcagggagctgtgtgcgcattccatcaggaagctgcaggaatctccgggagggggccctggcatgaggctccaagttctctgcgtgtcgaccacatcgctaagactcaagatcttttttgggaagcccccctggcagcagggtcatggaaggaggaaggtcagaggaggggagggctcaggcagcaggggatgggccggggctgtcccatgcctttccacaggtgtcagcgggggcatgcccaggtaaggctccataaccagtgagcccagtctcgactcactgcaacc

SEQ ID NO: 1708 - DNA, 777 bp, Homo sapiens
  SIMILAR (481)..(774): 931254mologous to Homo sapiens Human Hydrolase protein-15 (HYDRL-15),accession number AAY71117,Smith-Waterman Score=485.
atgggggcggggacggctggagttgcggggactgctggagttgcggggcttgcctggggtctgatctcagagctgaagctggctgtgccctggggccacatcgcagccaaagcctggggctccctgcagggccctccagttctctgcctgcacggctggctggacaatgccagctccttcgacagactcatccctcttctcccgcaagacttttattacgttgccatggatttcggaggtcatgggctctcgtcccattacagcccaggtgtcccatattacctccagacttttgtgagtgagatccgaagagttgtggcaggtggcgtcgtgggcggaatggaaatggagaacttgctgacctacaagcggagagccatagagcacgtgctgcaggtagaggcctcccaggagccctcgcacgtgttcagcctgaagcagctgctgcagaggtgggtgcccggtgtggacggggagctggcagagaacagcattgacttcgtcagcagggagctgtgtgcgcattccatcaggaagctgcaggcccatgtcctgttgatcaaagcagtccacggatattttgatccaagagagaattactctgacaaggagtccctgtcgttcatgatagacacaatgaaatccaccctcaaagagcggttccagtttgtggaagtcccaggcaatcactgtgtccacatgagcgaaccccagcacgtggccagtatcatcagctccttcttacagtgcacacacacgctcccagcccagctgtag

SEQ ID NO: 1709 - DNA, 1175 bp, Homo sapiens
  SIMILAR (472)..(386): 931254mologous to Homo sapiens bK126B4.2 (novel protein),accession number AL022316,Smith-Waterman Score=139.
tttaattgctggatttatttatttatttatttatttaatttatttatttattttgagacagagtctccctctgttgctcaggctggagcacagcgttcacaactcactggttatggaagccttacctgggcatgccccccgctgacaactgtgaaaagccatggaacagccccgccccatcccctgctgcatgagccctcacctacctctgaccttcctccttccatgaccctgctgccaggggggcttcccaaaaaagatcttgagtcttagcgatgtggtcgacacgcagagaacttggagcctcatgccagggccccctcccagagattcctggcgcccatgtctcctttgggggtgactgaaggggatgggtccagacttacttgatcaacaggacatgggcctgcagcttcctgatggaatgcgcacacagctccctgctgatgaagtcaatgctgttctctgcctgcagagacaaaaacatggtgaattctcgtcacaaggcacaggcactctcgtgggcacgaaacccatctctgttggggtggctaagccctggcaagggcaccttagccacccaccctgggtctgagcccaggaccccacatcactgcctcatcgaaggctctttagcccctggtggccagagactcctgccctctccaagtctgttctcccctcttcctgggctcgtggctacccagcctgactccatttccaatacttcctttgccaaccaaggtatggctgtggtgaattaaagttcagagaagtgaagttgggggcaccttttgggcctggattttaggacttaggtgtggcccttccacaccccctttcccagtccataggctgcaccctcacgctgtcccctgctcagcctgggacaggcttcttgcccaggagaaagaaacttgctgggacccacagtgcaggatgggaactccgtgatggccccagccagcctcctcgcgcggccctgcctgccctgtcttgtgactgttttacgtctggatggcggggatgtggccagcttgagtgaaatgtgctgtaggtgtgacacgaagctggatttggaaaacttagcatgcaaaataatgcaatcaagctttatgttgattacatcttgaatcacattgtggatgttaaaatatgagaacaattgttagagc

SEQ ID NO: 1710 - DNA, 398 bp, Homo sapiens
ccaaaccctctctctacacagatggggacctcagggggcaaaggacaccaagagcttctggaatattcaccaggagggggtcccccgcctggcccgaggaaacagttccactgctccccacccccgcccaaccctgcctcgggaaagaaaggtcattccctcctcctttgctccacacagcttttcaaaggttaaattcaaccagcctgctccaccacccccacacgcccacccccaaacaagagaggaaaagttaattgaaaatgctgtttaatttttcagctccagtggatcctaccccagcacagatggctcccccaggactgtttgtcccgagcccatctccaccactccatcgcctcccgccacaagcatgggggcagaggcacagccagcag

SEQ ID NO: 1711 - DNA, 496 bp, Homo sapiens
  SIMILAR (304)..(492): 1001254mologous to Homo sapiens heat shock protein 86,accession number M30626,Smith-Waterman Score=323.
  misc_feature (1)...(496): n = a,t,c or g
cgcccccgcnnnattgaaacctgatggccgtgcnaccggcccggaatcccggtcgacccacgcgtccgaacgcgatggactctcgtgttgcctctgtagacgtcctgcttggttttaaaccggcgcggtgtcgttccagatgcctgaggaaacccagacccaagaccaaccgatggaggaggaggaggttgagacgttcgcctttcaggcagaaattgcccagttgatgtcattgatcatcaatactttctactcgaacaaagagatctttctgagagagctcatttcaaattcatcagatgtgaacctatgggtcgtggaacaaaagttatcctacacctgaaagaagaccaaactgagtacttggaggaacgaagaataaaggagattgtgaagaaacattctcagtttattggatatcccattactctttttgtggagaaggaacgtgataaagaagtaagcgatgatgaggctgaagaaaaggaagacaacg

SEQ ID NO: 1712 - DNA, 544 bp, Homo sapiens
  SIMILAR (1)..(222): 981254mologous to Homo sapiens Hsp89-alpha-delta-N,accession number AF028832,Smith-Waterman Score=364.
  misc_feature (1)...(544): n = a,t,c or g
gtagactcggaggatctccctctaaacatatcccgtgagatgttgcaacaaagcacaattctgaaagttatcaggaagaatttggtcaaaaaatgcttagaactctttactgaactggcggaagataaagagaactacaagaaattctatgagcagttctctaaaaacataaagcttggaatacacgaagactctcaaaatcggaagaagctttctgagctgtatcttgatgtttagaaaagtattcgttacatcttgtaggatctactttttgaacttttcattccctgtagttgacaattctgcatgtactagtcctctagaaataggttaaactgaagcaacttgatggaaggatctctccacagggcttgttttccaaagaaaagtattgtttggaggagcaaagttaaaagcctacctaagcatatcgtaaagctgttcaaaaataactcagacccagtctttgtggatggaaagtgtagtgctcgacgtcacattctgccttaaaggttgtacccagatacagatgtngatctaagat

SEQ ID NO: 1713 - DNA, 3427 bp, Homo sapiens
  SIMILAR (670)..(2376): 451254mologous to Homo sapiens heat shock protein,accession number M27024,Smith-Waterman Score=894.
  misc_feature (1)...(3427): n = a,t,c or g
cggaaggttcgggaggcttctggaaaaagcgccgcgcgctgggcgggcccgtcgctatataaggcaggcgcgggggtggcgcgtcagttgcttcagcgtcccggggtggctgtgccgttggtcctgtgcggtcacttagccaagatgcctgaggaaacccagacccaagaccaaccgatggaggaggaggaggttgagacgttcgcctttcaggcagaaattgcccagtggatttcattgatcatcaatactttctaactcgaaacaaagagatctttcctgagagagctcatttcaaattcatcagatgcattggacaaaatcccagtattgaacgcttgacacgatccccattcaattagacctctgggaaaagagctgccatattacccttttacccgaccaaaccaagatccgaactcctcactattgtggatacctggaatttggaatgacccaaggctgactttgatcaataacccttggtactatcgcccaagtctggggaccaaagcgttcatggaagctttgcaggctgggtgcagatatctctatgattggcccagttcggtgttgggttttaatccggcctaatttggttgctgagaaagtaactgtgatcaccaaacataacgatgatgagcagtacgcttggggagtcctcagcaggggggatcattcacagtgaggacagacacagggtgaacctatgggtccgttggaacaaaagttatcctacacctgaaagaagaccaaactgagtacttggaggaacgaagaataaaggagattgtgaagaaacattctcagtttattggatatcccattactcttttttgtggagaaggaacgtgaataaagaagtaaccgatgatgcgcctcaagaaaaggaagacaaagaagaagaaaaacgaaaaagaagagaaagagtcggaagacaaacctgaaattgaagatgttggttctgatgaggaagaagaaaagaaggatggtgacaagaagaagaagaagaagattaaggaaaagtacatcgatcaagaagagctcaacaaaaccaaagcccatcctggaccaggaatcccgacgatcttactaattgaggagtacggagaattctataagagcttgaccaatgactgggaagatcacttggcagtgaagcctttttccagtttgaaggacagttggaattcagagcccttctatttgtcccaccgaccgtgctcccttttgattctgtttgaaaacaaaaagaaaaagaacaaatatcaaattgtatgtacgcagagttttcatccatggataactgtgaggagctcattcctgaatatctgaacttcaatacgaggggtgggtgactcggaggatctccctctaaaacatatcccgtgagatgttgcaacaaaagccaaaattttgaaagttttcaaggaagaattttgggncaaaaaaatgcttagaactctttacttgaactggcggaagataaagagaactacaacgaaattctattgagcagttctctaaaaacataaagcttggaatacaccgaagactctcaaaatcgaaagaagctttcagagctgttaaggtactacacatctggcctctggtgatgagatggtttctctcaaggacttctgccccagaaatgaaggagaaccagaaacatatctattatatcacaggtgagaccaaggaccaggtagctaactcagcctttgtggaacgtcttcggaaacatggcttagaagtgatctatatgattgagcccattgatgagtactgtgtcccacagctggaaggaattttgaggggaagactttagttgtcagtcaccaaagaaggcctggaacttccagaggatgaagaagagaaaaaggaagcaggaagagaaaaaaacaaagtttgagaacctctgcaaaatcatgaaagacataaaaggagaaaaaagttgaaaaggtggttgtgtcaaaccgattggttgacatctccatgctgtatttgtcacaagcacatatggctggacagcaaacatggagagaatcatgaaagctcaagccctaagagacaactcaacaatgggttacatggcagccaaagaaacacctggagataaaccctgaccattccattattgagcccctagggccaaaggccggaggctgataagaacgacaagtctgtggaagggatcttggtcatctggcttaaagaaactgcgcccccgtccttctgccttcagtctgggagaatcccaggacacatgctaccagggatctacaggatgatcaaaccctggtctggggtattgatgaagatgaccctactgctgatgattaccagtggttgctggtaactgaagaaaatccacccccttgaaaggagatgacgacacatcacgcatggaagaagtagactaatctctgggctgaggggatgacttacctgttcaagtactcacccattcctctgataatatattttcaagggtgtttttctttaattttggtaaatattaaaaagtctgtatggccatgacaactactttaaggggaaagataagatttctgtctactaaagtgatgctgtgatacccttaggccactaaagccagagctagtaatgctttttggagtttccatgttggtttaattttccacgagattggggtaaccgtgcactgtaagaccgtatgtaaccatgatgttaacttttgtgtggtctaaaagtgtttagctgtcaaagccggatgcctaagtagacccaaatcttggtaattaaagtgttctgagctgtaatcttgatgtttagaaaagtattcggttacatcttgtaggatctactttttgaacttttcattccctgtagttgacaattctgcatgtactagtcctctagaaataggttaaactgaagcaacttgatggaaggatctctccacagggcttgttttccaaaagaaaagtattgtttggaggagccaaagttaaaagcctacctaagcatatcgtaaagctgttcaaaaaataactcagacccagtcctggtggatggaaatgtagtgctcgagtcacattctgcttaaagttgtaacaaatacagatgagttaaaagatattgtgtgacagtgtcttatttagggggaaaggggagtatctggatgacagttagtgccaaaatgtaaaacatgaggcgctagcaggagatggttaaacactagctgctccaagggttgacatggtcttcccagcatgtactcagcaggtgtggggtggagcacatgtaggcacagaaaacaggaatgcagacaacatgcatcccctgcgtccatgagttacatgtgttctcttagtgtccacgttgttttgatgttattcatggaataccttctgtgctaaatacagtcacttaattccttggcctt

SEQ ID NO: 1714 - DNA, 861 bp, Homo sapiens
  SIMILAR (553)..(831): 481254mologous to Homo sapiens Human myelin oligodendrocyte glycoprotein gene,accession number AAZ29204,Smith-Waterman Score= 166.
ctgaaaaactccaatttaccgactgtatttagcacatatataaatataatttgcacttgtcagcagactgggggaatcctttcacttgctacacttggcacccccccgcccccaccacaaccctgcctctccatcatgaacctgcctttcctcctccctcgctcctcccacaacctaagcccacccagccgggatcctctgaggaaagtcttggggcactagaggccactgtctccacctggcctccaactccaaaattggagccctccaaacattacaagaggaacatcagagagccaaaaagcctgacttcttagaaggagccctggactggggagccgggaggctcaggttttcaaatctgctccatgacagcacggcccaatgaccttgagcaagtcccttgtgccctgagtctcagttttctgggtggggtgagtgaggagaactgggagatctttagggtcccttagacttcaagtatgratgtgacacagatcccgggggcaaaccactgggctgagctgtctcaccttctgagggggagcaagaaagaggggagaaaagggcaggggcatggtggctcacgcctgtaatcccagcactttgtgaggccaaggtgggcagatcacttgagatcaggagtttgagaccagcctggccaacatggtgaaacccctgtctctactaaaaatacaaaaattagctgggcgtggtggtaggcgtctgtaatcccagctactcgggaggctgaggcaggagaatggcttgaacccaggagacggaggttgcagtgagctgggagcgtgcaccactgcactctagcctgggtgataagaacaaaactcagtccaaaaaaaa

SEQ ID NO: 1715 - DNA, 325 bp, Homo sapiens
  SIMILAR (280)..(92): 741254mologous to Homo sapiens Human ORFX ORF3076 polypeptide sequence SEQ ID NO:6152,accession number AAB43312,Smith-Waterman Score=252.
  misc_feature (1)...(325): n = a,t,c or g
nnnnnnnnnnnnnnnnnnnnnngaagggggaaaaatttattcaaattttttcataattccccccaaaagctccaaccacgttgccagtccttgggtgtaaaatgactggaaggagcagggaaggaaaatgggtgtcaactgtcccggccagtggctgcgtgcatgtgtgtgtgaacagggaaaaggccaccctttcccatgtttttcccgtctccttggttttccttgggaaacccgaagggctgcccgaggtagctccgagttgccctgggtcggtggggcttggtccgcatcctcctccgttagtccgctcccgcgttccaca

SEQ ID NO: 1716 - DNA, 2206 bp, Homo sapiens
  SIMILAR (2204)..(1926): 1001254mologous to Homo sapiens colony stimulating factor receptor,accession number M33210,Smith-Waterman Score=496.
gtgagtgagaagcaccaggtttaatattaaaatctttcccttaaaaaaaagtacacagatagaaaaacttaacagcatacaaaatagcatttctgctgtataaatgtgagttaacgtgagtcctaaaaatatttgtaaacctaggtgattatatctttggtaccgtattgagaacccactctccctccttggaccaactctggggatcccagggaagtaaggtgccaacctgcaatgcagggttggtgcccagaggggttgagcttcctgcacccccttcccaaccctccccgtgcgggggcgtcttggctacaaccctgactcccctggcacctccaatgcccactgggctggggacaatgagatgtcactgctaggtctgggcagtgacaaaaccatacccccatggagcgctgcctcagggatggggcagctggtgggtgaggggcaaacctccaaagcgcccacctctcacatccttcttggggtaccatctgaagcttcttgtcttttacaagacataactgtcctcactgtccattctgtcttcgacgcagacctcggcacaggtgctggagtggtgggctgcaggaggtgatctcatttgccctctttgtcccttttgcccaggatacccccggaggtcatcgtgggtagtgaaagaggtcccgtggtcttcccatgtccctggggcagctgctgggggctttccaggacaccggctgtcactctaagtcaaggcctgtgcagctgtgttcttgagacttgctgggggcctggggaaggggcatggttcctgagtccccagagtgtgatgtgtgatctggaatctcccaggagcccagctgacccccaggatggaagtttagggtatatggccttgcttcatctggacaaatgtgcaaccacctggaatactctagaatgttagtgctggcaaggcactcagagttaataagtccgacttattcattttttgaaggggaaactgaggcccagagagggtgagggattcctccaaagcctcatagcaggtccaatgcagagccagggccatatactggcacacacacgtggccactccacactggcacatttacattctcatcacagatgcggggcccgtctggccttctagactctggtggatggattaagactgagggtgataaagaaaaagccccaggactgatgggcctgaaggacagggacacaggcacttgctatggctgcgtgtgctccaagtgccctgggcaagggctgcaggctgggggtgtcctgtacttggctcagcctccagcattaattaggctgcctaatggccccagaccagctcgggccagggaacgcagggactggcatcatagggaggagactggctttcttctggatgaggcaacactgctcaaggctaggccctagctcagccagcagccagggaggctagggtctcttccctagctcctgggtggataaaagtgcgaggagagagctatgattccttgaggggtagctggctgaacagaaaaaagttaatttaccacctcagtaactccaagaatcttcccagggagggattcggtctccccacctgtcagccagggagagaatcctagattctgggtcatcaagcctaactttcccatcttacatatgggaaaactgagttccctgggggaaccctggctcagagtcagttggcctccctggaggcagagggctggtcacggcccctgcagttttcttgcctcctaagccagccccagggtttggggcacaacacgtcaggagcagaaagcttccagaaggggacagctgataagggcagcctggctgacaggaagcccggtcaggccaggccaggagatgctgggtgctggcagggggggagcttcaggcagggcagggtaggggccagccccctacaggaagctatcctctgcttccgcccgaggcgcagggcaccccgaatccggcaactgttccagctctggctccggctccacctggagctcaagctggggctctggctctggttcgtcctggggctccagggggctgtcacaggagatggttgaggaggtgttgacttcattcagggtggagatctcgtcggaggcatgggcaggctgggccatgcggtaaccccgtttgatggcattgtagaactgctcgttcatgggcagctctgggtaaggggtgccac

SEQ ID NO: 1717 - DNA, 804 bp, Homo sapiens
  SIMILAR (516)..(157): 461254mologous to Homo sapiens Human ORFX ORF3076 polypeptide sequence SEQ ID NO:6152,accession number AAB43312,Smith-Waterman Score=208.
tttttttttttttttttaacatgaagggtgagaaatttattcagatttcttcataattccccccaaaagctccaaccacgttgccagtccttgggtgctgcagttggtcggggagaggggctgtgtggaggtcaccttctggtagacggagacccgcttttcagactctgtggcgcagcaggcgggcccaggaacatttgggccactattgctcttagccctgccgcgcctgactttctctcctctactttcctttccgaccgtagggacaaagtgtgggaatccgctttgggctccaaagccctgccccgcactggcagcaccaagcgggtgtagaatgacttggaaggagcagggaaggaagatgggtgtcaactgtcccggccagtggctgcgtgcatgtgtgtgtgaacagggaaaaggccaccctctcccatgtttctcccgtctcctcggttctcctcggagacccgcagggctgcccgaggtagctccgagttgccctgggtcgctggggcttggtccgcatcctcctccgatagtccgctcccgcgttccacagcgccccgccgctcggtgtgcacgcactgcggcttaacccagccgacaaggcacgcttgccaaaaaggcgcgggtgtgtgtgtgcggggtccgcgttcggaggccaaaggagggtggcgtggtagagcccttctcctcctggccgcgacgccttgcccactctcctgccctaatctcggcctgccagcaaaagtgacacctgagcagggactggtccgtagaggcggcaggcccgctggtccg

SEQ ID NO: 1718 - DNA, 1861 bp, Homo sapiens
  SIMILAR (31)..(765): 711254mologous to Homo sapiens tetraspanin protein,accession number AJ250562,Smith-Waterman Score=804.
  misc_feature (1)...(1861): n = a,t,c or g
ctgaactcccgggttgaaccacgcgtccgatcgaggacaatggagaccaaacctgtgataacctgtctcaaaaccctcctcatcatctactccttcgtcttctggatcactggggcgatcctgctggctgttggagtctggggcaaacttactctgggcacctatatctcccttattgccgagaactccacaaatgctccctatgtgctcatcggaactggcaccactattgttgtctttggcctgtttggatgctttgctacatgtcgtggtagcccatggatgctgaaactgtatgccatgtttctgtccctggtgttcctggctgagctcgtagctggcatttcaggggttgtgcttcgtcatgagatcaaggacaccttcctgaggacttacacggacgctatgcagactttacaatggcaatgatgagaaggagccgggcagtggaccatgtgcagcgcagccttgagcttgctgtggtgtgcaagacctacacccaactggagcaccagcccctacttcctggagcatggcatcccccccagctgctgcatgaacgaaaactgaattgtaatccccaggatctacacaatctgactgtggccgccaccaaagtttaaccagaagggttgttatgatctggtaacttagttttcatgggagactaacatggggaatcatcgctgggagtgggcgtttgggaattcgcattctcccagttaattgggcatgctggctgggcctgctgttctgtcccggtttcatcacgggccaattcagtattgagatgggtgtaaggagaagtctttcaagaatgacggaataagagacctgttttaaaaagggacctgcagcaatctttgaaagacttcccaaaggatgttaagagcacagtacattattacacttggccctgctccctctacccctttaccccacaacgtggcaattgacatttcccacccagtctctgctccacctttcagcccacgtcacgtgtagtgtccattttgtgaagccctgttgtgccacagagtgtaagccaggtccccctgcagctagtcctaagtgaacctcaccccgaggccctgcatgggccagcccctccatcttgtacttggtccaacttgcaactcatcatcggtgactggttatcacaaccatcgctggcccctttgggccctgcatgtagtgtggggaggctcctgttagctcctcactgtgggtaaattgccacacacctcttaagtaggttaggcagacgatagttattttgttctttttgaattaatctcatttggtttgattttcccctctactagggctttcctacctttcttcaggctgccctaaggaccatgtaacggaaccaccttccaataattgtcccatggggggaaaaaaagccatggtgtcatgcatggaagggaaactgaacttggaggtgggcctcccttgctttgttaacatacccggggtatggtgtaggccagttttagtgccatcctttgccctcctcagttgaaacctgtaataacccctgtttacaaagcctgtgttgttggcctccttgtgaaaggcccatgatattttgtttttccccaaattaaattgccagtggtgttattttacctacttcctctctgtattttttccttgcattgacattatagacattgaggacctcatccaaacgaatttaaaaatgantgagtgtgaagggggaacaagtcaaaatatttttaaaagatcttcaaaaataatgcctctgtctagcatgccaacaagaatgcatttgatattgtgaacatttgtgatatatgtattaataaatagagcaattacaagcaaaaaaaaa

SEQ ID NO: 1719 - DNA, 721 bp, Homo sapiens
  SIMILAR (35)..(238): 641254mologous to Rattus norvegicus tuberin,accession number D50413,Smith-Waterman Score=200.
  misc_feature (1)...(721): n = a,t,c or g
tataaagtgctcatctttactttccttgcagtgtgaccagctgtgctctgctctctgctcatgcttcaggcccaaagacactgagcggtccgaggcgcccagaaggcttctccagaactgacttgcacctggcctggttccagtgctgacagcattaatctcttaccataactacctggacaaaaccaaacagcgcgagatggtctactgnctggagcagggcctcatccaccgctgtccagccagtgcgtcgtggccttgtccatctgcagcgtggagatgcctgacatcatcatcaaggcgctgcctgttctggtggtgaagctcacgcacatctcagccacagccagcatggccgtcccactgctggagttcctgtccactctggccaggctgccgcacctctacaggaactttgccgcggagcagtatgccagtgtgttcgccatctccctgccgtacaccaacccctccaagtttaatcagtacatcgtgtgtctggcccatcacgtcatagcaaagcccctgcacagactccagccgagcccacacctggctatgaggtgggccagcggaagcgcctcatctcctcggtggaggacttcaccgagtttgtgtgaggccggggccctccctcctgcactggccttggacggtattgcctgtcagtgaaataaataaagtcctgaccccagtgcacagacatagaggcacagattgc

SEQ ID NO: 1720 - DNA, 445 bp, Homo sapiens
  SIMILAR (1)..(132): 971254mologous to Mus musculus domesticus tuberous sclerosis 2 protein,accession number AF132986,Smith-Waterman Score=224.
ctctcccacatccccgaggataaagaccaccaggtccgaaagctggccacccagttgctggtggacctggcagagggctgccacacacaccacttcaacagcctgctggacatcatcgagaaggtgagagccgttgtacccggggccgggtgctagcgtgccagagctccgtgggcagcaatggcctctgggccctctgtcctcctcttcgagtgaccggatggctgtgtccgtaggtgaggctcccctccctgcagggtgggtgtcccgaggcctgtgcagggcctgccactgctggatttgtgtcctgactgaaagtcctggacatgggtgtcctgtcacactctgggacagctgggctgggcctcctggaccgacgctggagcccagacctggggctggggctttggcctgccgtcctccctgcccagccaacagctttgct

SEQ ID NO: 1721 - DNA, 438 bp, Homo sapiens
  SIMILAR (288)..(404): 971254mologous to Homo sapiens tuberin,accession number AB014460,Smith-Waterman Score=196.
gggttgggccctgagtgtacggcatacacacttctgctgccgcctcggcacagaccctctgtgcagccccaggggcggtagatcctagtgtccgtgcgtagccggcctgccctgggctcccctgagcctcttcgggcccagtgcgtggtctgtctgttgctgccgggggactgatgatggggtttctggcagtgacgggtttggacacactgtcctgcggcgggagggggaggtgagtgggagatgtagattcggcgtcctcgcaaactgccgccgcttctcccccagctgactttgtcctgcagtggatggatgttggcttgtcctcggaattccttctggtgctggtgaacttggtcaaattcaatagctgttacctcgacgagtacatcgcaaaaatggttcagtaagaaaagaattgagatcctgttcacgaaa

SEQ ID NO: 1722 - DNA, 414 bp, Homo sapiens
  SIMILAR (1)..(216): 981254mologous to Homo sapiens tuberin,accession number AC005600,Smith-Waterman Score=357.
aactacctggacaaaaccaaacagcgcgagatggtctactgcctggagcagggcctcatccaccgctgtgccagccagtgcgtcgtggccttgtccatctgcagcgtggagatgcctgacatcatcatcaaggcgctgcctgttctggtggtgaagctcacgcacatctcagccacagccagcatggccgtcccactgctggagttcctgtccagtgagtccccgccctgcctgcgcatgcacccgagaggttcgggctgtgtaacctgtgcgggcttctctggtgccctctctcaggactccttggggaacctgggtgtctcgccttctgctgcctcaaggcctgggcgtctctgcccggctgccatgagtgctctccttcctggctttgaggggcggctcctctcacccctc

SEQ ID NO: 1723 - DNA, 6373 bp, Homo sapiens
  SIMILAR (3464)..(4888): 761254mologous to Rattus norvegicus tuberous sclerosis 2 homolog,accession number U24150,Smith-Waterman Score=1735.
atgccggactcctgcggactacacatcccggcggcccatgcggccccgtcacgtgatgcaaggatcgccggcctttccgccagagggcggcacagaactacaactcccagcaagctcccaaggcggccctccgcgcaatgccgctaccggaagtgcgggtcgcgcttccggcggcgtcccggggccaggggggtgcgcctttctccgcgtcggggcggcccggagcgcggtggcgcggcgcgggaggggttttctggtgcgtcctggtccaccatggccaaaccaacaagcaaagattcaggcttgaaggagaagtttaagattctgttgggactgggaacaccgaggccaaatcccaggtctgcagagggtaaacagacggagtttatcatcaccgcggaaatactgagagaactgagcatggaatgtggcctcaacaatcgcatccggatgatagggcagatttgtgaagtcgcaaaaaccaagaaatttgaagagcacgcagtggaagcactctggaaggcggtcgcggatctgttgcagccggagcggccgctggaggcccggcacgcggtgctggctctgctgaaggccatcgtgcaggggcagggcgagcgtttgggggtcctcagagccctcttctttaaggtcatcaaggattacccttccaacgaagaccttcacgaaaggctggaggttttcaaggccctcacagacaatgggagacacatcacctacttggaggaagagctggctgactttgtcctgcagtggatggatgttggcttgtcctcggaattccttctggtgctggtgaacttggtcaaattcaatagctgttacctcgacgagtacatcgcaaggatggttcagatgatctgtctgctgtgcgtccggaccgcgtcctctgtggacatagaggtctccctgcaggtgctggacgccgtggtctgctacaactgcctgccggctgagagcctcccgctgttcatcgttaccctctgtcgcaccatcaacgtcaaggagctctgcgagccttgctggaagctgatgcggaacctccttggcacccacctgggccacagcgccatctacaacatgtgccacctcatggaggacagagcctacatggaggacgcgcccctgctgagaggagccgtgttttttgtgggcatggctctctggggagcccaccggctctattctctcaggaactcgccgacatctgtgttgccatcattttaccaggggcggtggggggatgttgtctttgtgcacagcttgcagccgaactcagggcagctttcagttgctgctgggctggcccaccgggtgcccaggattcagttgctggccatggcatgtccgaacgaggtggtgtcctatgagatcgtcctgtccatcaccaggctcatcaagaagtataggaaggagctccaggtggtggcgtgggacattctgctgaacatcatcgaacggctccttcagcagctccagaccttggacagcccggagctcaggaccatcgtccatgacctgttgaccacggtggaggagctgtgtgaccagaacgagttccacgggtctcaggagagatactttgaactggtggagagatgtgcggaccagaggcctgagtcctccctcctgaacctgatctcctatagagcgcagtccatccacccggccaaggacggctggattcagaacctgcaggcgctgatggagagattcttcaggagcgagtcccgaggcgccgtgcgcatcaaggtgctggacgtgctgtcctttgtgctgctcatcaacaggcagttctatgaggaggagctgattaactcagtggtcatctcgcagctctcccacatccccgaggataaagaccaccaggtccgaaagctggccacccagttgctggtggacctggcagagggctgccacacacaccacttcaacagcctgctggacatcatcgagaaggtgatggcccgctccctctccccacccccggagctggaagaaagggatgtggccgcatactcggcctccttggaggatgtgaagacagccgtcctggggcttctggtcatccttcagaccaagctgtacaccctgcctgcaagccacgccacgcgtgtgtatgagatgctggtcagccacattcagctccactacaagcacagctacaccctgccaatcgcgagcagcatccggctgcaggcctttgacttcctgttgctgctgcgggccgactcactgcaccgcctgggcctgcccaacaaggatggagtcgtgcggttcagcccctactgcgtctgcgactacatgtacgcgggacctcgcccacggcccatgaggctcagggcgtcagaggcgctggggctgtgggagccagagagaggctctgagaagaagaccagcggccccctttctcctcccacagggcctcctggcccggcgcctgcaggccccgccgtgcggctggggtccgtgccctactccctgctcttccgcgtcctgctgcagtgcttgaagcaggagtctgactggaaggtgctgaagctggttctgggcaggctgcctgagtccctgcgctataaagtgctcatctttacttccccttgcagtgtggaccagctgtgctctgctctctgctccatgggcctccccagcccctctggctaccccgtgacctggccgctggggagaggtttcatgcctggatttggtcatcagctttcaggcccaaagacactggagcggctccgaggcgccccagaaggcttctccagaactgacttgcacctggccgtggttccagtgctgacagcattaatctcttaccataactacctggacaaaaccaaacagcgcgagatggtctactgcctggagcagggcctcatccaccgctgtgccagccagtgcgtcgtggccttgtccatctgcagcgtggagatgcctgacatcatcatcaaggcgctgcctgttctggtggtgaagctcacgcacatctcagccacagccagcatggccgtcccactgctggagttcctgtccactctggccaggctgccgcacctctacaggaactttgccgcggagcagtatgccagtgtgttcgccatctccctgccgtacaccaacccctccaagtttaatcagtacatcgtgtgtctggcccatcacgtcatagccatgtggttcatcaggtgccgcctgcccttccggaaggattttgtccctttcatcactaaggcgcctgcggtccaatgtcctcttgtcttttgatgacacccccgagaaggacagcttcagggcccggagtactagtctcaacgagagacccaagaggtacggcctgcggggatgggaatacggcattttccagcgtgacctcaactcggaagctgttgtctccagcccctgggggccgggggccaagctcggccattacggccagagactactttctggggtcttggtctcttttcctagtgaccttcagggcctggccactgaggcctcagtgccgcctcgtctgaggatagccagaccccccaaacaaggcttgaataactctccacccgtgaaagaattcaaggagagctctgcagccgaggccttccggtgccgcagcatcagtgtgtctgaacatgtggtccgcagcaggatacagacgtccctcaccagtgccagcttggggtctgcagatgagaactccgtggcccaggctgacgatagcctgaaaaacctccacctggagctcacggaaacctgtctggacatgatggctcgatacgtcttctccaacttcacggctgtcccgaagaggtctcctgtgggcgagttcctcctagcgggtggcaggaccaaaacctggctggttgggaacaagcttgtcactgtgacgacaagcgtgggaaccgggacccggtcgttactaggcctggactcgggggagctgcagtccggcccggagtcgagctccagccccggggtgcatgtgagacagaccaaggaggcgccggccaagctggagtcccaggctgggcagcaggtgtcccgtggggcccgggatcgggtccgttccatgtcggggggccatggtcttcgagttggcgccctggacgtgccggcctcccagttcctgggcagtgccacttctccaggaccacggactgcaccagccgcgaaacctgagaaggcctcagctggcacccgggttcctgtgcaggagaagacgaacctggcggcctatgtgcccctgctgacccagggctgggcggagatcctggtccggaggcccacagggaacaccagctggctgatgagcctggagaacccgctcagccctttctcctcggacatcaacaacatgcccctgcaggagctgtctaacgccctcatggcggctgagcgcttcaaggagcaccgggacacagccctgtacaagtcactgtcggtgccggcagccagcacggccaaaccccctcctctgcctcgctccaacacagtggcctctttctcctccctgtaccagtccagctgccaaggacagctgcacaggagcgtttcctgggcagactccgccgtggtcatggaggagggaagtccgggcgaggttcctgtgctggtggagcccccagggttggaggacgttgaggcagcgctaggcatggacaggcgcacggatgcctacagcaggtgtggggcacagctggtggcagtgctgctgcgtcaacgggcgggggccgtagcctggtgctcgggctggtctgtggccctgggatggaggacagatagggcctcaccacctccaggtcaaccccagtcgtcctcagtctccagccaggaggagaagtcgctccacgcggaggagctggttggcaggggcatccccatcgagcgagtcgtctcctcggagggtggccggccctctgtggacctctccttccagccctcgcagcccctgagcaagtccagctcctctcccgagctgcagactctgcaggacatcctcggggaccctggggacaaggccgacgtgggccggctgagccctgaggttaaggcccggtcacagtcagggaccctggacggggaaagtgctgcctggtcggcctcgggcgaagacagtcggggccagcccgagggtcccttgccttccagctccccccgctcgcccagtggcctccggccccgaggttacaccatctccgactcggccccatcacgcaggggcaagagagtagagagggacgccttaaagagcagagccacagcctccaatgcagagaaagtgccaggcatcaaccccagtttcgtgttcctgcagctctaccattcccccttctttggcgacgagtcaaacaagccaatcctgctgcccaatgagtcacagtcctttgagcggtcggtgcagctcctcgaccagatcccatcatacgacacccacaagatcgccgtcctgtatgttggagaaggccagagcaacagcgagctcgccatcctgtccaatgagcatggctcctacaggtacacggagttcctgacgggcctgggccggctcatcgagctgaaggactgccagccggacaaggtgtacctgggaggcctggacgtgtgtggtgaggacggccagttcacctactgctggcacgatgacatcatgcaagccgtcttccacatcgccaccctgatgcccaccaaggacgtggacaagcaccgctgcgacaagaagcgccacctgggcaacgactttgtgtccattgtctacaatgactccggtgaggacttcaagcttggcaccatcaaggcagcaaccagcgtcaccctcttcctggaggtgggctgggtcggccagtgtcacagcacggtccggggccagttcaactttgtccacgtgatcgtcaccccgctggactacgagtgcaacctggtgtccctgcagtgcaggaaagacatggagggccttgtggacaccagcgtggccaagatcgtgtctgaccgcaacctgcccttcgtggcccgccagatggccctgcacgcaaatatggcctcacaggtgcatcatagccgctccaaccccaccgatatctacccctccaagtggattgcccggctccgccacatcaagcggctccgccagcgggtagggaatatggggctccctcagcggggtgtgctggctgcccaagctgtggggcggatctgcgaggaagccgcctactccaaccccagcctacctctggtgcaccctccgtcccatagcaaagcccctgcacagactccagccgagcccacacctggctatgaggtgggccagcggaagcgcctcatctcctcggtggaggacttcaccgagtttgtgtga

SEQ ID NO: 1724 - DNA, 5407 bp, Homo sapiens
  SIMILAR (1)..(4983): 821254mologous to Homo sapiens tuberin,accession number AC005600,Smith-Waterman Score=6602.
atggccaaaccaacaagcaaagattcaggcttgaaggagaagtttaagattctgttgggactgggaacaccgaggccaaatcccaggtctgcagagggtaaacagacggagtttatcatcaccgcggaaatactgagagaactgagcatggaatgtggcctcaacaatcgcatccggatgatagggcagatttgtgaagtcgcaaaaaccaagaaatttgaagagcacgcagtggaagcactctggaaggcggtcgcggatctgttgcagccggagcggacgctggaggcccggcacgcggtgctggctctgctgaaggccatcgtgcaggggcagggcgagcgtttgggggtcctcagagccctcttctttaaggtcatccaaggaattacccttccaacgaaagaccttcacgaaaaggctggaggttttcaaggccctcacagacaatgggagacacatcacctacttggaggaagagctggctgactttgtcctgcagtggatggatgttggcttgtcctcggaattccttctggtgctggtgaactttggtcaaattcaataagcttgttaccctcgacgaagtacaatcgcaaaggaatgggttcaagatgatctgtctgcttgtgcgtccggaccgcgtcctcttgtggacatagaaggtctcccttgcaaggttgctggacgccgtgggtcttgctaacaactgcctggccggctgagagcctcccgctgttcatcgttaccctctgtcgcaccatcaacgtcaaggagctctgcgagccttgctggaagctgatgcggaacctccttggcacccacctgggccacagcgccatctacaacatgtgccacctcatggaggacagagcctacatggaggacgcgcccctgctgagaggagccgtgttttttgtgggcatggctctctggggagcccaccggctctattctctcaggaagtcgccgacatctgtgtttccatcattttaccaggccatggcatgtccgaacgaggtggtgtcctatgagatcgtcctgtccatcaccaggctcatcaagaagtataggaaggagctccaggtggtggcgtgggacattctgctgaacatcatcgaacggctccttcaacagctccagaccttggacagcccggagctcaggaccatcgtccatgacctgttgaccacggtggaggagctgtgtgaccagaacgagttccacgggtctcaggagagatactttgaactggtggagagatgtgcggaccagaggcctgagtcctccctcctgaacctgatctcctatagagcgcagtccatccacccggccaaggacggctggattcagaacctgcaggcgctgatggagagattcttcaggagcgagtcccgaggcgccgtgcgcatcaaggtgctggacgtgctgtcctttgtgctgctcatcaacaggcagttctatgaggaggagctgattaactcagtggtcatctcgcagctctcccacatccccgaggataaagaccaccaggtccgaaagctggccacccagttgctggtggacctggcagagggctgccacacacaccacttcaacagcctgctggacatcatcgagaaggtgatggcccgctccctctccccacccccggagctggaagaaagggatgtggccgcatactcggcctccttggaggatgtgaagacagccgtcctggggcttctggtcatccttcagaccaagctgtacaccctgcctgcaagccacgccacgcgtgtgtatgagatgctggtcagccacattcagctccactacaagcacagctacaccctgccaatcgcgagcagcatccggctgcaggcctttgacttcctgtttctgctgcgggccgactcactgcaccgcctgggcctgcccaacaaggatggagtcgtgcggttcagcccctactgcgtctgcgactacatggagccagagagaggctctgagaagaagaccagcggccccctttctcctcccacagggcctcctggcccggcgcctgcaggccccgccgtgcggctggggtccgtgccctactccctgctcttccgcgtcctgctgcagtgcttgaagcaggagtctgactggaaggtgctgaagctggttctgggcaggctgcctgagtccctgcgctataaagtgctcatctttacttccccttgcagtgtggaccagctgtgctctgctctctgctccatgctttcaggcccaaagacactggagcggctccgaggcgccccagaaggcttctccagaactgacttgcacctggccgtggttccagtgctgacagcattaatctcttaccataactacctggacaaaaccaaacagcgcgagatggtctactgcctggagcagggcctcatccaccgctgtgccagacagtgcgtcgtggccttgtccatctgcagcgtggagatgcctgacatcatcatcaaggcgctgcctgttctggtggtgaagctcacgcacatctcagccacagccagcatggccgtcccactgctggagttcctgtccactctggccaggctgccgcacctctacaggaactttgccgcggagcagtatgccagtgtgttcgccatctccctgccgtacaccaacccctccaagtttaatcagtacatcgtgtgtctggcccatcacgtcatagccatgtggttcatcaggtgccgcctgcccttccggaaggattttgtccctttcatcactaagggcctgcggtccaatgtcctcttgtcttttgatgacacccccgagaaggacagcttcagggcccggagtactagtctcaacgagagacccaagagtctgaggatagccagaccccccaaacaaggcttgaataactctccacccgtgaaagaattcaaggagagctctgcagccgaggccttccggtgccgcagcatcagtgtgtctgaacatgtggtccgcagcaggatacagacgtccctcaccagtgccagcttggggtctgcagatgagaactccgtggcccaggctgacgatagcctgaaaaacctccacctggagctcacggaaacctgtctggacatgatggctcgatacgtcttctccaacttcacggctgtcccgaagaggtctcctgtgggcgagttcctcctagcgggtggcaggaccaaaacctggctggttgggaacaagcttgtcactgtgacgacaagcgtgggaaccgggacccggtcgttactaggcctggactcgggggagctgcagtccggcccggagtcgagctccagccccggggtgcatgtgagacagaccaaggaggcgccggccaagctggagtcccaggctgggcagcaggtgtcccgtggggcccgggatcgggtccgttccatgtcggggggccatggtcttcgagttggcgccctggacgtgccggcctcccagttcctgggcagtgccacttctccaggaccacggactgcaccagccgcgaaacctgagaaggcctcagctggcacccgggttcctgtgcaggagaagacgaacctggcggcctatgtgcccctgctgacccagggctgggcggagatcctggtccggaggcccacagggaacaccagctggctgatgagcctggagaacccgctcagccctttctcctcggacatcaacaacatgcccctgcaggagctgtctaacgccctcatggcggctgagcgcttcaaggagcaccgggacacagccctgtacaagtcactgtcggtgccggcagccagcacggccaaaccccctcctctgcctcgctccaacacagactccgccgtggtcatggaggagggaagtccgggcgaggttcctgtgctggtggagcccccagggttggaggacgttgaggcagcgctaggcatggacaggcgcacggatgcctacagcaggtcgtcctcagtctccagccaggaggagaagtcgctccacgcggaggagctggttggcaggggcatccccatcgagcgagtcgtctcctcggagggtggccggccctctgtggacctctccttccagccctcgcagcccctgagcaagtccagctcctctccccgagctgcagactctgcaggacatcctcgggggaccctggggacaaggccgacgtgggccggctgagccctgaggttaaggcccggtcacagtcagggaccctggacggggaaagtgctgcctggtcggcctcgggcgaagacagtcggggccagcccgagggtcccttgccttccagctccccccgctcgcccagtggcctccggccccgaggttacaccatctccgactcggccccatcacgcaggggcaagagagtagagagggacgccttaaagagcagagccacagcctccaatgcagagaaagtgccaggcatcaaccccagtttcgtgttcctgcagctctaccattcccccttctttggcgacgagtcaaacaagccaatcctgctgcccaatgagtcacagtcctttgagcggtcggtgcagctcctcgaccagatcccatcatatcgacacccacaagatcgccgtcctgtatgttggagaaggccagagcaacagcgaggctcgccatcctgtccaatgagcatggctcctacaggtacacggagttcctgacgggcctgggccggcttcatcgagctgaaaggactgccagccggacaaggtgttacctggggaggcctgggacgtgttgtgggtgaggacgggccagtttcaccttacttgcttgggcacgattgacattcatggcaagccgtcttccacatcgccaccctgatgcccaccaaggacgtggacaagcaccgctgcgacaagaaagcgccacctgggcaacgactttgtgtccattgtctacaatgactccggtgaggacttcaagcttggcaccatcaagggccagttcaattttgttccacgtgattcgtcaccccgctggaattacggagtgcaacctgggtgttccctggcagtgcaggaaagacatggagggccttgtggacaccagcgtggccaagatcgtgtctgaccgcaacctgccctttgtggcccgccagatggccctgcacgcaaatatggcctcacaggtgcatcatagccgctccaaccccaccgatatctacccctccaagtggattgcccggctccgccacatcaagcggctccgccagcggatctgcgaggaagccgcctactccaaccccagcctacctctggtgcaccctccgtcccatagcaaagcccctgcacagactccagccgagcccacacctggctatgaggtgggccagcggaagcgcctcatctcctcggtggaggacttcaccgagtttgtgtga

SEQ ID NO: 1725 - DNA, 5646 bp, Homo sapiens
  SIMILAR (19)..(5469): 921254mologous to Homo sapiens tuberin,accession number L48546,Smith-Waterman Score=8407.
ggtgcgtcctggtccaccatggccaaaccaacaagcaaagattcaggcttgaaggagaagtttaagattctgttgggactgggaacaccgaggccaaatcccaggtctgcagagggtaaacagacggagtttatcatcaccgcggaaatactgagagaactgagcatggaatgtggcctcaacaatcgcatccggatgatagggcagatttgtgaagtcgcaaaaaccaagaaatttgaagagcacgcagtggaagcactctggaaggcggtcgcggatctgttgcagccggagcggacgctggaggcccggcacgcggtgctggctctgctgaaggccatcgtgcaggggcagggcgagcgtttgggggtcctcagagccctcttctttaaggtcatcaaggattacccttccaacgaagaccttcacgaaaggctggaggttttcaaggccctcacagacaatgggagacacatcacctacttggaggaagagctggctgactttgtcctgcagtggatggatgttggcttgtcctcggaattccttctggtgctggtgaacttggtcaaattcaatagctgttacctcgacgagtacatcgcaaggatggttcagatgatctgtctgctgtgcgtccggaccgcgtcctctgtggacatagaggtctccctgcaggtgctggacgccgtggtctgctacaactgcctgccggctgagagcctcccgctgttcatcgttaccctctgtcgcaccatcaacgtcaaggagctctgcgagccttgctggaagctgatgcggaacctccttggcacccacctgggccacagcgccatctacaacatgtgccacctcatggaggacagagcctacatggaggacgcgcccctgctgagaggagccgtgttttttgtgggcatggctctctggggagcccaccggctctattctctcaggaactcgccgacatctgtgtttccatcattttaccaggccatggcatgtccgaacgaggtggtgtcctatgagatcgtcctgtccatcaccaggctcatcaagaagtataggaaggagctccaggtggtggcgtgggacattctgctgaacatcatcgaacggctccttcaacagctccagaccttggacagcccggagctcaggaccatcgtccatgacctgttgaccacggtggaggagctgtgtgaccagaacgagttccacgggtctcaggagagatactttgaactggtggagagatgtgcggaccagaggcctgagtcctccctcctgaacctgatctcctatagagcgcagtccatccacccggccaaggacggctggattcagaacctgcaggcgctgatggagagattcttcaggagcgagtcccgaggcgccgtgcgcatcaaggtgctggacgtgctgtcctttgtgctgctcatcaacaggcagttctatgaggaggagctgattaactcagtggtcatctcgcagctctcccacatccccgaggataaagaccaccaggtccgaaagctggccacccagttgctggtggacctggcagagggctgccacacacaccacttcaacagcctgctggacatcatcgagaaggtgatggcccgctccctctccccacccccggagctggaagaaagggatgtggccgcatactcggcctccttggaggatgtgaagacagccgtcctggggcttctggtcatccttcagaccaagctgtacaccctgcctgcaagccacgccacgcgtgtgtatgagatgctggtcagccacattcagctccactacaagcacagctacaccctgccaatcgcgagcagcatccggctgcaggcctttgacttcctgtttctgctgcgggccgactcactgcaccgcctgggcctgcccaacaaggatggagtcgtgcggttcagcccctactgcgtctgcgactacatggagccagagagaggctctgagaagaagaccagcggccccctttctcctcccacagggcctcctggcccggcgcctgcaggccccgccgtgcggctggggtccgtgccctactccctgctcttccgcgtcctgctgcagtgcttgaagcaggagtctgactggaaggtgctgaagctggttctgggcaggctgcctgagtccctgcgctataaagtgctcatctttacttccccttgcagtgtggaccagctgtgctctgctctctgctccatgctttcaggcccaaagacactggagcggctccgaggcgccccagaaggcttctccagaactgacttgcacctggccgtggttccagtgctgacagcattaatctcttaccataactacctggacaaaaccaaacagcgcgagatggtctactgcctggagcagggcctcatccaccgctgtgccagacagtgcgtcgtggccttgtccatctgcagcgtggagatgcctgacatcatcatcaaggcgctgcctgttctggtggtgaagctcacgcacatctcagccacagccagcatggccgtcccactgctggagttcctgtccactctggccaggctgccgcacctctacaggaactttgccgcggagcagtatgccagtgtgttcgccatctccctgccgtacaccaacccctccaagtttaatcagtacatcgtgtgtctggcccatcacgtcatagccatgtggttcatcaggtgccgcctgcccttccggaaggattttgtccctttcatcactaagggcctgcggtccaatgtcctcttgtcttttgatgacacccccgagaaggacagcttcagggcccggagtactagtctcaacgagagacccaagagtctgaggatagccagaccccccaaacaaggcttgaataactctccacccgtgaaagaattcaaggagagctctgcagccgaggccttccggtgccgcagcatcagtgtgtctgaacatgtggtccgcagcaggatacagacgtccctcaccagtgccagcttggggtctgcagatgagaactccgtggcccaggctgacgatagcctgaaaaacctccacctggagctcacggaaacctgtctggacatgatggctcgatacgtcttctccaacttcacggctgtcccgaagaggtctcctgtgggcgagttcctcctagcgggtggcaggaccaaaacctggctggttgggaacaagcttgtcactgtgacgacaagcgtgggaaccgggacccggtcgttactaggcctggactcgggggagctgcagtccggcccggagtcgagctccagccccggggtgcatgtgagacagaccaaggaggcgccggccaagctggagtcccaggctgggcagcaggtgtcccgtggggcccgggatcgggtccgttccatgtcggggggccatggtcttcgagttggcgccctggacgtgccggcctcccagttcctgggcagtgccacttctccaggaccacggactgcaccagccgcgaaacctgagaaggcctcagctggcacccgggttcctgtgcaggagaagacgaacctggcggcctatgtgcccctgctgacccagggctgggcggagatcctggtccggaggcccacagggaacaccagctggctgatgagcctggagaacccgctcagccctttctcctcggacatcaacaacatgcccctgcaggagctgtctaacgccctcatggcggctgagcgcttcaaggagcaccgggacacagccctgtacaagtcactgtcggtgccggcagccagcacggccaaaccccctcctctgcctcgctccaacacagtggcctctttctcctccctgtaccagtccagctgccaaggacagctgcacaggagcgtttcctgggcagactccgccgtggtcatggaggagggaagtccgggcgaggttcctgtgctggtggagcccccagggttggaggacgttgaggcagcgctaggcatggacaggcgcacggatgcctacagcaggtcgtcctcagtctccagccaggaggagaagtcgctccacgcggaggagctggttggcaggggcatccccatcgagcgagtcgtctcctcggagggtggccggccctctgtggacctctccttccagccctcgcagcccctgagcaagtccagctcctctcccgagctgcagactctgcaggacatcctcggggaccctggggacaaggccgacgtgggccggctgagccctgaggttaaggcccggtcacagtcagggaccctggacggggaaagtgctgcctggtcggcctcgggcgaagacagtcggggccagcccgagggtcccttgccttccagctccccccgctcgcccagtggcctccggccccgaggttacaccatctccgactcggccccatcacgcaggggcaagagagtagagagggacgccttaaagagcagagccacagcctccaatgcagagaaagtgccaggcatcaaccccagtttcgtgttcctgcagctctaccattcccccttctttggcgacgagtcaaacaagccaatcctgctgcccaatgagtcacagtcctttgagcggtcggtgcagctcctcgaccagatcccatcatacgacacccacaagatcgccgtcctgtatgttggagaaggccagagcaacagcgagctcgccatcctgtccaatgagcatggctcctacaggtacacggagttcctgacgggcctgggccggctcatcgagctgaaggactgccagccggacaaggtgtacctgggaggcctggacgtgtgtggtgaggacggccagttcacctactgctggcacgatgacatcatgcaagccgtcttccacatcgccaccttgatgccccaccaaggacgtggacaagcaccgctgcgacaagaagcgccacctgggcaacgacttgtggtccattgtctacaattaactccggtgaggactttcaagcttggcaccaatcagggcccagttaacctttggtcaacgtgatcgtcaaccccgctgggactacgagtgcaaacctggtgcccctgccagtgcaggaaaagacatggaaggccttgtggaaaaccaagcgtggcccaaaaatcgtgtctgaccggcaaccttgcccttcgtggccccgccagatgcctcctgcacgcaaatatggcctcacaggtgcatcattagccgctccaaaccccaaccgatatctaccccttccaagtggattgcccggctccgcccaatccaaacggctccgccagcggattctggcgaggaagccgccctactcccaaccccagccttaccttttgtggcaccctccgtcccatagcaaagcccctgcacagactccagccgagcccacacctggctatgaggtgggccagcggaacgccctcaatctcctcggtggaggacttcaccgagtttgtgtgaggccggggccctccctcctgcactggccttggacggtattgcctgtcagtgaaataaataaagtcctgaccccagtgcacagacatagaggcgcatccaaaaaaaactacaaaaaagatcaaaaaaacactgtttaaagaaaaatcctgaattaccgggcggcgtttgtgaatg

SEQ ID NO: 1726 - DNA, 474 bp, Homo sapiens
ccaccgtgtctcattcatcactgctgtctgctagagcccttcctctcagcccccatgttgggagaggggagtggattcttgctgctggtatgagactccctgggacctagaggctggcaaatgtttaaaatcaccacgtgtaagaggcagccaagtcagctctgccaactgctaggggagttgggaaagagtgggtgtgtgtccgcatcccctctgtaggaaaaagaacttagtagcttgctgctccctcaccaccccccaccaggttcaagaccctttttctgggagacctacaggatgttggctgcttgcagactggtcaatgggggatgacggtggggaggttgccagatgtgagacttgagtagcatttgtacacatggccctgtattgtccttgaagaacatcaataaaatatatggttttaaattgcaaaaaaaaaaaaaaaaaaaaaaaaaaaggtcgtatcgatgt

SEQ ID NO: 1727 - DNA, 5687 bp, Homo sapiens
  SIMILAR (5331)..(2014): 1001254mologous to Homo sapiens platelet-derived growth factor receptor,accession number J03278,Smith-Waterman Score=5765.
agcggccgccctttttttttttttttgagaagcaccaggtttaatattaaaattctttcccttaaaaaaaaagtacacagatagaaaaagttaagcagcatacgaaatagcatttctgctgtataaatgtgagttaacgtgaggcctaaaaaatatttgtaaacctaggtgattatatctttcggtaccgtattgaggaacccactctcccttccttgggaccaactctgggggatcccagggaaggtaaggtggcaaacctgcattggcagggtttggtgccccagaggggtttgaagcttccctgcaccccctttcccaaaccccttcccgtgcggggggcggtcttgggcttacaacccttgactccccctggcaccctcccaaatcccactgggttgcggggtacaatgaggatgtcactggctaaggtctggggcagttgacaaaaccataacccccatggaggcgctgcctcagggatggggcaagctggtgggtgagggggcaaacctccaaagcgcccaccgtttcacatccttactgggggtaccatactgaaggcttcctgtctttaacaagacataactgtcctcaactgtccaattctgtcttcgaacgaaaaacctcggcacaggtggctggagtgggtgggctgcaggaggtgatctcatttgcccctctttgtcccttttgccccaggattacccccggaggtcatccgtgggtagtgaaagaggtcccgtggtcttcccatgtccctggggccagctgctgggggctttccaaggacaccggctgtcactctaagtcaaggccctgtgcagctgtgttcttgaaaacttgctgggggccctggggaaaggggcatggttccctgaatcccccagagtgtgatgtgtgatctggaatctccccaggagcccagctgaccccccaggatggaagtttagggtatatggccttgacttcatctggacaaatgtgaaaccacctggaatactactagaatgttagtgctggcaaggcactcagagttaataagtccgtacttagtcattttttgaaggggaaactgaggcccagagagggtgagggattcctccaaagcctcatagcaggtccaatgcagagccagggccatatactggcacacacacgtggccactccacactggcacatttacattctcatcacagatgcagggcccgtctggccttctagactttggtggatggattaagactgagggtgataaagaaaaagccccaggactgatgggcgtgaaggacagggacacaggcacttgctatggctgcgtgtgctccaagtgccctgggcaagggctgcaggctgggggtgtcctgtacttggctcagcctccagcattaattaggctgcctaatggccccagaccagctcgggccagggaacgcagggactggcatcatagggaggagactggctttcttctggatgaggcaacactgctcaaggctaggccctagctcagccagcagccagggaggctagggtctcttccctagctcctgggtggataaaaagtgcgaggagagagctatgattccttgaggggtagctggctgaacagaaaaaagttaatttaccacctcagtaactccaagaatcttcccagggagggattcggtctccccacctgtcagccagggagagaatcctagattctgggtcatcaagcctaactttcccatcttacatatgggaaaactgagttccctgggggaaccctggctcagagtcagttggcctccctggaggcagagggctggtcacggcccctgcagttttcttgcctcctaagccagccccagggtttggggcacaacacgtcaggagcagaaagcttccagaaggggacagctgataagggcagcctggctgacaggaagcccggtcaggccaggccaggagatgctgggtgctggcagggggggagcttcaggcagggcagggtaggggccagccccctacaggaagctatcctctgcttccgcccgaggcgcagggcaccccgaatccggcaactgttccagctctggctccggctccacctggagctcaagctggggctctggctctggttcgtcctggggctccagggggctgtcacaggagatggttgaggaggtgttgacttcattcagggtggagctggctaggctgggggaaccctccagtgggccctcgtcagcaacctcgggtttggggtcaggcagggggatgatatagtcgttgtcaccctcattgggctgcacggcagtatagaggacggagctggtgtccaggggagatcggaggccatggaacccaggcaagcgggcctgggaccgaaggatggctgggtggtcactcctcagaaactcctcatccacctgctggtacttctttttgtaaccttcgcccaacagtctctcgagaagcagcaccagctgggagaaggggggccgaatctcaaacttctcttcccagcacttctgcatgatctcatagatctcgtcggaggcatgggcaggctgggccatgcggtaaccccgtttgatggcattgtagaactgctcgttcatgggcagctctgggtaaggggtgccacccaaggtgaagatctcccagagcaggatcccgaaggaccacacgtcgctcagggtggtgtagaggctgttgaagatgctctccggagccatccactttaaaggcaaaaaggtgctgcctttggagatgtaattcgagtcccgcatgatgtctcgagccaggccaaagtcacagatcttgaccagcttgccttcacagatgagcacgttcctagccgccaggtctctgtggacgcagttcttggaggccagaaactccatgccattggccacctggtagctgaagcccacgaggtccatgtagcttagcactggagactcgttgatcaaagttgctcggcaggtcctctcaggggcagagggaacgtagttatcgtaaggggccatgtagttggaggactcgatgtctgcatatttgacgtctcctttcatgtccagcatgggcacatagtccaccgactcgtccttgctcatgtccatgtagccaccgtcgctctccccggtcaaggacacatggctgggcagggggagcccaacgggcagagcattgctgtagagctccgcgctgggcgggcggcgcttgtcggagtggtgctgcaggaaggtgtgtttgttgcggtgcaggtagtccaccaggtctccgtagcggcagtactcagtgatgatatagatgggtcctcctttggtgcaggcccccaacaggttgaccacgttcaggtggggcccaaggtgactcatgatcttcagctccgacataagggcttgcttctcactgctgcgggctgtggatttaagcatcttgacggccactttcatcgtggcctgagaatggctcaggccatgagccgtggcctccaccacctgcccaaaggccccagagccgagggtgcgtcccagcacaagctggtcccgcggcagctcccacgtggagtcatagggcagctgcatggggtccacgtagatgtactcatggccgtcagagctcacagactcaatcaccttccatcggatctcgtaacgtggcttcttctgccaaagcatgatgaggatgataagggagatgatggtgagcaccaccagggccaggatggctgagatcaccaccaccttaaagggcaaggagtgtggcaccacgatgacctcctgcgtgtcctggcccacagcgttgcgcagcgtgcagcgcaccgacagtggccgatccacgtgctgcagacgcagtgtgctcaccacctcaaactcctgctcctcctcccagtacgtcacgttagtctccagctggctctcctcttcggaactgttccccagcagcgtgggcggcagctcacgtggacaccttttgaggtctctgcaggcagaccagatgatgttcggctggggcatgccccggccacgacagcggactgtctgttccccactgtcagggtggctctcacttagctccagcactcggacagggacattgatctgtagctggaaggagagctggacctcagcatcctcatggaaggcccgcatggtgtagtggccagcctctgccaccttcacgcgaaccagtgtcagctctgacacataccgggtctccgacacgttgcgcgtggacagggcgatttcgccagcgctggagtcgcccagggtgcggttgtctttgaaccacaggacagtgggcggtgggtaggcctcgaacactacctgcagtgtccggctccgatgcagctcagcaaattgtagtgtgcccacctctcccaggagccgcacgtagccgctctcaaccacggtgatgttgatggccttttcatcctgatggtcattcacactctccgtcacattgcaggtgtaggtccccgagtcttctaactcggcactggggatgtgcaggatggagcggatgtggtaaggcatatccaagaggaagtcagtcaccggctccaccagccgcccactttctttgcgggggtatgtccactcgaagttgaccacctcattcccgatcacaatgcacatgagggtgatgttctcaccctggcggaccacagtctgcactgcgttcacagagacgttgatggatgacacctggagtctgtagacatagtaggcatcagaatccacctccctgtccccaatggtggttttgcagatgtagcttctgtcctcaaagataccagaaaagccacgttggtgatcataggggacaggcagtgcaacgtcccctttcttctcgtgcagtgtcaccaccagctgtgggtctgttactcggcatggaatggtgatctcagttatttccgtgagaaagatgaatagttcctcggcatcattagggaggaagcccacggtgggatctggcacaaagatgtagagccgtttccgctcatcggtctccagtccacgggagtcattgtgggtgcaaaagtattctcccgtgtctagcccagtgaggttggtcagtgtgagcacgctggagaaggtgccatcctgggccttggccatttcctgtgggggctcctgggacatccgttcccacaccaccggagctgaacccgagcaggtcagaacgaaggtgctggagacattgaggacaagctctggccccgggggtgtgacgaccaggccctgagagatctgtggttccagaagtaacaggagagacagcaacagcagctcgcctttgagggccagagctggcatcgcacccggaagccgcatggtgtccttgctgctgatggcttctggtgtgggcacagttccaggctctggacagtcaccccctccaggaagtcctccttactgccctctcccagttatcagaaagactgctggtcccagagtgggtaacagctgagtagaaggacaggcaggactggtgcaggctcctgaaggctcaggagaacagagggatggaggaagggggctgctgtaggggagaggagcgcccagcttcgcctcactccccaagcatccttcgggaggagcagagccgccagaggggccgccctgggtctggctgtctgcgttgggcagggcgagcacaggctcgtgctgggcagcagggctgaggggcc

SEQ ID NO: 1728 - DNA, 529 bp, Homo sapiens
ttttttttttaaaaccatatattttattgatgttcttcaaggacaatacagggccatgtgtacaaatgctactcaagtctcacatctggcaacctccccaccgtcatcccccattgagcagtctgcaagcagccaacatcctgtaggtctccctgttgcccttccccaggatgtcaggcctcaccgtgctgagccttcaggaggctggaaatagcagggctggcttctaagcttgagctctggggccaggaaagagtcaagggcaaaattgcccacgatcttcccctcctccctctccctcccattgcttaagtatggccagaattgtgggtgaaaatgcccccagcgactcctccattgaggcagcctaggcttcccctcttcagccatctctatcacattctttatttccaaatgacctgccccaccaaccaccaagatggcagagtgaccattttgcagggagtgtgaatcagtgcacagacggcagtgacaaggtgcccctgatggcatgaatcttgtcatcctg

SEQ ID NO: 1729 - DNA, 678 bp, Homo sapiens
ccaaacacttggccatatgtctgacaattcatcctgacattttaaaaaacaatagtaataataataataataataataataataatgaaaaaagacaaagataccacagttctgaagccaaagaccagaatgctgccattctcaggcacagcccttagtgcatagagagttggaggcaaaaaattttttttaggaaaggggaatgaaaaaaaaatcccagttgtttaaaccatgcagggttctttaaataaaccactccccagcccctaacctagggcagcaactaagatcccaaatcctttccctctcccccaccccaacctgctcctcagaccacaccacactccatcctgtccacaaaggcaatgaccccagtcaccatccaggccctgttttccaggatagtgaggtatttatgtgactgcagaagggactctttgacccaaagtttttgaagagaagaaaagagtcagacccccagaacaggacatatttcatacaggcctatctcataaccctggccccagccagaggccctgcctaagtgagctccgcaacccacccctttggggacaaggtaagcattggccaatgagatcctctctagcatgcggtgggtaaacaagtgaacttttgcagaaaaggacagcaggagaaaccccgatcactaggctccat

SEQ ID NO: 1730 - DNA, 373 bp, Homo sapiens
  SIMILAR (115)..(372): 751254mologous to Mus musculus putative,accession number AK002905,Smith-Waterman Score=328.
gagaagttccgccacaacatcgcctacttcccacagatcgtctcagtggctgcccgcatgctcaaggacccccgttcttatccggggttggccctgacctctctctacccacagaacacgaccctggacctcctagaccgggggctgcaggtccatgtggtggtggacgcctgctcctcacgcagccaggtggaccggctggtggctctggcccgcatgagacagagtggtgccttcctctccaccagcgaagggctcattctgcagcttgtgggcgatgccgtccacccccagttcaaggagatccagaaactcatcaaggagcccgccccagacagcggactgctgggcctcttccaaggccagaactccc

SEQ ID NO: 1731 - DNA, 1168 bp, Homo sapiens
  SIMILAR (257)..(490): 541254mologous to Mus musculus putative,accession number AK002905,Smith-Waterman Score=187.
gtggtggaattcccagccctgggaagcccgcaagaggcctcagcggtggccgtccgagcgccgagaggtgagggtgcccccgccttatcctgcttaggggccgttccgggctcgaacccggcaccttccggaaaatggcggctgccaggcccagcctgggccgagtcctcccaggattcctctgtcctgttcctgtgtgacatgcaggagaagttccgccacaacatcgcctacttcccacagatcgtctcagtgggctgcccgcatgctcaaggtggcccggctgcttgaggtgccagtcatgctgacggagcaagtacccacaaggcctgggccccacggtgcccgaagctggggactgagggccttcggccgcttggcaaaagacctgcttcagcatggttgcctgcccttgcagcaggagctggacagtcggccccagctgcgctctgtgctgctctgtggcattgaggcacaggcctgcatcttggacccccgttcttatccggggttggccctgacctctctctacccacagaacacgaccctgggacctcctagaccgggggctgcaggtccatgtggtggtggacgcctgctcctcacgcagccaggtggaccggctggtggctctggcccgcatgagacagagtggtgccttcctctccaccagcgaagggctcattctcaagcttgtgggcgatgccgtccaccccccagttcaaggagatcccagaaactcatcaaggagcccgccccagacagcggactgctgggcctcttccaaggccagaactccctccctccactgaactccaaccctgccttgagggaagaccaccctcctgttcacccgggacctcagtgggaagcccgtttccccccatccctgggattcccaagagtgggtgcgattccaccagggagttgccgcccccttgtggggggggggcagtggtgctgccttcccattggacagctgctcccggaaatgcaaatgagactcctggaaactgggtgggaaatgggctgagccaagatggaggcggggctcggccccgggccacttacacggagcgggaaggggaggggaagaagagtctcagactgtgggacacgaactcgcagaataaacatatatgtggctgtgaaaaaaaaaaaaaaaaaa

SEQ ID NO: 1732 - DNA, 792 bp, Homo sapiens
  SIMILAR (297)..(329): 901254mologous to Mus musculus alpha-KAP,accession number X87142,Smith-Waterman Score=58.
atgggggtgctgccatcctatttctgggatgaggaagcagaagctcaggaaggtatttgcttaagtctgaagcagcggatgcctgtgggcagggctggacattcaggccatttcctggctgatgccacttccagggctctggccaggaggagggaagagtgggggaaacaagaagagcgtggtgtgaaggaatcctcagagagcaccaacaccacctcgaggatgaagacaccaaaggaagatgtgcgacccggcatgacagccttcgaacctgaggccctggggaacctggttgagggccggacttccatcgattctattttgaaaaccgtgagcaattccttctctcttggtgcctgttgtctgctctcgttccatgtcctgctggatggcacagcaggccgggggtcagatagggatgaacaaaacgcacacagtgtggtcccggaacagcaagcccgtgcacaccaccatcctgaatcccacatccacctgatgggcgacgagtcagcctgcatcgcctacatccgcacacgcagtacctggacgctggcggcatcccacgcaccgcccagtcggagagacccgtgtctggcaccgccgggatggcaaatggcagatcgtccacttcacagatctggggcgccctccgtcctgccccactcccaagacactgacactgagatgaatcaagaaagatacatgaatgcttccatctccttcccgaagcccccacactctaccagtcagcaagtcctgttcattcaacctggtgaagaacgagagatctga

SEQ ID NO: 1733 - DNA, 126 bp, Homo sapiens
  SIMILAR (103)..(126): 1001254mologous to Gallus gallus calcium/calmodulin-dependent kinase type II beta subunit,accession number AF085249,Smith- Waterman Score=42.
tccgactacatgacagcattcagaggagggacaccactacctgatcttcgaccttcactgtatccagcagatcctggaggctgtgctgcactgccaccagagggggtggtgcaccgggacctgaag

SEQ ID NO: 1734 - DNA, 370 bp, Homo sapiens
  SIMILAR (247)..(312): 721254mologous to Homo sapiens calcium/calmodulin-dependent protein kinase II alpha subunit,accession number AF145710,Smith- Waterman Score=93.
tcactgtatccagcagatcctggaggctgtgctgcactgccaccagagggggtggtgcaccgggacctgaaggccaggggagaagaaaaaccagactctaggccgtgcagttctcctttcttttacctgaaggagattgcagagtctaggactgcaccagctgcacagccttgctccttcagcagggacttcatggatctccctgctgatcctcatggtatcagtggctgggtttgcagggactccggatatctctccccagaagtgctgcggaaggacccgtacgggaagcctgggacctgtgggcttgtgggggttgaaggttctctggtcctcttccaggggtcatcctgtacatcctgctggttgg

SEQ ID NO: 1735 - DNA, 1596 bp, Homo sapiens
  SIMILAR (1)..(1467): 1001254mologous to Homo sapiens calcium/calmodulin-dependent protein kinase II alpha-B subunit,accession number AF145711,Smith- Waterman Score=2583.
atggctaccatcacctgcacccgcttcacggaagagtaccagctcttcgaggaattgggcaagggagccttctcggtggtgcgaaggtgtgtgaaggtgctggctggccaggagtatgctgccaagatcatcaacacaaagaagctgtcagccagagaccatcagaagctggagcgtgaagcccgcatctgccgcctgctgaagcaccccaacatcgtccgactacatgacagcatctcagaggagggacaccactacctgatcttcgacctggtcactggtggggaactgtttgaagatatcgtggcccgggagtattacagtgaggcggatgccagtcactgtatccagcagatcctggaggctgtgctgcactgccaccagatgggggtggtgcaccgggacctgaagcctgagaatctgttgctggcctccaagctcaagggtgccgcagtgaagctggcagactttggcctggccatagaggtggagggggagcagcaggcatggtttgggtttgcagggactcctggatatctctccccagaagtgctgcggaaggacccgtacgggaagcctgtggacctgtgggcttgtggggtcatcctgtacatcctgctggttgggtaccccccgttctgggatgaggaccagcaccgcctgtaccagcagatcaaagccggcgcctatgatttcccatcgccggaatgggacactgtcaccccggaagccaaggatctgatcaataagatgctgaccattaacccatccaaacgcatcacagctgccgaagcccttaagcacccctggatctcgcaccgctccaccgtggcatcctgcatgcacagacaggagaccgtggactgcctgaagaagttcaatgccaggaggaaactgaagggagccattctcaccacgatgctggccaccaggaacttctccggagggaagagtgggggaaacaagaagagcgatggtgtgaagaaaagaaagtccagttccagcgttcagttaatggaatcctcagagagcaccaacaccaccatcgaggatgaagacaccaaagtgcggaaacaggaaattataaaagtgacagagcagctgattgaagccataagcaatggaggttttgagtcctacacgaagatgtgcgaccctggcatgacagccttcgaacctgaggccctggggaacctggttgagggcctggacttccatcgattctattttgaaaacctgtggtcccggaacagcaagcccgtgcacaccaccatcctgaatccccacatccacctgatgggcgacgagtcagcctgcatcgcctacatccgcatcacgcagtacctggacgctggcggcatcccacgcaccgcccagtcggaggagacccgtgtctggcaccgccgggacggcaaatggcagatcgtccacttccacagatctggggcgccctccgtcctgccccactcccaagacactgacactgagatgaatcaagaaagatacatgaatgcttccatctccttcccgaagcccccacactctaccagtcagcaagtcctgttcattcaacctggtgaagaacgagagatctga

SEQ ID NO: 1736 - DNA, 4890 bp, Homo sapiens
  SIMILAR (162)..(350): 1001254mologous to Homo sapiens calmodulin-dependent protein kinase II alpha,accession number AF091486,Smith-Waterman Score=316.
  misc_feature (1)...(4890): n = a,t,c or g
gaattcccgggtcgacgatttcgtgctcgtcagtcaaaccggttctctgtttgcactcggcagcacgggcatgcaagtggtccctaggttcgggagcagagcagcagcgcctcagtcctggtcccccagtcccaagcctcacctgcctgcccagcgccaggatggccaccatcacctgcacccgcttcacggaagagtaccagctcttcgaggaattgggcaagggagccttctcggtggtgcgaaggtgtgtgaaggtgctggctggccaggagtatgctgccaagatcatcaacacaaagaagctgtcagccagagaccatcagaagctggagcgtgaagcccgcatcttgccgcctgctgaagcaccccaacatcgtccgactacatgacagcatctcagaggagggacaccactacctgatcttcgacctggtcactggtggggaacttgttgaagatatcgtggcccgggagtattacagtgaggcggatgccagtcactgtatccagcacatcctggaggctgtgctgcactgccaccagatgggggtggtgcaccgggacctgaagcctgagaatctgttgctggcctccaagctcaagggtgccgcagtgaagctggcagactttggcctggccatagaggtggagggggagcagcaggcatgcgttgggtttgcagggactcctggatatctctccccagaagtgctgcggaaggacccgtacgggaagcctgtggacctgtgggcttgtggggtcatcctgtacatcctgctggttgggtaccccccgttctgggatgaggaccagcaccgcctgtaccagcagatcaaagccggcgcctatgatttcccatcgccggaatgggacactgtcaccccggaagccaaggatctgatcaataagatgctgaccattaacccatccaaacgcatcacagctgccgaagcccttaagcacccctggatctcgcaccgctccaccgtggcatcctgcatgcacagacaggaggcccgtgggcctgcgtgaaagaagttcaatcgccaggaggaaatctgaagggagccattctctccacggatgctggcccaccaggaacttctccggagggaagagtgggggaaacaagaagagcgatggtgtgaaggaatcctcagagagcgccaacaccaccatcgaggatgaagccaccaaagtgcggaaccaggaaattataaaagtgacagagcagctgattgaagccataagcaatggagattttgagtcctacacgaagatgtgcgaccctggcatgacagccttcgaacctgaggccctggggaacctggttgagggcctggacttccatcgattctattttgaaaacctgtggtaccggaacagcaagcccgtgcacaccaccatcctgaatccccacatccacctgatgggcgacgagtcagcctgcatcgcctacatccgcatcacgccagtacctggacgctggcggcatcccacgcaccgcccagtcggaggagacccgtgtctggcaccgccgggacggcaaatggcagatcgtccacttccacagatctggggcgccctccgtcctgccccactgagggaccaggctggggtcgctgcgttgctgtgccgcacagatccactctgtccgtggagtggagctgctggttctcccaggtggattttgctggaattctcccatgtcatcaccccaccaccgtcacttctgtacctgcatcaagaaaacctgcttgttcacaaaagtcatcgcaacttcagagcgaacggccacatcttccccacctctcacccccaccctctcccctgccaggctggggcttcctcaggcatgggtgtccacagcactggccccctctccccagcctcagctgctgtccgcctgatctgtcttgggctgtaggctagaatgcccgggctggtgcccaccaggggctggggagaaggaggggtggcatgatgaggaaggcagcatccgtccgtccctctcccagacctctcctcttccagtgtccccggggaagggcagatgacactcccttccccctaagccaaccgcactgaaggagtggggagaagagcatacgccaggagcctcctgcctcaaagtgctcccctaagtcttcttcctcctgtgctgacctcagggtggtctgacccttccctcggtgtgggggatgtggccctctcaggtgcccctacttgctttctgcttccttctggtgaagtccacctccaacattaacctgcccaccccacccccgtcatccctggagaattccagctttgtcgtatctcagagagggaatctaattgtttttggggggcaaaagaaagcaacgtttaggtatcacttctacttggaccgcatgcctttttatagccaaatttctgtgtatttcgtaaatggatttcgcgttaatggatatttatgtaataactagacttctcagattattgtgagaagggtcaggttggaaggggtgtaggaagaggggtgaggggtagtttttttctgttctagttttttttttttttttttgtcatctctgaggtggaccttgtcacctgtggttattggggccaaggcggactcagctccgggngagaagggcctctctgccatttcggtcccaaggtgagctgacacaggcgttccttttgggactgtggaagcatcagatgccagcactgactcaggaacagcaagtcagggcagagaggaggagggaggctgtcaggatggaaatacctggacttttctttgcttccctcgcaaactggggtcttctctaccgaacttcccaggatttcatctcaccatatctgtgtgccgccccccagcaccccccacccacctctggggggccccgtnagcgtgtgtcttcattgcctctttcccctttggcgtctgatgacccacagcaaagccactgggaatttttactcttcatgcctcatcctgcagcctcgggttcgcattctctctttcttttcctctttccctctttccctgggattgactctgagtggaataccttggcacatccactaggatctactgtctgcactgttttctttgcatgactttatacgcagtaagtatgttgaaaacaaacaaaaagaagaaaacactcaacaaaaccaatctacatgttttggactaaaaaaaaaaaatagaggttgtattctcagtgtccgactcggaattatgttgctgcctctctgtgcttttggcctctgtgtggccgtgttttgccagcatgagatactgtcccctctggaggattttaggggaggaagagccacgtccccagggattgggaggaggctccgggtacccttgaccctcctggggtgttggttgggagcagaactgggtgagggatgtttgatccccagattttcttgagctctccccgattcacccagctgtctgctggggttctttttcttcaaagtcctgcttgcccagggcccaggtgagacagggcaacgcagggtctgcaggccaggagagatgctgcccaggcctcctggtttccaagctggtccatcactggcctctgtccttggcagagaccttgctgcccaggcccaggggcaggctcttgggctcaagggcccaagaggttttccccagtaaaggcccagtgatcccattatcccaggggcaaaaccacctgtccccttttgagctgccagtttcctaacagccatccccagttcaagggtgagggtgtggccttcaccaggggctgctgtaattaccgagcaaggtctgagctcttcttcagcctcagttccctcattggttaaaagggttctttgttcccatccagccgatgaaggagcaaacgtctggctatgtgaagcctaatttacctgcaggaactggcagggatagtcactggctggactcctgtttacttctagacctggtcaggctccatcccctcccccacctgcccctgattcccctcgtcggtgcctgtcaactgcttttcagcagtggactgcaggggaaagagcagtgatttggggtgagtaggcttcaattcccagctctgaccagacttgctgtgtgaccttgggcaagttcctttccctctttggagcttggtttccctgccagaggaaactgagctggaggagcctgaggtcctgcctttcattggctgacacacctcctgtccactgtgtcactctccaagtgccagagaagtggaggcagatcgctaccccaggctgagatggcccccactgtgaaggccacgcctgtgggtgggcagccacctggtgccaccacagggcaccagggatgatcctgatgcggcaggcaggggagactcacagaaaaatctgcccagagcctaccctcaccagacaaactctgtgctcctccaaaacatcctttagatgcaaaataataataaataataataataaataaataaataaaaatccaaacccaagtcaaaaccttggctccagcatgaaaacacgtttacaggaaagtgttctcctgggtttgtgcccaccatggtgcgaatcctgacccaaggcctcctgtctccctttcaaagggagacccttttgggggatgagtttgccagactccccgtgctgggtttctttgttaccattctgatgttggagcggccgcatatttttttttagttctttttttttttttcttttcttttttaaaaatatgtggctgtgaacttgaatgaacactgctcaaactttctgctattggggggggcgggtgggatgggaagaaggggcgtttgttttattcttggtgttttcagtacaataaatagctacaaacttctgtgcaaaaaaaaaaaaaaaaaa

SEQ ID NO: 1737 - DNA, 553 bp, Homo sapiens
  misc_feature (1)...(553): n = a,t,c or g
ccctcatgcnnnnnnnnnnnnnnnnnnnnnnnnnnnnnnnnnnnnnnnnnnnnnnnnnnnnnnnnnnnnnnnnnnnnnnnnnnnnnnnnnnnnnnnnnnnnnnnnnnnnnnnnnnnnnnnnnnnnnnnnnnnnnnnnnnnnnnnnnnnnnaaatttcaaaacattaaaatatgaatcaggaaacttcgattctggtctttttcagactttaggttattttccttggttttatatcttattaccataaatcatcttgatgctggtacctgataagattctatttgcttttctttattcatagagaccacaaacagatcgcagatccaggtttctcaaactggagcatctgcttaattttcccataaaatcagtcttattctttctgacagctctgagactcctccggccacgactaggtgctgtcctggaggaaacggtggaggacggccgcacaaaaaccaatctacctgatgaaaactccgttcccttctcgccagaaacatanaatgcgatggagctacggaattccacgacactggaatgtggtccgatn

SEQ ID NO: 1738 - DNA, 1101 bp, Homo sapiens; identical to SEQ ID NO: 74
  SIMILAR (94)..(1098): 1001254mologous to Homo sapiens dJ146H21.2 (similar to CYTOCHROME B-245 HEAVY CHAIN),accession number Z83819,Smith- Waterman Score=1798.

SEQ ID NO: 1739 - DNA, 935 bp, Homo sapiens
  SIMILAR (355)..(504): 581254mologous to Homo sapiens PRO0898,accession number AF130051,Smith-Waterman Score=120.
  misc_feature (1)...(935): n = a,t,c or g
atctttcttgaaatcaaatccaatccaatctgtattctaagaacctgctcaaatcttggttcttcaaagctttccctggtattttgcatttttgctttgaatagttccacgaaggataacttcttactccttccttcatctttctgtatcttgcatatagtaaatattaatgacttgtttgcattttgttatcctaacttggctataaagaaaatcagatgtcttcaccagtcgttcaaacttcaggtctgcctacagattcatagatggctgtggatttttataattttgtcacaaagttagtggtaactacaggttatctcagaatatcttttttggcgtataaatttttttcttttccttttttagacagtctctctctctgtcgcccaggctagagtgcagtggcgtgatcccggcttcactacaacctctgcttcctgggttcaagagattcttagcctcagcctcccgagtagctagggttacaggcgcgcaccacctccatgcccagctcttttgtatttttaagtagagacagggtttcaccatgttggtcaggctggtctcgaacttctgacttcaggcaaanttgcncgcctcggcctcccaaagtgctgggattacaggcacaagccactgcacccagccttattaccataaatcatcttgatgctggtacctgataagattctatttgcttttctttattcatagagaccacaaacagatcgcagatccaggtttctcaaactggagcatctgcttaattttcccataaaatcagtcttattctttctgacagctctgagactctccggccacgactaggtgctgtcctggaggaaacggtggaggacggccgcacaaaaaccaatctacctgatgaaaactccgttcccttctcgccagaaacataaaatgcgactggatac

SEQ ID NO: 1740 - DNA, 1653 bp, Homo sapiens
  SIMILAR (98)..(340): 581254mologous to Homo sapiens Human secreted protein, SEQ ID NO: 7871,accession number AAG03790,Smith-Waterman Score=197.
tacagattcaatagatggctgtggatttttataattttgtcacaaagttagtggtaactacaggttatctcagaatatcttttttggcgtataaatttttttcttttccttttttagacagtctctctctctgtcgcccaggctagagtgcagtggcgtgatcccggctcactacaacctctgcctcctgggttcaagagattcttaggcctcagcctcccgagtagctagggttacaggcgcgcaccacctccatgcccagctcttttgtatttttaagtagagacagggtttccacccaggttggtcaggctggtcctcgaaccttcctgaccttcaggcaaatcccgccgcctcggccctccccaaagtgcctgggattacaggcacaagcccactgcacccaccctggagtataaatttcaaaaacattaaaatatggaatcaggaaacttcgattctggtctttttcagactttaggttattttccttggttttatatctgagtataaaagtgaaaatagttattacacaagtggaaaatgttcttctgatgaacagtatacattttattttctatagatgaaagaaatggccctgccgtgatatcgttaaagaagttgcaaaaatgtaagttgaaatttttcttaccatccacaataatgtttcttttggcctttggcgtatatatattacattaatcctaagaaagctgttttcctgtaaaataacttagtgtataatttttagaaggtaaatttaacattctaagaagcctcacgaaggaagaaaatgtttttaaggcaatattttttaggtaggtaatgaatagggatggggaaaaataggcttgacaaaataaactcctgtttacagggttaagggacatataccattagggtcttaatttggttagctccccaacttctcaaatctcttaagtcctaataatagataatcttaagattgcctctattgtaagaatgcttacaaactttataggttacaactaattatttcaatacatgatccatgaagctggctcatttatataatctgctatttatttgggaaagatatgtttcactttttcaggtttattataaaagttcctataacaaggtaagaagagcagtattacaaaacatttcaacaaccagcttaagaaaccctgaatagtttattacaggtatataaagtagaatactattaatatgtaacaggtatttggacagtaaaacaataaaaaagtccaattaaccctgggtagtgatgtttcctaaaattttgtgattctctagatcaaagagtgtagacatttggtattacaaaaagattcccaacaaaatacgttgtgtagccagctttttagattcaaaagttatggataatcgtaattcataacaactctaagtattccacattagaactacataaacaaggtctagtcaatcacctgtctgtatggtagtgtatcaggttttacatctaacaatacgtggaagaaaaaaattccaatgggctctattgtttaataaacatactatttacatcacactcagagtctcttattaaccggtccatcaataaaacaactgccttgacccctcttgccacctcctcccatccgccctcgtagtttctgttgtgaa

SEQ ID NO: 1741 - DNA, 440 bp, Homo sapiens
  SIMILAR (1)..(303): 961254mologous to Homo sapiens HSPC118,accession number AF161467,Smith-Waterman Score=495.
gacagcatcgacgcacgcgtagtcttcgatctgattcgctccatcaatgacccggagcatccactgacgctagaggagttgaacgtagtagagcaggtgcgggttcaggttagcgaccccgagagtacagtggctgtggctttcacaccaaccattccgcactgcagcatggccacccttattggtctgtccatcaaggtcaagcttctgcgctcccttcctcagcgtttcaagatggacgtgcacattactccggggacccatgcctcagagcatgcagtgaacaagcaacttgcagaaaggcctttgacccctcagcctgcatactggtatcctggtcccagctcctgccagggctgttaccgttgttttcttgaatcactcacaatgagaaactaacattttgctttttgtaataaagttaatttatattcaaaaaa

SEQ ID NO: 1742 - DNA, 325 bp, Homo sapiens
  SIMILAR (6)..(161): 1001254mologous to Homo sapiens HSPC118,accession number AF161467,Smith-Waterman Score=266.
  misc_feature (1)...(325): n = a,t,c or g
ccgcgatggtaggcggcggcggggtcggcggcggcctcctggagaatgccaaccccctcatctaccagcgctctggggagcggcctgtgacggcaggcgaggaggacgagcaggttcccgacagcatcgacgcacgcgagatcttcgatctgattcgctcctgagcctggcctttgacccctcagcctgcatactggtatcctggtcccagctcctgccagggctgttaccgttgttttcttgaatcactcacaatgagaaactaacattttgctttttgtaataaagttaatttatattcnnnnnnnnnnnnnnnnnnnnnttt

SEQ ID NO: 1743 - DNA, 945 bp, Homo sapiens
  SIMILAR (673)..(942): 981254mologous to Homo sapiens HSPC118,accession number AF161467,Smith-Waterman Score=448.
atggtcatttatccacttgacaaacatttcacgagcccctgccggtccaagctgtggggacgccgtactcccgggcctatgtgccccctgagacctggttctggcctctacgtttcagcccgctactggctcgcacgacccagcgccgccgtggtcccttctcagcgccttctgctccagcgaccatcatgttcccgggtccgagcagccagggccgcggtcaccgcttctctcgcacctcaggccgagaacccacaacgcggcgtgtccctcgcgcgactccgtcgccacgccacgcccccttcccgttctccggaagtgcgcgggttggagcggaagcgcacgcctgctaggatcagcggtggtggttccgcgatggtaggcggcggcggggtcggcggcggcctcctggagaatgccaaccccctcatctaccagcgctctggggagcggcctgtgacggcaggcgaggaggacgagcaggttcccgacagcatcgacgcacgcgagatcttcgatatccgccgctgctgggcgcgggcggaggagttgaacgtagtagagcaggtgcgggttcaggtgagtcacttccgaggggagcgagttgttccagagagtcagaaaggtttctgtgcagcaggagctggcgtgctctatgctcacgaacaccgaagggttagcgaccccgagagtacagtggctgtggctttcacaccaaccattccgcactgcagcatggccacccttattggtctgtccatcaaggtcaagcttctgcgctcccttcctcagcgtttcaagatggacgtgcacattactccggggacccatgcctcagagcatgcagtgaacaagcaacttgcagataaggagcgggtggcagctgccctggagaacacccacctcttggaggttgtgaatcagtgcctgtcagcccgctcctga

SEQ ID NO: 1744 - DNA, 1282 bp, Homo sapiens
  SIMILAR (6)..(158): 961254mologous to Homo sapiens HSPC118,accession number AF161467,Smith-Waterman Score=253.
ccgcgatggtaggcggcggcggggtcggcggcggcctcctggagaatgccaaccccctcatctaccagcgctctggggagcggcctgtgacggcaggcgaggaggacgagcaggttcccgacagcatcgacgcacgcgagatcttcgatatccgccgctgctgggcgcgggcgggttccgggggcttgcggtggggggagcagtgatatcgagcagctggtggagccgcatcccagcagggcgttcctggcagagggttctaagtgggcaagggcgcagagtcccttttccttcacttcccacaatttgattcgcttccttaatgaccccggagcattcactgacgctagaggagttgaacgtagtagagcaggtgcgggttcaggttagcgaccccgagagtacagtggctgtggctttcacaccaaccattccgcactgcagcatggccacccttattggtctgtccatcaaggtcaagcttctgcgctcccttcctcagcgtttcaagatggacgtgcacattactccggggacccatgcctcagagcatgcaggtaagtgtggactggtggtgagggtgttggcccgggcaccccctaagcagtctgaggcttcccccttgcacaggagtctatgggcaagactggagatgggtaactgtgtgagtgaaattgccagagactcctcagtatgggttatagcctagaccgaagctggcctgagaagactctcctttgcttaccatgtcctcttctcccaaatcccctctcaccaaatatacaggaccagagtgtgtcaggcttcagcagcgcaggaggcagccagggggagggatcctaagaaggcagattaggtgggctcaggtggttgaagtagcctgatcaatatgtggggtcctgggaaggaggtgacaggaggggctctgttgctgcgggggacatatcctatatagaggttcagaggtagggctggctagcactctgggcagaagcctagctttgactctgccttccccacacccttcttcccacctagtgaacaagcaacttgcagataaggagcgggtggcagctgccctggagaacacccacctcttggaggttgtgaatcagtgcctgtcagcccgctcctgagcctggcctttgacccctcagcctgcatactggtatcctggtcccagctcctgccagggctgttaccgttgttttcttgaatcactcacaatgagaaactaacattttgctttttgtaataaagttaatttatattcagttaaaaa

SEQ ID NO: 1745 - DNA, 738 bp, Homo sapiens
  SIMILAR (38)..(559): 411254mologous to Homo sapiens HSPC118,accession number AF161467,Smith-Waterman Score=194.
cgcacgctcgcataggatcagcggtggtggttccgcgatggtaggcggcggcggggtcggcggcggcctcctggagaatgccaaccccctcatctaccagcgctttggggaagcggcctgtgacggcaggcgaggaggacgagcaggttcccgacagcatcgacgcacgcgaagtctttcgatctgattcgctcccatcaaatgaccccggagcatcccactgacgctagaggagttgaacgtagtaagagcaggtgcggcgttcaggttagcgacccccgagagtacagtggctgtgggctttccaaaaccaacccattccggcacttgcaggcatggcccacccttaattggtctgtccaatcaaggtcaaagcttctgcgctcccttccttcagcgttttcaagatgggacgttgcacatttactcccgggggacccattgcctcaagagcatgcagttgaacaagcaactttgcagattaaggaagcggggtgggcaactgcccttggaagaacaccccaccttttggaggttgtgaattcagtgcctgtcgagcccggctcctggaacctgggcctttgtacccctcagcctggcataattggtatcctggtcccagctcctgccagggctgttaccgttgttgtgggtgggtcactcacaatgagaaactaacattttggctttttgtaataaagttaatttatattcagttcccaaaaaaaaaaaaaaaaa

SEQ ID NO: 1746 - DNA, 885 bp, Homo sapiens
  SIMILAR (157)..(672): 491254mologous to Homo sapiens CGI-36 protein,accession number AF132970,Smith-Waterman Score=308.
  misc_feature (1)...(885): n = a,t,c or g
caggttcagtgagccattgcgcccggcccaaagcctctttcttttcagtgctgagctggataaagtctaccaaactgaaaggtctccaaggctatagctggctgtctgagaaattatggtgtttgtttagcccatcttaggacttgggctatcccagagccccccaagatgaacccagtggtggagccactgtcctggatgctgggcacctggctgtcggacccacctggagccggggacctaccccacactgcagcccttccagtacctgggaggaggttcacatctccccacgtgggccaggccatgctgaacttctcgttcaactccttccacccggacacgcgcaagtcgatgcacaagagagtgtggctttcatttcgcctcaaagcccgacaccaaacaaggttggcctttgtcaagcgccccagaacacagggcttggttggaattggaaggagggcgaggtgaaacgggcaaggagcttgtgcattcgcatcccacttccattcgccaggatctcctttcgccaagggaagccccacgtagagcagatcaccccggaaagttcaggctgaaattctgaaggcaaactttgagcagacgggtctcccatgggcaacccacgacacagcccaatgacttcagcatcatcacgacacctaccaagaaggtgaacaccgtaaaccctagagcttcttggaagcctcgggagggcntgggctactgtgcctcaacggttcggctcctcaacagacaggtcctgcggcaagaagtgggtgtggccgtgagcctctgcaggctcaagagtgttgtccagatgtttctgtactgggcatagaaaaaccaaataaaaggcctttatttttaaaaaaaaaaaaaaaa

SEQ ID NO: 1747 - DNA, 405 bp, Homo sapiens
  SIMILAR (181)..(405): 941254mologous to Homo sapiens Human Rhotekin protein,accession number AAY44559,Smith-Waterman Score=376.
cgttaccacctcttggctcacaccacactcaccctggcagcagtgcaagatggattccgcacacatgacctcacccttgccagtcatgaggagaaccctgcctggctgcccctttatggtagcgtgtgttgccgtctggcagctcagcctctctgcatgactcagcccactgcaagtggtaccctcagggtgcaggagactcgagtccgggcaggggagctggaccaggctctaggacggcccttcaccctaagcatcagtaaccagtatggggatgatgaggtgacacacacccttcagacagaaagtcgggaagcactgcagagctggatggaggctctgtggcagcttttctttgacatgagccaatggaagcagtgctgtgatgaaatcatgaaaattgaa

SEQ ID NO: 1748 - DNA, 1440 bp, Homo sapiens
  SIMILAR (1)..(888): 961254mologous to Homo sapiens Similar to rhotekin,accession number BC004558,Smith-Waterman Score=1454.
atgttctcccgaaaccaccggagccgggtcaccgtggccaggggctccgccctggagatggagttcaaacgcggccgcttccgactcagcctcttcagcgacctgcccgaggacacggagttgcagaggaagctagaccatgagatccggatgagggaaggggcctgtaagctgctggcagcctgctcccagcgagagcaggctctggaggccaccaagagcctgctagtgtgcaacagccgcatcctcagctacatgggcgagctgcagcggcgcaaggaggcgcaggtgctggggaagacaagccggcggccttctgacagtggcccgcccgctgagcgctccccctgccgcggccgggtctgcatctctgacctccggattccactcatgtggaaggacacagaatatttcaagaacaaaggtgacttgcaccgctgggctgtgttcctgctgctgcagctgggggaacacatccaggacacagagatgatcctagtggacaggaccctcacagacatctcctttcagagcaatgtgctcttcgctgaggcggggccagactttgaactgcggttagagctgtatggggcctgtgtggaagaagagggggccctgactggcggccccaagaggcttgccaccaaactcagcagctccctgggccgctcctcagggaggcgtgtccgggcatcgctggacagtgctgggggttcagggagcagtcccatcttgctccccaccccagttgttggtggtcctcgttaccacctcttggctcacaccacactcaccctggcagcagtgcaagatggattccgcacacatgacctcacccttgccagtcatgaaaatgttgagtcatttgtgcagcaagctggggagatgcagaactgggcacaagtgcatggagttctgaaaggcacaaacctcttctgttaccggcaacctgaggatgcagacactggggaagagccgctgcttactattgctgtcaacaaggtgatgggtcccttggtagagactcgagtccgggcaggggagctggaccaggctctaggacggcccttcaccctaagcatcagtaaccagtatggggatgatgaggtgacacacacccttcagacagaaagtcgggaagcactgcagagctggatggaggctctgtggcagcttttctttgacatgagccaatggaagcagtgctgtgatgaaatcatgaaaattgaaactcctgctccccggaaaccaccccaagcactggcaaagcaggggtccttgtaccatgagatggtcttatcagagcctgtagccccagggggcccagcgatccccacggaccagaggcctctgcagcaaaggccaacctcgcacttggctccagtcaccagtgtgagagagaaaggtgctggcataggatctgcccagaagagaaaatga

SEQ ID NO: 1749 - DNA, 370 bp, Homo sapiens
  SIMILAR (314)..(267): 931254mologous to Homo sapiens Human mammastatin amino acid sequence,accession number AAY23756,Smith-Waterman Score=74.
gaactttttttttactgcagaaaacatttttataactttagaacttttctaaaatactactttgtcagctgaacaatatagaaaagtgcagaggcaagtgcctttccagaaccgcgtggtgacttagaagcggggcttgcgcttgcggccggtgtactgggtcaaaaagcgacgtcgctatgaacgcttggccgccacaagccagttatccctgtggtaacttttctgacacctcctgcttaaaacccaaaaggtcagaaggatcgtgaggccccgctttcacggtctgtattcgtactgaaaatcaagatcaagcgagcttttgcccttctgctccacgggaggtttctgctcgtgccgaaatcgtcaa

SEQ ID NO: 1750 - DNA, 1181 bp, Homo sapiens
  SIMILAR (34)..(195): 551254mologous to Homo sapiens Human myelin oligodendrocyte glycoprotein gene,accession number AAZ29204,Smith-Waterman Score= 120.
tttttttgagacggagtccgcgtctgtcacccaggctggagtacagtgaccaccatgcttggctaatttttgtatttgtattagagacggggtttcgccatgttggccaggctggtctcgaactcctgacctcaggtgatccgcccccccttggcctcccaaagtgctgggattacaggcatagccactgtgcctggctgacttctagagtttcaataacagagatgtggttcaagaagaaaagggagacatgttttgtagatggcaggagcttcatgaaaagaagccaatgaagggcaggacgtgtagctgtctacctacaggaaaccagccaaggagccctccccacagggacttcagcacagatggccgggaaaatctgcattcacctgagctccggacctaagagaggacaaggccttgaccatttctacagactcacaagatgcaatctctgtggtccatgcccgtggtgtgatctgggaagcagggggccttctaaatgccaacaacaaggaaatcaaatgtgcaacaaacagaaataacggcattgacgtgggcccatggagaggcctaaacagatgactgcagttcactgccaaggtcatcaaaggggtgactctgaaataagaaatttcagatgccacggcccaaatagctgcacgaggtggggaagtcctccacatgcctctgcttccttcagtacctgtttatgaaataagccgaagtacttcccctggggaatttcctttctttctttctttctttcgagacggagtcttgctctgtcgcccaggctagagtgcagtggtgcaatctcggctcactgcaacctctccctcctcggttttagcaattctcctgcatcagacttctgagtagctgagattacaggtgcatgccaccatgcccagctaatatttgtagttttagtagagacagggtttcaccatctaggccaggctggtcttgaactcctgacctcgtgatccacccgtcttggcctcccaaagtgctgggattacaggtgtgagccatcaagcccggactttttttttattttttgagacgacgtttcactcttgttgcccacgctggagtgcaatggcacgatctcagctcactgccacctcctcctcccaggttcaagcgattatcctgcctcagcctctcgagtagct

SEQ ID NO: 1751 - DNA, 399 bp, Homo sapiens
  SIMILAR (190)..(390): 771254mologous to Homo sapiens Human Rhotekin protein,accession number AAY44559,Smith-Waterman Score=265.
ggatcagggggatcctagagtcgttggggacagagcaagggggaatagtggctagaggccaggccaggacattgtgatttatccacaggccttctgacagtggcccgcccgctgagcgctccccctgccgcggccgggtctgcatctctggtaagaagcacagctaccccagctgctggtaccccttgcccaagcacacggcctcctgccccatctcaacatctattcttacccctctgccccttagacctccggattccactcatgtggaaggacacagaatatttcaagaacaaaggtgacttgcaccgctgggctgtgttcctgctgctgcagctgggggaacacatccaggacacagagatgatcatagtggacaggaccctcacatactgtatt

SEQ ID NO: 1752 - DNA, 440 bp, Homo sapiens
  SIMILAR (33)..(185): 861254mologous to Homo sapiens rhotekin,accession number AF290512,Smith-Waterman Score=215.
tgtcgtggcgggggcgctaggctgcagctggctcggaatcggggctggtttcctgtctggaagggaaggggcctgcagaagggagcggggacagcagcagacaggcacacccctgccttcctctctccctctcctcccttctctggaaaagcgagctgggagaacagctgccaccaaagcgagactggacactctgtgcctagagccccctctgcagctggcctttcctcctggggaccccacttatcctcacttcgctttctttttcttccctgcctgggctcccggcaggcccccggagcagcagtggggcgaggaaaatttgtcacagcagccagagggggtttaacaggagttgcagagggataagggcagcttctgccctctgcccaagagctggccacctctttaaagactgagggaacagtgggaggaggaac

SEQ ID NO: 1753 - DNA, 588 bp, Homo sapiens
  SIMILAR (274)..(588): 871254mologous to Homo sapiens Similar to rhotekin,accession number BC004558,Smith-Waterman Score=505.
gtccgggcaggggagctggaccaggctctaggacggcccttcaccctaagcatcagtaaccagtatggggatgatgaggtgacacacacccttcagacagaaagtcgggaagcactgcagagctggatggaggctctgtggcagcttttctttgacatgagtaagagagaagggggctgggttgaacctttgggaagaactggagtttgtcatttttactaaaggcctctgtttcaagattatgtggaagggaatgtagcaggagaaagggcagcctggctctctcttttaatcagcgctcttcttccaggccaatggaagcagtgctgtgatgaaatcatgaaaattgaaactcctgctccccggaaaccaccccaagcactggcaaagcaggggtccttgtaccatgagatggctattgagccgctggatgacatcgcagcggagacagacatcctgacccagcgggagggcgcaaggctggagacacccccaccctggctggcaatgtttacagaccagcctgccctgcctaacccctgctcgcctgcctcagtggccccagccccagactggacccaccccctg

SEQ ID NO: 1754 - DNA, 2230 bp, Homo sapiens
  SIMILAR (58)..(1824): 611254mologous to Homo sapiens rhotekin,accession number AF290512,Smith-Waterman Score=1566.
gtgaagtgtgactccgtgggcctggcgtggaggcgggggcgctaggctgcagctggctcggaaacggggctgggttcctgtctggaagggaaggggcctgcagaagggagcggcgacagcagcagacaggcacacccctgccttcctctctccctctcctcccttctctggaaaagcgaggacacggagttgcagaggaagctagaccatgagatccggattaaggaaagggccctgttaaactgctggccaacctgctcccaagcgaaaagcaggctctggaggccaaccaagagcctgctagtgtgcaaacagccgcatcctcaagctacatgggcgaagctgcagcgggcgcaaggaggccgcagttgctggggaagacaagccggcggccttctgacagtggcccgcccgctgagcgctgccccctgccgcggccgggtctgcatctctgacctccggattccactcatgtggaaggacacagaatatttcaagaacaaaggtgacttgcaccgcttgggctgtgtttcctgctgctgcagctggggggaacacatcccaggacacagagatgatcctagtggacaaggaccctcacagacatctccttttcagagcaatgtgctcttcgctgaagcggggccagacttttgaacttgcggtttagagctgtatggggcctgtgtggaagaagagggggccctgactggcggccccaagaggcttgccaccaaacttcagcagctccctgggccgctcctcagggaggcgtgtccgggcatcgctgaacagtgctgggggttcacgagagcaataccattcatgctccccaccccagaggttggtggtcctcgataccacctcttggctcacaccacactcaccctggcagcagtgcaagatggattccgcacacatgacctcacccttgccagtcatgaggagaaccctgcctggctgcccctttatggtagcgtgtgttgccgtctggcagctcagcctctctgcatgactcagcccactgcaagtggtaccctcagggtgcagcaagctggggagatgcagaactgggcacaagtgcatggagttctgaaaggcacaaacctcttctgttaccggcaacctgaggatgcagacactggggaagagccgctgcttactattgctgtcaacaaggtgatgggtcccttggtagagactcgagtccgggcaggggagctggaccaggctctaggacggcccttcaccctaagcatcagtaaccagtatggggatgatgaggtgacacacacccttcagacagaaagtcggggaagcacttgcagagcttggattggaggctcttgtggcagcttttctttgacatgagccaatggaagcagtgctgtgatgaaatcatgaaaattgaaactcctgcttccccggaaaccaccccaagcactgggcaaagcaggggtccttgttaccatgagatgggctatttgagccgctggatgacattcgcagcggtgacagacatcctgaccccagcgggagggcgcaaggctggagacacccccaccctgggctggcaatgtttacagaccagcctgccctgcctaacccctgctcgcctgcctcagtggccccagccccagactggacccaccccctgccctgggggagaccccgaaccttttccctgggatgctgtccccccagaccacttcccctagggcttcgcttcggtttgccccccttcccaccttcagcgaatccccacggaccagaggccttttgcaggcaaagggccaacctcgcacttggctccagtcaccagtgtgagagagaaaggtgctggcataggatctgccccagaagagaaaatgacccatgcgcagttgggctctggatacggcgctgtctaatagcaaggtttgccagtctggccctcctgttcctctgctggaccctgggggtaggcttgcaggggtgggcagaagcccttgtttaaatttgtggtttgccatggtaccgagggactcattccctggggctcgctgggacctcccctaaacccttcctggaagaaaactggaaccaactctgccctacctccctgcactaaccaagctttgaggatggcactggaagaaccctttggaagcaaacatacctccctttgtgactcccacatcaaccattaaagttatttaacaagcagccttcaccttggctcctgaggaaa

SEQ ID NO: 1755 - DNA, 595 bp, Homo sapiens
  SIMILAR (1)..(297): 961254mologous to Homo sapiens unnamed protein product,accession number AK023789,Smith-Waterman Score=471.
cttgttactagaagagcagtactggcttgcttacgtcagcttgtacaaagagaagcagctgaagtttcagaacatgctgttatgcttgctaaggatagcagagaagagttgactccagatgctaacatcagagaagttggccttgagggggcattgttgatcttactagacaaggagacagatgagagattatgccatgatatcaaagagactttaaattatatgcttacatctatggcagtggaaaaactctccctgtggttaaagctttgtaaagatgtacttgctgcatcagctggtaagtattggacattatcagttaaaataataaaattgaaatttgaaactttacataaaattgtttacccctgagaaattatccagtctggtcaaacaagctggattctgactgtctgattgttgcttttcttcaaataaagattgtatttctagtgttttagaattctctgtaatttgaacaatataaatccaatacttaagcctgctctttttccctttggctgtcttagatgactttcctatataaaacaaattaaaaagtaaagttattgtttatgccctaaaaaaaaaaaaa

SEQ ID NO: 1756 - DNA, 363 bp, Homo sapiens
  SIMILAR (1)..(348): 731254mologous to Homo sapiens unnamed protein product,accession number AK000343,Smith-Waterman Score=381.
accatggaaagcataactgcttgtttacatgcattgcaagcacttctagatgtaccttggcccagatcaaaaattggcagtgatcaggacttgggtatattattgctgaatgttctacatcgagtaattttaaccagagaatcaccttccattcagttggcttcacttgaagtggtaaggcagattatctgtgctgctcaagaacatgtgaaggaaaaaagacgaagtgcagaaggaagcatctcaattctccctactatattgtacctcacaatcggggtcctcagagagactgctgtgaagttacctgggggccagttatcttcgacagttgcagcttccctacaggctctaaaaggaata

SEQ ID NO: 1757 - DNA, 474 bp, Homo sapiens
  SIMILAR (158)..(271): 1001254mologous to Homo sapiens KIAA1316 protein,accession number AB037737,Smith-Waterman Score=183.
ctgacagtcctattatgtagtctacacgaatgacagttctttatcgtttacatttattttatgtaagaattaatttttcaagatattgttagctgctatcatttagtaatttataaactgatatgctttttttaaaacttgttctatatgtaaatagattattatgacattagcagaggatttgctgtgttctgctgctcaaaacagtcgcctttcagctcagcgcacacaagctggatggttgctgatttctgctctgatgacattaggtaacagtctgtagaaggtttacataccttgaaatactttgtgttttctgagtgaaatgattcttatatgtgatttgatgaaatgaacttttaatacataccagaatttaaatagccacacaaacatttttcttgtagtagtcacctttaaaagccttttactttcgtcattgcttaaaaccttttgagatctctcttgattttc

SEQ ID NO: 1758 - DNA, 395 bp, Homo sapiens
  SIMILAR (209)..(394): 881254mologous to Homo sapiens KIAA1316 protein,accession number AB037737,Smith-Waterman Score=288.
tgaagtaccaactattacttgcaattcttaatgatgaactatatcattctaaattggatgattgcctctgagttggaagtcctccatttctctttccacatgagtagtagcattcacatttgctgttactttatcacttgcttcaacaaaagaacaagttaatttattttatgtttcttaatgctgctgtaatgtttttaattgtttttctttgtcattacagacctgggcattacattctctatcattgatcattgattctgctggcccactctattatgtgcatgtggaacctaccctttctcttattataatagttgtggtaaatgtgcctcctactcatgctgaagttcaccaaagccttggtcgctgtttgaatgcccttattaccacgt

SEQ ID NO: 1759 - DNA, 434 bp, Homo sapiens
  SIMILAR (3)..(434): 1001254mologous to Homo sapiens unnamed protein product,accession number AK000343,Smith-Waterman Score=714.
agctcctacattccatctttcagtatccaaatccagctgtttcctacccatacatttactctttagcatcctgtatcatggaaaaactgcaggaaatagacaagagaaaacctgaaaacactgctgagcttgagatcttccaagaaggcataaaggtcttagaaacactggttactgttgctgaagaacaccatcgcgctcagctggtggcctgtcttttgcccatcctcatttccttccttttggatgaaaattctctgggatcagcaacttccataatgagaaatttacatgactttgctctacaaaatctcatgcaaattggacctcagtattcatctgtttttaaaagtttagtggcttcttctccagccctaaaagcccgccttgaggctgctataaagggcaatcaggaaagtgtcaaagtcaagata

SEQ ID NO: 1760 - DNA, 540 bp, Homo sapiens
  SIMILAR (163)..(501): 531254mologous to Drosophila melanogaster CG2747 gene product,accession number AE003677,Smith-Waterman Score=331.
attagccttgcaccgcctgcaagaattcggcacgagcggtaacgttgctggaccgggacgcacgctcagctgaggaggacccccaaagatttttattgttaggtatattgaccaaagtttaacgagaagaactgtgatcagctgggaggattgctgcaaggaatggaattagctcatagcttactgctgaatgaagaagcatacaatcaactaggtgaagttcagaaggcagagtttatttttgagtggttgagatacttggagaagctcttgttggcaaccagcaggaatgatgtaagggagaaacagaagactcttgttgaacagctcctgtctttgttgaacagctccccagggcctcctacccgcaaactgcttgctaagaatctagccatactttatagtattggagacacattctccgttcatgaagcaatcgataaatgtaatgatcttattcgtagcaaagatgattctccaagttatcttcccactaagctgtaagtgaaacattaaaccagaccagaaaccaaaaaaaaa

SEQ ID NO: 1761 - DNA, 599 bp, Homo sapiens
  SIMILAR (394)..(429): 831254mologous to Homo sapiens Zinc finger protein 222,accession number AC067968,Smith-Waterman Score=53.
ggtagattgagtcatttccacatcttgcgagtccttccgaacgagtctcctttccttggggctcgtaaccacccaatgatcgattcaggagaaaagaagcctgggcggagagcagagcccgacctttctaaaagagctgcaggaagggacttcttggctactgatggcaaagctctacgaggcagtgaccttcaaggatgtggctgtgatcttcactgaggaggagctggggctgctggaccctgcccagaggaagctgtaccgagatgtgatgcttgagaacttcaggaacctgctcttcagtggggcatcaaccatgccatggagatactttccacttcctaagggaaggaaaagctttgggtgatggggacatcaagccaatgagaaaggaatttgggaggcaagatccaaactgagatggagactggttccagaagcaggaacacatgaagaattttcctgcaagcaaatttgggaacaaattgcaagtgacttaaccaggtctcaagataccaccataagtaactctcagttatttgaacaagatgacaacccctcccagattaaagcaagactatctacagttcacacaagag

SEQ ID NO: 1762 - DNA, 8403 bp, Homo sapiens
  SIMILAR (864)..(1172): 761254mologous to Mus musculus putative,accession number AK016300,Smith-Waterman Score=394.
ttttttttttttcttttcaatcgtttaataaaagtaggcactgagcgccttctacagagttgggcaggtgctgccgagaagcttagcgctacgccggcctccaagaccgcacatccgggacattcgagagtcagtccgaggccccgccctcctaagggcggggccactgggcaatcggcgcaggcccttcgtcgtgccccgcctcgtctgccccgccagcgcgtcgagggaggggccagcgacacatggcctagtaactgtccggccgcggcgctggcttaagccatggctgagggtagccggattcctcaggcccgggcgctcctacagcagtgcctgcacgcccggctgcaaattcgcccagccgatggggacgtcgcggcccaatgggtggaggtaacgtcagcccggcagctctcgttatcctccggcgtgcggggcggttttttccgcgttgtctcggtgactcgtccgctctgtgtctccctctgagaccggcggtccggccgcggggataccgggtcagcttgaagctggccgcggaggcctgcctggctgcgcttgtcctttcggtccagcatcaccgttccccagcgccagttgtagcacccgagaggaagagcgtgtctcccttcttggggggaccacaggtccaaagaggactggtgatctacgtgtgctttttcaagggagctgataaagaacttcttcccaaaatggagcccctaacagaggcagtagatgacactgtatatacaagatgtgggtctcatcaaacctggacaactcaagtttatatcattattatggaagaatttgcattagccatgtgtgcacttccttgtggaaataagaatagatttaatacactgttaaatgtgaaattaagtgagacagaaaatggcaagcatgtctctatattggatctacctggcaacattcttattatccctcaagctacccttggaggaagactaaaaggaagaaacatgcaatatcactctaactctggaaaagaagaagggtttgaactttactctcaatttgtgactctatgtgaaaaagaagtagctgctaatagcaagtgtgctgaagctagggttgtagtggaacatggcacttatgggaacaggcagctcttctggcccaaggtgctcaaagaatcttcaacagatattttatcttcacagtatatgtatgatgaggatagcgctgtggaaaggactttctggcaggcaaacatggatgagcagaccaaggactttgttttaattccgtttagcccgacttttattgattccccacaaacaccaccttcccacttcttaaagtctgctacagattccattatgcagaacctgctgtccctggccactgcagggctggagtccgccgagaaggggctgactggggcacagggtcggctgataaacagcgtggtccgttcttcctcctggactacgggaaagtctggcttcacctgtgcacaacagaatgatgtaagggagaaacagaagactcttgttgaacagctcctgtctttgttgaacagctccccagggcctcctacccgcaaactgcttgctaagaatctagccatactttatagtattggagacacattctccgttcatgaagcaatcgataaatgtaatgatcttattcgtagcaaagatgattctccaagttatcttcccactaagcttgctgctgtggtatgtttgggttccttgtacaagaagttgggtagaatactgggtaacacctttactgatacagtggggaatattcttaaagctatgaagagtgcagagtctcaaggccgatatgagattatgctaagtctgcaaaatatattgaatggactaggagctgccgctgcaccttgtcacagggatgtttataaagctgctagatcctgcttgacagatagatccatggctgttcgttgtgctgctgcaaagtgtctccttgaacttcagaatgaagccatctttatgtggagtacggacctggacagtgtggccacactgtgttttaagtcctttgaaggttccaattatgatgtgcggatttctgtttcaaagttactaggcataatattagctaaagctgtaatttctaaacatccaggaacagcctcacgtcaaagcattcgcagagtatctttggaggaagttctggaattactaggaacagggtttctacgtgggagttcaggattccttcgagccagtggagatatgctgaaaggaaccagttcagtcagtagggatgttcgagttggagttactcaggcttatgtggtatttgtttcaacactaggaggagcttggctagagaaaaattttgctgcctttttttctcatatcctaagccttgcgtcaccgtcacaccctaaagccacccaaactcagatcgatgccgtctgctgtcgccgttgtgtttcatttattcttcgaactactataggtggtcttcttggagaaaaggctcagcttgctgctgtaaaggatatttgccaggccatctggaagctaaagaaagttatggatgccgtaatgagtgatggtaatttggaaacccggcttggttccacagatgtagccgctagccaacatatgctggtttgtgctttacaagaacttggaaatctcatacacaatcttggcaccacagcggcacctttgctacaggattcaagtacaggtctccttgacagtatcttgtcagttattcttcatcctagcatttctgttcgactagcagcagcttggtgtttacactgcattgccgtggcattaccctcctacctaacaccactcttggatcgttgccttgaacggcttactggacataagtcttcacctgaagcagtgactggcttcagttttgctgtagcagctttgttgggagcagtaaaacattgtcctttaggaattcctcatggaaaaggcaagattattatgacattagcagaggatttgctgtgttctgctgctcaaaacagtcgcctttcagctcagcgcacacaagctggatggttgctgatttctgctctgatgacattagcatctcctaaagatctagaaacagaaaagagccgaggagattcgtttacatggcaggtgaccctggaaggacgagctggtgcactgtgtgctatcaagagctttgtttcccactgtggtgatcttcttactgaggaagtaactcagcgtcttcttccaccacttccttgtgctgtggatttgctaactcaagagctggctgctgacttgactgcccctgatattcaggtggcagcatctacatttttacttccacccctctgtcatcaggatgatcttttgatactaagtcctttcctacaagagactgaccatagatttattgaagaacagctcctgcttggtaatggtgttgcttgcggaagtcttgaatatgacccttattcgatttatgagaaagatgtagagggagattcagtgcctaagcccttacctccagcactatcagttattagttctgcatccaagctctttggggttgtatgcgctcatgtgggagaaactcaaaggcttcttatattggaacagcttttggacagtataaagcacacaaaaggagctcgtcagcaagtggttcagttacatgttgtttcttcagtttctagtttcttgaagtacgtggctggctccaagggatgtttaggtccagaagaaatgaaaagatttgccttaacattagttatgggagccctagaaagccccaaccccttgctgagatgtgcagctgcagagtcatgggctagattagcccaagtggtagatgatggagcttttactgctggattagctcaagttagctttgacaaattgaaatcagcaagggatgtggttaccagaacaggacactcattggccttggggtccctacataggtatttaggaggaataagttcttctcaacacctaaattcttgtattggaatcctttatactttggcgcaggacagcacttctcctgatgtgcagacctgggcattacattctctatcattgatcattgattctgctggcccactctattatgtgcatgtggaacctaccctttctcttattataatgttgttgttaaatgtgcctcctactcatgctgaagttcaccaaagccttggtcgctgtttgaatgcccttattaccacgttaggtccagagctacaaggtaacagtacttcaatttctaccttaaggacttcctgtctactgggttgtgcagtaatgcaagataacccagactgccttgttcaagctcaggccatctcttgccttcagccagcttcatatgtttgctccacgacatgtcaacttgtctagcctggttagctgcctctgtgtgaatccctgtagcccgtacatgtgactgagaagagcagtactggcttgcttacgtcagcttgtacaaagacaagcagctgaagtttcagaacatgctgttatgcttgctaaggatagcagagaagagttgactccagtaaattggtaccaggagtggggcactgctataaagatacccaaaaatttggaagcagctttagaattgggtaataggcagtggttggaatggtttggagggctcagaagaagacaggaagatgtggcaaagtctggaacttctagagacttgttgaatggctttgaccaaaatgctgataataatgtggacaatgaagcccaagctgttccagccatggctaaaagggaccaaggtacagctcaggccattgcttcagagagtgcaagccccaaaccttggcagcttctacatggtgttgggcctgctggtgcacagaattcaagaactgaggtttgggaacttccacctagatttctgaggatgcatggaaatgcccagatgtccaggcagaagtctgctgcaggggtgaagccctcatggagaacctctgctagggcagtgcaaagggaaaatgaagggtcagagcccccacacagagtccccactgaggcactgcctagtggagctagcgagactccatctcaaaaaaataagaaaagaagagggtctctagaccccagagtggtagatccactgacagcttacactgtgcgcctgaaaaagccacatatactcaacgccagctgtgaaaatgctaacatcagagaagttggccttgagggggcattgttgatcttactagacaaggagacagatgagagattatgccatgatatcaaagagactttaaattatatgcttacatctatggcagtggaaaaactctccctgtggttaaagctttgtaaagatgtacttgctgcatcagctgattttacagctgtaacttgtgtggatacaatgcaagaagaagaaggagataaaggggatgatgcctcagtcctgaccaccagacgtgatgaaaaatcccatccttttaccaatccccgatgggctactagagtctttgctgctgaatgtgtctgtaggataattaaccaatgtgagaatgctaacagtgcacattttgacattgctttagcacaagaaatgaaaaaaagagattcaagaaatgactttttggtactgcatcttgctgacttaattcgcatggcttttatggctgccacagatcacagtgaccagctccgtctttctggccttgaaatgctgttagttgttattcggcgatttgcaactgttccagaaccagagtttccaggtcatgtgattctggaacagtatcaagccaatgtggccagacgggagttccagaccagtgttgtctcccgggacactgacacagccgccaagtttattggtgctgggtcagccacagttggtgtggctgattcaggggctggcattggagcggtgtttggcagcttgattattgtctatgccaggaagctgtctctcaagcagcaactcctcttctatgccattctgggctttgccctgtctgaggccatggggctcttctgtttgatgatctccttcttcatcctgttcgccattgcctggatagcaagtggagttgtaagtgaccttaatgatctccgaagagttcatcagttgcttgtttcatcgttaactaaaatacaggctggaaaagaagctctaagtcacttatataatgaaagtgcttctaccatggagatcttagctgtgcttaaagcctgggcagaggtctacataattgctgtgcaaagacataaaaaccacagacaacctttgaagactaccacctgtttagaagacggtatcagaaatggatcatgttcatcagatggactgcttgacttagtctatgcagatcttggcacactaagcagactctggcttgctgcacttcaggattttgctcttttaactttgccttcagaatttgcctcccaacttcctgctgaaggtggtgctttctacacagcagagactagtgaaaatgcaaaattgcattattacaactcctgggcacttatcctccatgctacagcattgtggcttacaagcacgggttttgttgttgctgacccagatgaaggagcatctaatctctccaggcctgtaacaccaacttccatgtgtcagggttcatcatctggggctaccataaagtcccctgaggatgtctacactgatagattccatcttattttaggaatcagcgtggaatttctatgttccttacgttcagatgcaaccatggaaagcataactgcttgtttacatgcattgcaagcacttctagatgtaccttggcccagatcaaaaattggcagtgatcaggacttgggtatagaattgctgaatgttctacatcgagtaattttaaccagagaatcaccttccattcagttggcttcacttgaagtggtaaggcagattatctgtgctgctcaagaacatgtgaaggaaaaaagacgaagtgcagaagttgatgatggggctgctgaaaaggaaactctgccagagtttggagagggaaaggacaccggaggacttgtgcctggaaagtctttggtctttgcaacactggaattgtgtgtatgcattctagttagacagctcccagaattaaaccctaaattgacaggtagcccaggagtaaaagctacgaagccacagatactattagaagatggaagtagattggtttcagctgcattggttatcctttccgaacttcctgcagtgtgctctcctgaaggaagcatctcaattctccctactatattgtacctcacaatcggggtcctcagagagactgctgtgaagttacctgggggccagttatcttcgacagttgcagcttccctacaggctctaaaaggaatattatcttctcccatggcccgggcagaaaagagccgtactgcttggactgaccttctccgaagtgccttaacaacaattcttgactgttgggatccagagcatttctctttagttgatgaaacacaccaagaacttgatgaagtcagtctacttactgctatcacagtgtttattttgtctaccagtccagaagtaactaccatcccatgccttcagaagcgctgtattgataaatttaaagctactcttgagataaaagatcctgtggtacaaatcaagacctaccagctcctacattccatctttcagtatccaaatccagctgtttcctacccatacatttactctttagcatcctgtatcatggaaaaactgcaggaaatagacaagagaaaacctgaaaacactgctgagcttgagatcttccaagaaggcataaaggtcttagaaacactggttactgttgctgaagaacaccatctggtgtcaagtactagaaacacatcatctagatctttgtttaaacacaaaagctccttaaaaatagattttctaaattatggaaatgcttttgtttcagtggtcaacagatcaattctctcatctgccatttcacatgccagggtcaaatcctctcacagtacaaggtcatctctggttacctgcaaagccaaagaggtcagctcatgtaatacaggaaaacagagctttagacctaagaagaatctgcccaggactcttgaaacaccacaaggaaaacagaacaccccaaaagggatgagtgatgactttgttctgaattctttaaaggggttcaagttattagaagccttctctagattttctgatactacaggtggcaaagagggaaggaggttctactcaaggcatgctgtgtatgctctcggagagtgtggactgagtcacagggagggagtggagtggctgtatgcaaagaagctggaggcatcctgcctcctgacctgtgactcacatgggatgctgcaggacctcattcctaacatctcacaggaagagatcagctga

SEQ ID NO: 1763 - DNA, 2722 bp, Homo sapiens
  misc_feature (1)...(2722): n = a,t,c or g
cggccgccctttttttttttttttttgtttttgtcaatttatttagaaaaaaattaacatgggcaaatgagatacctcaggtgttacaacagagtatagaaatgtctagcaatagtcaaataatttgatctttaaatacaaaataaccacatgaacacctaatatacaggtttcatctgaatacatatttattaggataaatattagagggttgtcacatccatctaactacatacatgctttgcaaggactaggaaatcacaattagtttttttgaccagtttaaaggtatggaaatgattgccattgtacataccgatgtacaaagaccgatgatggtttctgtgggagttacttcagggctgcactggtgggtgtgtttatgggtggtaccgtgtgaatcacctgtgatcatgatatcaaaaattatacaaagtattgaattgggctacaattttcttcctgaaatcccccgtttcttttcattatttcccataggcaccctaaaaatacacagggtgggcagggactaggtaccactggaggcctaaataggttacatgtaggtacaataaaaacagaacaaaaacccctttcccactcagggttcagagtaatattacatggagcgagagagacagacgtggagaactcacaaatgctataaccaacaggatctagtttttccacgtgatggagttccaagcttttttttttgttttgttttgtttcgcaaaataaaaacaatacacattcccaagagaaatgaatgcatctgttgacacgtctctatttctcatttacatatgtaacaacacgtccccttgaatccgctgcctgttgaacacggcccctgtgtgggaacgggttcaagcccgaagggcccgtcgggaggcagacctgtaagctcctctgggggatccagggcttcccattaagggagaaaagtattagcaagtttcttaaaaaataaaatggctacacggaacatgatacatggataaagcttcaaaccaagaagcatgggggtgattgcctgtacttgggcccttccccgccctgcctggctggcttccctgttccatcttgcgaaatggcggcnagaaaacaatgccctgtgggccggggtgggatgcttggcatggaaaaagtggcttgcagaggcctcgtttttgctgaggttacttaatggctcccaagtagtcgtccgaaaaggaatcagggaaggatctctccagagttcaggaccatctctgtttatgggcgttgtctacctgcacctgtcacaacctggggcttgctcccgccccggatgcctttgcacctccctcacaccctggcctggctccaagagcactccgaaagagcttgtctccagactgcaggctgtaggcaccacgcacggttcagagccagccggaagggaaagctctgggccgagcttgctggtggagccttgttggagaggggacccaggaaacccgcctcaggtgctgagcccagagatggttgcaggaggtgcccggggcctgggctgcagggagcatctcgactctccgcactggaaagccgtggatccacctgtgagcagagtgtggacacaccctgataagaaccagaatgaatcccaggcctttctggggcaaagtatcaacgccaagaagcaagaactcctaaggaaggcatctgtaagtctgtctggagcttaattcccagatggtctgacacagggcgtggccacttgccaggccacagacactgggcaagggtggccacagtgctacctggcgttggcttgtccctgcccagctgactgagggatggctctaaatagcgggctgcccggtcttcccaactccccagcacagccgccccattctgttcacccccttcaactgtacaaataagccctggttgctttttttgtttttgttttaaaaaaaaagaagactcggtctttgtcattgagtcccaggtattttaaaaacacccagcaaaggctataacccaggtcatgaaaatgttgaatattatcaaagacgatactaaaatattcacaaagatatttacaaaagcgattcttaaaataattgatttgcatactgaacaacacgctatttgaaaaaaacctcgacaacgggacaaaggaagaaaaggggccggggcaatggcagctttcctacagaaaaccttgtgccgtctgggacagtgactggaagtcaacagctggggccacctttccggtaaaacccacagaggagtgctggggaccacccacagcggacgggagagcaggaaagggccccaggcagcagccgggaagggcgcaaagaatttacagatgggaccccagtgacgggacaacctggcatcaccataggccatgtggctcacggggcacagaccagcctgaaacaaagtgaacacaggacaggctccccaggaggccctggagagtggtaagccagatggagcaaagcggtggagggaaggccagaggctgcttttgcttgagtgagcaggagtttgggtgagattgtaatgtgtggaggagtgcaggcagggtaggctggcagccaagggcagtgtctggggcaggcacaaaaacacgcccccctcccccccatgcctgcaggtacatattggtgcacatgtccatggcctgggttgcagccgggggcatcttggagcacaaattcagaggaaaaggctgcccggcccc

SEQ ID NO: 1764 - DNA, 661 bp, Homo sapiens
  SIMILAR (151)..(336): 621254mologous to Homo sapiens PRO1902,accession number AF118082,Smith-Waterman Score=177.
tttcgtcgggaaggccggccggcaggggcgggggcaggattcgccgactctgggggtgctccgagctcgtgctgcggtcccactgtgcgccctgtcgccgccaccgcggaaaacgtcttgcacgtgcgaggggcatttcaggagtttcctgtctgtcaggctggagtgcaatggcgcaatcatggctcactgcgccctccacctcccaggctcaagccatcctcctatctcagcctcctgagtagttgagacaacaggcatgtgccaccatgtctggctaatattttaataaaatttttttgtagagacaggttctccatatgttgcccaggctttgattcttctaatgctcggtattaagactctatgactgtgtattatacatagagtttacatgtgagtaagttctgggtggagagacactattccttgctagggccttaagagtctggctgcagctctgctatcacatgggcaaaaccagctacataatttacaagatccagtgcaaaataaaaatgtgacatttcttgttagaaatcattgtgaatttcaagatggcaacaacaaagcattagaccaagcagggggcctttctaagcttgagcccccgtgtgactgcacaggtcatatgcccatgaagctggctctgcagagacta

SEQ ID NO: 1765 - DNA, 278 bp, Homo sapiens
  SIMILAR (82)..(267): 821254mologous to Homo sapiens RNA polymerase II subunit hRPB17,accession number Z49199,Smith-Waterman Score=268.
ctgtggtcgcgctctcaccccttctgctgctctcgtggccccctcgcgatggcgggcatcctgtttgaggatattttcgatgtgaaggatattgacccggagggcaagaagtttgaccgaggtgacaagtttcggttggtcatagctagtaccttgtatgaagatggtaccctggatgatggtgaatacaaccccactgatgataggccttccagggctgaccagtttgagtatgtaatgtatggaaaagtgtacaggattgagggtcgacgcggccg

SEQ ID NO: 1766 - DNA, 474 bp, Homo sapiens
  SIMILAR (308)..(403): 1001254mologous to Homo sapiens RNA polymerase II subunit hRPB17,accession number Z49199,Smith-Waterman Score=163.
tgttttccaccctcgataatataaagaacagtgccttgcacatatctgtgcattgatgtttgtcagaattttggttcctagtgacaaaacagtaggaagatgcctcttctgtttcttaggctgagatggaacagtgccttgcacatacctgtgcattgatctttgtcagaattttggttcctagtgacacaacagtaggaagatgcctcttctctttcttaggctgagattgagagctgctgagtggcagtgctccagaatcacgggatggggccttctgtttcagctctgcgtgacgtgtcctatggggggcctgctcatgaggctgcagggggatgccaacaacctgcatggattcgaggtggactccagagtttatctcctgatgaagaagctagccttctgaacctcgcctgaagccagcctctctgccaagtcactcaggtcatgggcattgttcaagcctgagtggca

SEQ ID NO: 1767 - DNA, 1111 bp, Homo sapiens
  SIMILAR (315)..(488): 791254mologous to Homo sapiens RNA polymerase II subunit hRPB17,accession number Z49199,Smith-Waterman Score=229.
agcgcgagaacccgctctacagcctattgcttccccgccctgggcagagccacctggacatgagacccgccctcaatgccgaagcctctcggaagcaatctttcgggacggaagttaagtagccccgagcgggaggctgtggcggaagtggtcgcgttaccgcttgtttgtgcgcatgcgccactctcgtctggccgccgcgctttcaggaggtgcttttggttctctccggtcttgtccacgctagggggtgcacgtactcccaactgtggtcgcgctctcaccccttctgctgctctcgtggccccctcgcgatggcgggcatcctgtttgaggatattttcgatgttgaaggatattgaccggaaggccaagaagtttggaccgagtgttctcgactgcattgtgagagtgaatctttcaggatggatctaatcttagatgtaaacattcaaatttaccctgtagacttgggtgacaagtttcggtttggtcatagctagtaccttgtatgaagatggtaccctggatgatggtgaatacaaccccactgatgataggccttccagggctgaccagtttgagtatgtaatgtatggaaaaggtgtacaggattgagggagattgaaacttctactgaagcagcaacacgccttctctgcgtacgtgtccctatgggggcctgctcaatgaggctgcagggggatgcccaacaacctggcatggattcgaggttggacttcccagagtttatctcctgatgaagaagcttagccttttgaacctcgccttaaaccagccctctttgccaagtcactcaggtcgtgggcattgttcaagcctgagtgggcagccgctctttgctcacctgttgaggaagggctggctcactgtccaccggtggcggcatctttaactggcctccactcaatgggaaacttgactcgcctgtgaaaagacacagaagggaagaagctgaaaatgaatcacccgcccttatgtatatgatttttaaattaaactttactttttcagactgcccctacacctttctgtaaaaagtccatttactgtaaaatcgttttttccagttaaaaaaaaaaaaaaaaaa

SEQ ID NO: 1768 - DNA, 2418 bp, Homo sapiens
  SIMILAR (1219)..(2415): 1001254mologous to Homo sapiens partial CDS,accession number AP000693,Smith-Waterman Score=2012.
atggggtttcaccatgttggccaggctgatctcaaactcctgacctcagataatgcttatgatcctgatgtgaacgctaaacaaatatggattgacaaaacagtgataaatgaccatatatgcttgacattcaccgacaatgggaatggtatgacttctgataaattacataaaatgctaagctttggcttcagtgacaaagtcaccatgaatggtcatgtcccagttggattatatgggaatggcttcaagtcgggttctatgcgtctgggtaaagacgcaatcgtttttaccaaaaatggagaaagcatgagcatgattaatttagcagaatcaaaagccagccttgctgcaattctggaacattctctgttttccacggaacagaagttactggcagaacttgatgctattataggcaagaaggggacgaggatcatcatttggaatcttagaagctacaaaaatgcaacagagttcgattttgaaaaggataaatatgatatcagaattcccgaggatttagatgagataacagggaagaaggggtacaagaagcaggaaaggatggaccagattgcccctgagagtgactattccctgaggtctaaaacagtgagaattacctttggattcaactgcagaaataaagatcattatgggataatgatgtatcacagaaatagactcatcaaagcttatgaaaaagttggatgtcagttaagggcaaacaacatgggtgttggagtggttggaattatagagtgtaatttccttaagccaactcataataaacaagatttcgactatactaatgagtacagacttacaataacagcactaggagaaaagctgaatgattactggaatgaaatgaaagtgaagaaaaatacagaatatcctctaaatttgccagttgaagatatacagaagcgtcctgatcagacatgggttcagtgtgatgcctgtctaaagtggcggaaattacctgatgggatggatcaacttcctgaaaaatggtattgctccaataaccctgacccacagttcagaaattgtgaggttccagaagaacctgaagatgaggatttggtacatcccacttatgaaaaaacctacaaaaagacaggaatcattagtgaatacccccccattgaagcttatagagaaggtgtaacagaagaggtgatacatgaattttaccagttcacgtgttgcttgaaacggagactttctactcgttcctcaattttgaatgcaaagaatcggagattgagtagtcagtttgaaaattcagtttataaaggtgatgatgatgatgaagatgtcatcatcttagaagaaaacagtacccccaaacctgcagtagatcatgatattgacatgaaatcagaacagagtcacgttgagcaaggtggtgttcaggttgagtttgtgggtgacagtgaaccttgtggccagactggttcaacaagcacctcatcatcccgatgcgaccagggaaatactgcagctacccagactgaagtaccaagtttagttgttaaaaaagaagaaactgttgaagacgagatagacgtaagaaatgatgcagtgattctgccctcctgtgtagaagctgaagcaaagatacatgaaacccaggaaaccaccgataaatctgcagatgatgcaggctgccaattacaagaactgagaaaccagctactccttgtcactgaggaaaaagagaattataaaagacagtgtcatatgtttactgatcaaatcaaagtgttacaacagaggatactagaaatgaatgacaagtatgttaagaaagaaacttgccatcagtccactgaaaccgatgctgtatttttacttgaaagtattaatggcaaatctgaaagtccagaccatatggtatctcagtatcagcaagctttggaagaaatagaaaggctgaaaaaacaatgtagtgctttgcaacatgtaaaggctgaatgcagccagtgttccaataatgagagtaaaagtgaaatggatgagatggctgtgcagcttgacgatgtgtttagacaactggacaaatgcagtattgagagggaccagtataaaagtgaggttgaattgctggaaatggaaaagtcacaaatccgttcacagtgtgaagaactcaaaactgaagtagaacagttaaaatctacaaatcaacagacggcaacagatgtttcaacatcaagtaacattgaggagtctgtaaatcatatggatggagaaagcctcaaactccgatctcttcgagttaacgtaggacaactgctggctatgattgtgcctgatcttgatcttcagcaagtgaattacgatgttgatgtagttgatgagattttaggacaagttgttgaacaaatgagtgaaatcagtagtacttaa

SEQ ID NO: 1769 - DNA, 964 bp, Homo sapiens
  SIMILAR (47)..(964): 971254mologous to Homo sapiens partial CDS,accession number AP000693,Smith-Waterman Score=1519.
aaattgtgaggttccagaagaacctgaagatgaggatttggtacatcccacttatgaaaaaacctacaaaaagaccttgaaacggagactttctactcgttcctcaattttgaatgcaaagaatcggagattgagtagtcagtttgaaaattcagtttataaaggtgatgatgatgatgaagatgtcatcatcttagaagaaaacagtacccccaaacctgcagtagatcatgatattgacatgaaatcagaacagagtcacgttgagcaaggtggtgttcaggttgagtttgtgggtgacagtgaaccttgtggccagactggttcaacaagcacctcatcatcccgatgcgaccagggaaatactgcagctacccagactgaagtaccaagtttagttgttaaaaaagaagaaactgttgaagacgagatagacgtaagaaatgatgcagtgattctgccctcctgtgtagaagctgaagcaaagatacatgaaacccaggaaaccaccgataaatctgcagatgatgcaggctgccaattacaagaactgagaaaccagctactccttgtcactgaggaaaaagagaattataaaagacagtgtcatatgtttactgatcaaatcaaagtgttacaacagaggatactagaaatgaatgacaagtatgttaagaaagaaacttgccatcagtccactgaaaccgatgctgtatttttacttgaaagtattaatggcaaatctgaaagtccagaccatatggtatctcagtatcagcaagctttggaagaaatagaaaggctgaaaaaacaatgtagtgctttgcaacatgtaaaggctgaatgcagccagtgttccaataatgagagtaaaagtgaaatggatgagatggctgtgcagcttgacgatgtgtttagacaactggacaaatgcagtattgagagggaccagtataaaagtgag

SEQ ID NO: 1770 - DNA, 564 bp, Homo sapiens
  SIMILAR (291)..(449): 941254mologous to Homo sapiens partial CDS,accession number AP000693,Smith-Waterman Score=259.
ccacatggtaaatctttttggctttgtgggccacataaaggctctgttgcatattctttgttttgctgctttgtttcttcacaccttttaaaaatacaaagccattcttagcctacttgcaggctggatttagttcattggtttacttgttgattcctgggatagcacaaggaatttacatgtttggaattgtttttgtgtcttctgggataagggggaagaggaagattatatcttgtgttttgggcatgtcacactagaaatagttcctttaaggtgatgatttttccctccaacagattaatgctgaactgttgtttcggccaactgctctttcaactccaagcttttcttctcctaaagaaagtgttccaagaagacatctttcagaaggaacaaattcttatgcgacaagacttctaaataatcatcaagttccacctcagtctggaacctggggagccaacagggtcagtggctaagattggttttccatttggggaatattaaacagagcttttacttgacacttctgtgacagtgatgccaattcgggatcattgg

SEQ ID NO: 1771 - DNA, 4752 bp, Homo sapiens
  SIMILAR (1999)..(3354): 881254mologous to Homo sapiens partial CDS,accession number AP000693,Smith-Waterman Score=1951.
  misc_feature (1)...(4752): n = a,t,c or g
taaatcatgagttagattgatagttttcagggcaaatccaaacagtctacattaatttccgtctttatttcgttaaggtttcacatggacactggtggatatggaatggcttttttctgcgcaattcacatccgaccaggtcaagtgactggagttcaccggtctcgggtataccgcatctcgcgccaggcttcaaactctagatccccgagtctcgagctccagctgggtgtcgagacgggtacgggccggccgcgcctcgcgcatgccccnttaggcccgcagggccccgcgctggaagctcagctcccactgtaccctgctttaaccagtcaggcaattcatcttccccaagctcccaattcggcattgcctggaggcggaagtgggtgggaggggccagacgtgcgcccctccccggaagtgggcggtacccatagggctccacagtcgttccgccacctcccagtcgggttgcggcggaggccgttcctggctttgtagctcgctcaagatggcggcgcagccaccccgcgggatacgcctcagcgcgctttgcccgaagtttttacatacaaattctactagtcacacctggggccattcagtgcagttgctggaattaataggataatgcttatggatccctgatgtgaacgctaaacaaatatggggtttgacaaaacagtggattaaatgaccatatatgcttgacattcaccgacaatgggaatggtatgacttctgataaattacataaaatgctaagctttggcttcagtgacaaagtcaccatgaatggtcatgtcccagttggattatatgggaatggcttcaagtcgggttctatgccgtctgggtaaagacgcaatcgtttttaccaaaaatggagaaagcatgagcgtgggccttttgtctcagacctaccttggaagtcataaaagcggagcatgttgttgttccaatagtggcattcaacaagcaccgacagatgattaatttagcagaatcaaaagccagccttgctgcaattctggaacattctctgttttccacggaacagaagttactggcagaacttgatgctattataggcaagaaggggacgaggatcatcatttggaatcttagaagctacaaaaatgcaacagagttcgattttgaaaaggataaatatgatatcagaattcccgaggatttagatgagataacagggaagaaggggtacaagaagcaggaaaggatggaccagattgcccctgagagtgactattccctgagggcttattgcagtatattatatctaaagccaagaatgcagatcatcctacgtggacagaaagtgaagacacagctggtttcgaagagtcttgcctacatcgaacgtgatgtttatcgaccaaaatttttatctaaaacagtgagaattacctttggattcaactgcagaaataaagatcattatgggataatgatgtatcacagaaatagactcatcaaagcttatgaaaaagttggatgtcagttaagggcaaacaacatgggtgttggagtggttggaattatagagtgtaatttccttaagccaactcataataaacaagatttcgactatactaatgagtacagacttacaataacagcactaggagaaaagctgaatgattactggaatgaaatgaaagtgaagaaaaatacagaatatcctctaaatttgccagttgaagatatacagaagcgtcctgatcagacatgggttcagtgtgatgcctgtctaaagtggcggaaattacctgatgggatggatcaacttcctgaaaaatggtattgctccaataacccatgacccacagttcagaaattgtgaggttccagaagaacctgaagatgaggatttggtacatcccacttatgaaaaaacctacaaaaagaccaacaaggaaaaattcaggatcagacagccggaaatgatccctcggattaatgctgaactgttgtttcggccaactggctctttcaactccaagtcttttcttctcctaaggaaagtgtttccaaaagaagcatctttcagaaggaacaaattcttatgcgacaagacttctaaataatcatcaagttccacctcagtctgaacctgagagcaacagcttgaaacggagactttctactcgttcctcaattttgaatgcaaagaatcggagattggagtagtcagttttgaaaattcagtttataaaggtggatgatgatgatgaagatgtcatcatcttagaagaaaacagtacccccaaacctgcagtagatcatgatattgacatgaaatcagaacagagtcacgttgagcaaggtggtgttcaggttgagtttgtgggtgacagtgaaccttgtggccagactggttcaacaagcacctcatcatcccgatgcgaccagggaaatactgcagctacccagactgaagtaccaagtttagttgttaaaaaagaagaaactgttgaagacgagatagacgtaagaaatgatgcagtgattctgccctcctgtgtagaagctgaagcaaagatacatgaaacccaggaaaccaccgataaatctgcagatgatgcaggctgccaattacaagaactgagaaaccagctactccttgtcactgaggaaaaagagaattataaaagacagtgtcatatgtttactgatcaaatcaaagtgttacaacagaggatactagaaatgaatgacaagtatgttaagaaagaaacttgccatcagtccactgaaaccgatgctgtatttttacttgaaagtattaatggcaaatctgaaagtccagaccatatggtatctcagtatcagcaagctttggaagaaatagaaaggctgaaaaaacaatgtagtgctttgcaacatgtaaaggctgaatgcagccagtgttccaataatgagagtaaaagtgaaatggatgagatggctgtgcagcttgacgatgtgtttagacaactggacaaatgcagtattgagagggaccagctataaaagtgaggttgaattagctggaaatggaaaagtcacaaatccgttcacagtgtgaaggactcaaaactgaagtaggaccagttaaaatctacaaatcaacagacggcaccagatgtttcaacatcaagtaacattgaggagtctgtaaatcatatggatggggaaaggctcaaactccgatcttttcgagttaacgtaggcaacctcctggctatgattgtgcctgatcttgatcttcagcaagtgaattacgatgttgatgtagttgatgagattttaggacaagttgttgaacaaatgagtgaaatcagtagtacttaaagtatatgttatgtaagataaaatatttgctcaattcttttggttgtacagctttcaaaatataattaattttgttttatagatatgataggcaacagactgaaaaccataatctttactgtattctatgcattcaaatgtggtcacaaatattgtggacacattatcttatgttttgaaatacctgtgaattgttggcattgagcagctgaagctaactcatgactctgttttgaatgtaaatatttgtaattaagcctgcacatatttttttattgccctagagtactccaagtgtttttcaccaaggagcttttccaggttgcccctaaggctttgtgcaattttttctggttccccaaagtgtatttttctctaagtcgaggggctatgccattaattacaaatggggaaatgttacctttgattttcttattaaagggagttttaaataggggtttttttaaataatgtagtaacactcctgatacaactctggttataagtgaattgagcattaatgtttcttttgtataaattccctgccctgaataatttatttcatgaaaataaggtaaggcaaaaaccaactccattttgccagggattttgttgtgctgaggattgccaatcacgggttaaacacaaagtgtttttataggaatgaaggaaacagtcttttaacagaaaaagggtattggaaatatttaatgggccaccaagtttactttgaaggcccatttttgggctgtttaggtcagcatgaagtgggcatgataattttttaatatttctttttgtgaaattcccctgtacagcccttttgtaggattacctacaggttaatgtgagttgaggaagacagtctttctcaaacaatactacataccttttattattattacaaacctaagtgttttatatcctagagtcaaggaacaaatttccttaggattatagtattacatgccataaaatactatgctttattggtcccatgttttggtgccatttttaaagagatgggctttctattaaggtataaactatggatatataagaacccatattttcccacaactaaaatgtgccattattttttccccaaagttttatcattgcctatttatttttaccctttgtttttgaacattcaatcccgttcattttgtatgtatgccttaatacgtgtcggtcatatatagtattgaatttttactgtatagggaattctgggaaagaggcaaataaatgaaggattgtttttatttgcccggataaagtaattgaaagtgtatttttgggtatgaagctggttttctgtcacaatttgtaatttcccgaaattttaaaatatcttataataaaataaaaatatatgatggctaactgttc

SEQ ID NO: 1772 - DNA, 1913 bp, Homo sapiens
  SIMILAR (1675)..(1911): 451254mologous to Homo sapiens p40,accession number U93572,Smith-Waterman Score=179.
gacgatttcggcacgaggtgatttcaattttttctgggctggagctccctgatggaggggcaggccaccatctttgctgtttttgcaacttagccacttcaaccttcagtctttggagtgtccaaggagaccagggggtgatgtggaccctcagcattagcacagctgctctataaaaatgaggcccagactgcttttttaagcactttcccaatgccattcctcctcactgggcaaaacctccaaactggggtctccagccacctcctacaggtgtgtttgggccagcaacaagttcattcatacctccctagggcaaagcttccaaagggagcggtaggctgccatctttgctgtttcacaggcttcactgatgataactccaggtactggaaaatctgaggctactagagactggagcgggccctgggcatactgcagcagccctatggaaaagtggccagactgttacctgggttcccattcctgtatcttctcactaggcaagtcttgcaggcctgggcctctacctaaccccccctaccagaactgttgagccagtagcaactcagccactccctggagagagcctccaggggcaactgaaagcctctctgccactgcttctgcagtggaactgtccttgctaccctcagactgatgaaggagctaacacccttatctacaccttcaacaagctttaattgaccaaagcccatctctcatgggttctacacactccccactgctcatgacagggaacccctggattggcccccacagcacgaattctccatcctgattgctgattgcagtaaacagttgctgacctgtattctccgggggtagaaccctgaggagacaaacaaaagacccttggctacaaccactactaatgtcccttcctcttcttccccaaagttagggaagaaatataaacactcgagattgccccagagctgcagtgggcagcctcaggagtgccaagccatgatctacagccagcactcaaggaggagagaagcacattttcagatcattgagagtgaacatggctgcaactgtgaggaaacataggggagccacatgaccaagcaagactctaccaactgaccagtaagcccaagtgccacctactggatcacatcccaaagcttcagcaccaaaaataccttactaatatactcccctctgaaaccagaaatgagaagtcagcttcaaataaagaacctgcacaaagcctcagcctggtgaaaacatctgaaaataagtctatctgactgtactcaatctacactgcaattaaaggaaaacccataggtggaaatgagaagaaaccaatgcaagaactccagtaactcaaatggcctctgtgtcatatgtccttctaacaaccacaccagttctccaacaagagttcttaacctggatgaactgtctggaattacataaatataatgtttgaatatggataggaaaaaaaatcatctaaactcaggagaatggcaaaacccaatccgaggaaaataagaataacattaaagtgttacaggagctgaaggataaagtagctggtataataaaaaagaacctaaccgatctgaatgcgccgaagaacacattacttgaattccacaatgcattcacgagtattaacagccgaaaaataaatctgatgaacgaatctcagaacttgaggattgggtctctaacataagatggacgaaagtaaattagaatgaacaaatccttcacggaggatgggatgatataatgaggccaattctacaaatcactggcatctctgaaagggaggtggagaaatcaaataacttggaaaacgtagttcaggatatcatctttgaaagcttccctaaccttgctagaaaggccaacagtcaaattcaggaaat

SEQ ID NO: 1773 - DNA, 2385 bp, Homo sapiens
  misc_feature (1)...(2385): n = a,t,c or g
ttttttttttttttttttttagagtgtcactgatgctttatttacatgcgtcaccatctcttttacaaactaaattacggttttaagtggaatacacaaggcaatatctacaaacaccaaggaaagttaagtactgcatctttatttcatttggaaaggggaagattcccaaatcaaactggttttgatccttaaaaaaaggcggcagagttaattcatggcaacatatggttagacaaaaatcctcagtaagaatgccatatgataagtgttcgcatttgaaaggaaggatggagggtgcttcaaaatcaaaagtctcaactgcttgactcttcaggtgtttaaatatggccacacaccatatttagttcctagattaatatgggattatgagccaagggaattgaaacagataagatagtttttacagatactgtatacagatttttttttcccattcatgcaaactttttttcttaaaaaaagttaaacatgtgaagcccaaaatgcacaatacatttttttaaatatttaactaatttttctggtcctccttcacatttgtttacatttcccatgtacataatgtgcctgggacaagtatacaagagaagactggattgccaggcaatgagataattttagagaaataagtgacccagacacatagttccttaaaagcagccgcacacgtatttctggagtgtggcaaagaggcctcatgacccaatcattcatcaaagagyaaatacayacagatacaaactaaacaagaggaaaatattccattcatttaaactgcataaaatgttacccacttaagatttagataaaatatactcttttatttgggcatccgcttcaagacctcatttgacaggcatgattccatcagaacttcacttcctctagtagtactctgcctccccaggtctctgagagaggctagctttttcgtacctctttactggtgattgcatttctaccaaaaaaaaatttttttttttaacattatgcctaatcatacaatgttcacccaaatacagcaagaaaaataaaaccagagttcagagctgttagggtttcctttttgctttcagagaggatgagtaacatttttttttttttttttgacacggagtttcactcttgttacccaggctggagtgcactggccatgaatctcggctcactgcgatcctcgccttcctgggttcgaacagattctcctgcctcagcctcccagagtagctgggaattatcaggcatgcgcccacccatgcccaggctaaattttgtatttttaaatggagacggggtttctcccatgttggtcaggctggataacatttttatttcccctcgcaagtccttggcaccaacatggaggacttctttttgactggcttaattcttcatggccttttccaagaagattcaaatgctccttattcctttaagtggggttcactaaggtagagggcaaagtctgttccccaccatctttaaaactgcgtaacaagtttgggaagccaccttgaaatcacaccctgaggcggggcaatactttgtcctngaagtagtaagccatggtgatcctctcctcagggtggggaagcaacacacacaatgctaaaaattaacaccaaaaacaaacacaaagtccgccttgtactacacatgtgtgactggatcctcccattaacaggagtgacaagcttctgaatttttaaaatgtgtttcagcaatcatattgcagaggaagcaataaaggaaaccaagctcagattcattcacagttaatggggtacactgagcctggcagccagttctcatgccaggacagtgaaggcttgtgataaagctctttcctagctttggtaacaggtatcaggttctggagccctggagagaacagcagatcccaagagcgcatgtcatgttttcaacattaggtactcttctaatttctcatcaaaaagtaggcggctccctagagcagcttatttacaggccaagtgtggcctcggatagttctcatcataaatcaaacattacagctgccaggccccttgaggctaagcattctgttgatatgctccagatcagaaaattattgttagggacccgtgacactcactcagaatgtgacatggtggccaacggctggcctgtcctgaaagcagggtctcaacataaggggcagagggctctggcagcacccctgcccacttcagaaccaggctagtctctgggccctggcctctctgcaggtggctgagggtgagggtgccgggaccctagacaggcttcactaccagattctcggctgaccctctccaggggctggtgggtctcgcagtactgatgctgcacttgacttta

SEQ ID NO: 1774 - DNA, 1773 bp, Homo sapiens
  SIMILAR (948)..(1229): 471254mologous to Homo sapiens Human secreted protein, SEQ ID NO: 7867,accession number AAG03786,Smith-Waterman Score=204.
aaaggatgtgttaacttaaattcccatgaaggaaggacgccttgtggacaactgtaacaaaatctcagactataaaatccacagcacaaaattaagaagcagtgggtacacattagtttcacaaagaatgtgcatttttcttacatagccttgaagttatctccttcactgtctattggaggtaacatcatcttggggtgcccagaggctgacatggacatcgacttctgatgtctcagccgacaggtagatgtaacaaactgaggcagggcctagctgcgtaaccgaacatttctgtcaggctgggaggggtttgggttccaggcagaggcagaaacacagtatgaaggagcagtgacccacagagcaacctgtgtgtaatgcacacaccttccctccccaagcccatcctcatttcctggtaaagaataaaaatctccctaagcttgttttggagattctggagcaactgctaacctatagttgctttttttttttccaaacagtaatcataaaaatctattaccttaaaataaaatagcagattacatgtttgaatatctgtttctatgagagggacaatgtcctctgagggtatgcacaaaataaaacctattctaagagatgcctcaattcaaatctaagtggtaaaatgaatatataatatgagcatgctatgctctcaacctgttcccaaaacacactgacatattttattttttctttatttattttttttgtagagacaggggtcctcgctatattacccaggctggtcttaaatttgtggacttcaagtgaatcctcccgccttggccttaccaaagtgttgggattataagtgtgagccaccacacccggcccgcactgatgtattttaaatgcaattaataagaattacaggtataggaactagctgttatataacagtatcctatgttgtttggtgtttttttgagacagggttttgctgtcacctagctgcagtgcagtggtacgatcatggctcaatgcagcctcaacttcctgggctcaggtggttctcccacctcagcctcctaagtggctgggaacacaggcgcactccaccacgcctggggtaattttgtatttttagtagagagagttttgtcatgttgcccaggctggtcttgaactcctggggctcaaacgatacgcctgccttggcctcccaaagtgttgtgattacaggcatgagccaccatgccccagccttcccaatgttgttttaaacaatatagtcctagaaaccttccctaatcaaaaggacatttactcccaagataaaaaacagtccagcagagcccccttatcccaagatgggcaaattcatcagagcaaattaactgctaaccagacatggtaagatagagtggctggaagtctgcagtttcatctaacacacacagttaccggacaaaactacccccaggagtctcactgggacacattatttggaattccagctcagtaatcatgtccttggaattcaagggcagtttctttcctttaaggataagtaggaatacagctcttccagtgtctttctgcagaaatcctttggaaggattaaaacctggaaactggcaagttcttcctttccctaactcacgatacacagactaacgacatcttattggtgtcaacttcctagtagctcttcaggtggcccatctgctccacttctaccaggcctcagtatagagcctcgctccttgtcttcactggtcccctgccttgccccacacctca

SEQ ID NO: 1775 - DNA, 493 bp, Homo sapiens
  SIMILAR (265)..(492): 851254mologous to Bos taurus GTP-binding protein,accession number J04196,Smith-Waterman Score=321.
  misc_feature (1)...(493): n = a,t,c or g
gagaggtcnnnnnaactgagaccatgagtaacagtcgaggaatccggaggaggcgccggaccggggggannnnnntatttaaacagatcacatcatgcgtgagtacaatctagtggtccttggttcaggaggcgttgggaagtctgctctgacagttcagtttgttcagggaatttttgttgaaaaatatgacccaacgatagaagattcctacagaaagcaagttgaagtcgattgccaacagtgtatgctcgaaatcctggatactgcagggacactcagtccacgtttaacgacttacaggacctgagggaacagattttacgggttaaggacacggaagatgttccaatgattttggttggcaataaatgtgacctggaagatgagcgagtagttggcaaagagcagggccagaatttagcaagacagtggtggtactgtgcctttttagaatcttctgcannagcanagatcaatggttatgagatat

SEQ ID NO: 1776 - DNA, 1101 bp, Homo sapiens
  SIMILAR (1)..(468): 1001254mologous to Bos taurus GTP-binding protein,accession number J04196,Smith-Waterman Score=803.
atgcgtgagtacaagctagtggtccttggttcaggaggcgttgggaagtctgctctgacagttcagtttgttcagggaatttttgttgaaaaatatgacccaacgatagaagattcctacagaaagcaagttgaagtcgattgccaacagtgtatgctcgaaatcctggatactgcagggacagagcaatttacagcaatgagggatttgtatatgaagaacggccaaggttttgcactagtatattctattacagctcagtccacgtttaacgacttacaggacctgagggaacagattttacgggttaaggacacggaagatgttccaatgattttggttggcaataaatgtgacctggaagatgagcgagtagttggcaaagagcagggccagaatttagcaagacagtggtgtaactgtgcctttttagaatcttctgcaaagtcaaagatcaatgttaatgagggtcccatcatcagacctcttgtgggtgagacgaagggcacgggccacacttctctagccgctgtcatccttgcccttagcatcactaatgtctccagttgcacaggttggggagttcaacgcagccaccaggatcaagggaactctaagcatgcagcctcctcagtttggaaagtaggatttggaatagtgagactaggcactgggacctgcctgtcttccttggagaggggatacatgtgcatggagaaagagatgtttgatccttatactcccagcagggtcctgaagcccagggtaaaactgggaccagatgttgttgccaaagaggacaaggagatgaacccagccaggaagacgagtggaaagggatcgaggaagaaagggaaaaacgtggaggataggacagttcagtttgttcagggaatttttgttgaaaaatatgacccaacgatagaagattcctacagaaagattgttctccacacagtaaccatcataattccatttaaatggagaagtcctatgcactggactcaggcccaacccagccccaccggagcctggagtctgatgaacttggttggtgggtcccatggaggtaaggacaaggacagcaaggaaccacatccc

SEQ ID NO: 1777 - DNA, 2012 bp, Homo sapiens
  SIMILAR (170)..(271): 911254mologous to Bos taurus GTP-binding protein,accession number J04196,Smith-Waterman Score=153.
ggcacgagaggaggtggaggaggtggaggaggcgccggaccgggggggatagattcccagaagtgggataactggatcagagggtgattaccctgtgtataagagtatgtgtctcactgcaccttcaatggcattgagtagatcgtcagtatttaaacagatcacatcattgcgtgagtacaagctagtggtccttggttcatgaggcgttgggaagtctgctctgacagttcagtttgttcatggaatttttgttgaaaaatatgaccctttcgatagaagattcctacagaaagcaagttgaagtcgattgccaacagtgtatgctcgaaatcctgggatactgcagggacagagcaatttacagcaatgagggatttgtatatgaagaacggccaaggttttgcacttagtatattctatttacagcttcagtccacgttttaacggactttacagggaccttgaggggaaccagattttacgggtttaagggacacgggaaggatgttcccaatgattttggttggcaataaatgtgacctggaagatgagcgagtagttggcaaagagcagggccagaatttagcaagacagtggtgtacactggcccttctggaatcctccgcccaaggtcagagatccaggttaatgaggttctctagtgaccctgtccgacagattaatcgggaataccaccagtggaaaagaagaagccttagaagaattccatgtcgacgctcctaggccccatagtccgcaggcagctctgagccagattacaggaatgaaagaactgttgcctaattggaaagtgccagcattccagcacttcaaaaataaaaaatctgaaagaggcttctcctgttttatatattatgtgaagaatttagatcttatattggtttgcacaagttccctggagaaaaaaaattgctctggtgtatatctcttggaaaataaagacaatagtatctctcccttccaaatagcagttataacagatgtgaaaatatacctggactctaatatgattatacaaaaggggcatggatggcatttcaaatgttaaaatattgctcctataatccaaatggatttccatattggatcctttttatccatggatccctaccctatccaagcacctaaaaagttgaacccccattatacctttatatccctgtaatggataccctgattatgaaatgtcccccctcaaacctcattgccagcagataaccttttttggagtcattgaccttcattttatatttaaaaaaattatgggatatcatcctgtcattatattcctaattaaaattggtgcataatgctttggaaaaatgggtcttttataggaaaaaaactgggataactgatttctatggctttcaaaagctaaaatattataatatactaaccccaacctctaatattgcttcttgtgttttactgtcaagattaaattacagcttttatggatgattaaattaatagtacattttcatttggtttgtgtgtttttgttattgtttatagattaaagcgtttattttataatgaccacattgttttaaatgcgacagtagctcctttctgcctagtatctgcagaacactggctttaaactatactaagtaactggtgatttctctaggaacagacctcgcactttctgttctaaatatatttattcctactatacagtaaaatacatcagacaacatagaatagttttgtatattctctcttgatcttaaagattgtatcttattgaatatcccactgtatattatttttatatgtaaaaagataagtttaatactgtatcagggtttaacttttactatttcagatcttccacagcttgtaatttcatcaagggaatccttttgcattgttaatttgttgggtgtgagtccaccaatgaagtgttatgtgaaaaatttcaaacttgctttatattaaatggagaaattgtgagagaggggagaaaaggttaaaccctt

SEQ ID NO: 1778 - DNA, 618 bp, Homo sapiens
  SIMILAR (502)..(546): 931254mologous to Homo sapiens B-cell growth factor,accession number M15530,Smith-Waterman Score=72.
catccttgcatcttaggttcacccgttgactcaccaactggctcagtggcccttgatgaaaggatacatgctataaattagtagaagagttcgtctcctggggccaacatgcttgcttcccataattggatgataaaaattataaatcctgatgtgtttctctttttaccaatggctgtcaggaaactcaagagtaaaacttaattgcatgattatgggaattacaccagttagatttacagaataatttctcgtgcttttttacttcttatttttattttactgaacccctatgattaagattgtaaatagcctctgatgctttttgaaaatcctgagtaattaaatcagtttggttgaggactcgatcccttaagtccctgctcagtgctctttttaagatacagcatcatgtttattggttaaaagaaagatgaggctggatgccgtggctcacgcctataatcccagcaccctgggaggccgaggcgggtggatcaccgaggtcaggagttcaagaccagcctggccaacatggtgaaacccgtctccaccaaaaataaaaaaattagtcgggtgtggtggcacaaccgcaatcccagctactcgggaggctga

SEQ ID NO: 1779 - DNA, 1338 bp, Homo sapiens
  SIMILAR (706)..(1179): 461254mologous to Homo sapiens gag,accession number AF156961,Smith-Waterman Score=344.
atgcccactgtgggcaaggcccaggcaagacgacggactcgtgacacgttactcctggatatcacgcaagtactgatagatcagtcaccacggaaagacacgggcttagcacaacagacaggtgtgattgtgccctcaaaaggcattgtgaaatattggcgggcccagctcaaaggtgatatgaaatatgcctctccagcatttgagttattttacttttctgtgagagcccagtccacagatgggattgtgacattgctagacccaacaactagagaagattgtgatatatcttcagccccaaacccagaggtgcgcacccaacgccaggcagaggtagcaggtgtggggctgctggcggtcaaggtcccccgagatgaggagggtgttctaggaggggccccggggccacagaagaggagcagagtgtgcggcgagcccaccttgcaaaggcgctctggtccgcttccagtggcccgaccaggctcccggtgtcctcctccaacctcagtttcctcacctgtcccagaggacgaatatggcaggactgttgtgatgattaggctggataatcctggcatatcaggcaggactatagagaacaatcctccagaattagaaaagcaacttccaggggaaccatctgagaactccccttatttggggccacctcaagttctcttcttattacgagaccctagggaagatgttatgctgcttctaaaccaaaccccaaccacagctgaaaagcaggcagttctgcaggcagcagagattttcagaaatgagcaacaaatctcctataatacatcaaaagggaagaaaggagatagggaatgtgaagaaatagcagaaacaccatttcaaataggaagtgaagcagttcctcttgacaaccctgactggaactccagtagctctgcgggtgaatggaaaaggagacactttttaatatgcattttagaaggtctggaaagaactaaggccaaatttcttaattgttctaaactgtctatggtagaccaaaagccagatgagaatcctgcagcatttatggaaaggctgagagaggcactaatagagcaaacctccttatccccagattcggtcgagaaacagctcattctaaaggacaagtttgttacacagtcagcttccaatattagaagaaaactacagaagcaagctataggaccaattagcaccttaaagaacctcctgaaggtggccactttggtcttttataatagaaaccaagaggaggaccctgtagtcccagctactcaggaggctgagacaggagaatctcttgaacctgggaggcggaggttgcagtga

SEQ ID NO: 1780 - DNA, 496 bp, Homo sapiens
  SIMILAR (185)..(3): 1001254mologous to Homo sapiens unnamed protein product,accession number AK021623,Smith-Waterman Score=328.
  misc_feature (1)...(496): n = a,t,c or g
gttttctgatgcaaccaaaatgcttcagggctcgtcttatctggaggtttgatggctacagacgtgaggggcttccaggtagagctcagacctgagacttctggtcccctgtctggacatctgtatgaagacggagaagcaccagccaacctctccacaaccctcaccaagttctcatggaacatcctctgatggtccctctcggtgctgggttctggcaggagaaagagaagtcagggaacagaagagctgctctgccaaagtcatacccttcttggagacacagggaactccatctctcattctcactagcaatttgctgtggcaactcaaatgtttttccaagatggaacataagcagacgtgatgtgtttgccttccaggtctaacccatgcaaagcctcctgggaacacacctcacgctattttatattccatcaggtggatatggatgatgattaggaactagggtgaggtggagccagaanacacaagg

SEQ ID NO: 1781 - DNA, 2125 bp, Homo sapiens
  SIMILAR (986)..(1105): 801254mologous to Homo sapiens Human myelin oligodendrocyte glycoprotein gene,accession number AAZ29204,Smith-Waterman Score= 193.
tttttttttttttttttcagtgtccataaataaagttttattggaatacagccacgttcgttcatgtatgtgttgtctatggctgcttttgcactacaatggcagaattgggtggttgcaacatattttatggcccccagccctaaaatatttactgtttggccctttacagacaagcttgctggacccttggctctaagtcaattcgtgacgatttttccaactgctgacatttataaaatgggcagtcccctgggcttcattcatcagtaaattgggttgggtgggcaactaggccctgtgccattttggcttctcctcaggcagggatctcacatgtgtggaagggctttcaggtttcaggaaatcatcaatttccagttttaaggtctggatggaaaataattatattttttttccaccatgtttcacctcttaaacttcttgcttaaagatcttcacctgtaatgttgtatacagaggcttattagtatactgaaaatgaagaaacagaaacacttgcggtataccaagggttcagagttttccagccacagctctagtggctaggtttggggaagagactgtttcctctgtactcacaatgttagaacatgatgtttctaggaagtagaacattaggttatttctgtcttggaaataaatatttcacattctttagaaagtttgtttttttaaaaaagatcacatcaaataaactgttcaactttaagaaaaggtggaattccttcagctaactactacttcagatagatgaatatgttctttaaaaatctgtagattattgaaactttaaaagggatcattttagaacaaatatgaaatatgttacctaaaaagtggaaacaatactagactaactttctttttgctctctctccctcttgtctggctggactgctgcctccaaagttcaagcaattctcctgcctcagcctcctgagtagctgggactacaggaatttttatattttttggtagagatggggtttcaccatgttggccaggctggtctcgaactcctgacctcaagtgatccacacacctcggcctcccacagtgctgggattacaggcatgagccactgtgcctggtcctaaactctaaacttcttttcttatgagctcttcttttcttttacaagtgctctttcttgaaaagaccattgtaaaggaggtcataacatgggatgtcaattcacatagatgcaccaatgactataagagaagcctccctagcttttgttttgagacggagtctcgctctgtcgctaggctggagtgcagtggcgcaatctcggctcactgcaacctccgtctcccgggttcaagcgattctcctgcctcagcctcccgagtagctgggactacctgcgcacaccaccacgcccagctaactgttgttgtatttttagtagagacggggtttcaccatgttggccaggatggtctcaatctcttgacctcgtgatctgcccgccttggcctcccaaagtgctgggattacaggcgtgagccactgtgcctggccaggcctccccagctttaagcaaagctgtgaagttaacagaatgattctaaatatctgcttgcttagaaaaagaaaaaaaaagtcatgtgaatccattggtcagaaaaaataaatatctacttgctacaggacaatagaatctaaaggcaatcatctaaatcactatcaatcaccctcccccagtctcctaaaatataagcaattagcaatgttcattatagtaggcatattatttttaagtcaaatttctaatggagttgtattcttctgtacttaagaagtaatcttgtagcacatatcgggctctttatatgtagagaagtatatgaccaatttactagctttagtgtaatttcacctcattacagaagttatagaggtgtgtataacatcacacctatgatttatttgatactaacttctggatatggaaaacaatatttaaaattttgaccactgcagagtgtaatataggacatcagttattttaggagttgctctttaaatgtggaaacatgatctcaatgtattgggccttcttttgggctgttttaagtaaaatttggctctgggc

SEQ ID NO: 1782 - DNA, 2058 bp, Homo sapiens
  SIMILAR (100)..(510): 381254mologous to Homo sapiens Human lymphocyte surface antigen precursor,accession number AAR11876,Smith-Waterman Score= 141.
cgaggctggaagaggatcttgggcgccgccagtctttagcaccagttggagtaagagttgagacctacttcacagtagttctgtggacaatcacaatggggatccaaggaagggtctgtcctgttcggggctgctgctcgtcctggctgtcctctgcccattcaaggtcattagccctgccagtgctcaacgggttcctaccccaaactgctgactgccaaaaacagccgttcaattgttcatctggattttggatgcgtgtcttcattacccaaaagctgggttaccaagtgtataacaaagtgttggaagtttgagcattgcaatttcaacgaccgtcacaaccccgcttgaaggaaaatgggtctaacgatcttactgtgcaagaagggccccgttgtaattttaccgaaccggcttgaaaatggtgggacatccttattcagagaaaacagttcttctgctgggtgaactccatttctgggcagcagcctgggagccttccatccctaagtcaaacaccagggagtgcttcctcacaaaactcccccgttccctgcgtagttccgtttttccccttggctggccacattctaaagggcttgatattttccaaatgggatcctggttgggaaaagaataaaaattagcttgagcaacctggctaagattagaagcgctttgggagactttgaagaccagtcctgtttgcaggggaagccccacttgaaggaagaagtctaagagtgaagtaggtgtgacttgaactagattgcatgcttcctcctttgctcttgggaagacccagctttgcagtgacagcttgaagtgggttctctgcaagccctcaagattattttcccctctggctccttggatgtaagtccagttagccatccattagtaccatctttggagggtggggccaggagtatatgagcatccctctctcacatggaacgcctttccataaacttccagggatccccgtgttgcccatggaggcatgcccaaatgttcccatatgtgggtgtccagtccagggacaacaagatccttaatgcaagagctagaggacttctggcagggaagtggggaagtgttccagattccagatagcagggcaataaaacttagagagggtccaagggctgaaaaatcgagtttttcctctgtctttaaattttatatggggctttgttatcttcccactggaaagagtgtaatagcatacatcattgggtgtgttaaagctatttccttgcccttttttttattggaatggtaggatatcctgcgtttgcccacacacagtttacagagtgaacactcttactacatgtgactggcaggtattaagtgtgcttattttaaatgttactggtaagaaagggcagtttcaggtatgtgtggatataggtatgaatgcagtgggggacccctttggttggttacagtttgagacttcaaaaaggtcatccttaatacaaccagaatcttgcagggggtattgtttttaccaatctggaatccaggcctccgtgctaactccctagctgactcaggcatagattgtatcaaaatccctttgtaacgggctcttagcacactcacagatgtttgaggctttcagaagctcttttaaaaaaatgatacaccccttccacagggacaaactttttcccttttccctgtgtattctagtgaatgaatctcaagattcagtagacctaatgacatttgtattttatgatcttggctgtatttaatggcataggctgacttttgcagatggaggaatttctggattaaatgttgaaaaaaaaacccttgattatactctgttggacaaaacgaggtgcaatgaatgatgcttttctgaaaatgaaatataacaagtgggtgaatgtggttatggccgaaaaggatatgcagtatgcttaatggtagcaactgaaagaagacatcctgagcagtgccagcttttttctgttgatgccgttccctgaacataggaaaatagaaacttgcttatcaaaacttaaaaaaaaaaaaaaa

SEQ ID NO: 1783 - DNA, 438 bp, Homo sapiens
  SIMILAR (122)..(409): 921254mologous to Homo sapiens NAP,accession number M86667,Smith-Waterman Score=456.
tcttttttagcgccatctgctcgcggcgccgcctcctgctcctcccgctgctgctgccgctgccgccctgagtcactgcctgcgcagctccggccgcctggctccccatactagtcgccgcctgcctagggtagttaaaagacgagtgaatgctctcaaaaacctgcaagttaaatgtgcacagatagaagccaaattctatgaggaagttcatgatcttgaaaggaagtatgctgttctctatcagcctctatttgataagcgatttgaaattattaatgcaatttatgaacctacggaagaagaatgtgaatggaaaccagatgaagaagatgagatttcggaggaattgaaagaaaaggccaagattgtagatgaaaaaaagggatgaggaaaaagaggaccccaaaggaattcctgaattttggtaactgtttt

SEQ ID NO: 1784 - DNA, 535 bp, Homo sapiens; identical to SEQ ID NO: 461
  SIMILAR (439)..(287): 581254mologous to Homo sapiens NAP,accession number M86667,Smith-Waterman Score=120.
  misc_feature (1)...(535): n = a,t,c or g

SEQ ID NO: 1785 - DNA, 419 bp, Homo sapiens
  SIMILAR (32)..(256): 931254mologous to Mus musculus putative,accession number AK002458,Smith-Waterman Score=371.
gtctcggagctcctggagtcttcctgcagagccgctggtgacctgggtgaaaacttttggcccgtttggaagcggcacgcaggacaacctgactatgtacatggatttagtggacggcatctttttgaaccaaattatgctgcaaatagatcccaggcccacaaatcaacgcatcaataagcacgtcaacaatgatgtgaaccttcgcattcagaatttgaccatcttggtgagaaacattaagacctactaccagagatggggtgatgattatgatgaagaaggtgaagaagcagatgagccgggggaagaaggaggagatgaggaacatgatccagactatgacccaaagaaggatcaaaacccaacagagtgcaagcagcagtgaagcaggatggtctaccttccgcttccctggg

SEQ ID NO: 1786 - DNA, 467 bp, Homo sapiens; identical to SEQ ID NO: 462
  SIMILAR (94)..(279): 1001254mologous to Homo sapiens NAP,accession number M86667,Smith-Waterman Score=307.
  misc_feature (1)...(467): n = a,t,c or g

SEQ ID NO: 1787 - DNA, 798 bp, Homo sapiens; identical to SEQ ID NO: 463
  SIMILAR (1)..(276): 901254mologous to Mus musculus putative,accession number AK002458,Smith-Waterman Score=438.

SEQ ID NO: 1788 - DNA, 1222 bp, Homo sapiens
  SIMILAR (1)..(276): 901254mologous to Mus musculus putative,accession number AK002458,Smith-Waterman Score=438.
atggacgtgacagtctcggagctcctggagctcttcctgcagagcccgctggtgacctgggtgaaaacttttggcccgtttggaagcggcagccaggacaacctgactatgtacatggatttagtggacggcatctttttgaaccaaattatgctgcaaatagatcccaggcccacaaatcaacgcatcaataagcacgtcaacaatgatgtgaaccttcgcattcagaatttgaccatcttggtgagaaacattaagacctactaccaggacatgggatatggccagacacaggcctggggagcagggatcctggagagctttctcgggggaaatgtctgcctgcggctggtggggttgactggcagggaaggggtgtcctctgggcaagagcggcacctgcagagctttggagacataaagcagcctgaagaggcacaaggtcgaatggtgggttcctttgagcgtacccctcagatttgtggccttgggtacaggttcaggaagggagagctggaacctctggaggtggccgtgttcgtgggaacagggtcagtgggagcagctgtcatggtggccatgggagctgctaccctggaggccccagaggcactagagagcatcaaccaggaatcttcctgtggctgcataaagccttgtggaaactccctggagtggcgacagctggcccgtgcacttcttgtgagatggggtgatgattatgatgaagaaggtgaagaagcggatgaggaaggggaagaagaaggagatgaggaaaatgatccagactatgacccaaagaaggatcaaaacccagcagagtgcaagcagcagttgaagcagggatgtatgtggcctttgagggataacctgcactggtctaccttctgcttccctgggaaaggattgaatttacatcatttgacaagcctattttccaagttatttgttgtttgtttgctttgtttttgtttttgcagctaaaataaaaatttcaaatacaattttagttcttacaagataatgtcttaattttgtaccaattcaggtagaagtagaggcctcccttgaattaagggttatactcagtttttaacacattgttgaagaaaaggtaccagctttggaacgagatgctatactaataagcaagtgtaaaaaaaaaaaaaaaaagaggaagaaaatcttaagtgattgatgctgttttcttttaaaaaaaaaa

SEQ ID NO: 1789 - DNA, 2403 bp, Homo sapiens
  SIMILAR (1776)..(1859): 1001254mologous to Homo sapiens NAP,accession number M86667,Smith-Waterman Score=160.
  misc_feature (1)...(2403): n = a,t,c or g
atctgctcgcggcgccgcctcctgctcctcccgctgctgctgccgctgccgccctgagtcactgcctgcgcagctccgggccgcctggctccccatactagtcgccgatatttggagttcttacaacatggcagacattgacaacaaagaacagtctgaacttgatcaagatttggatgatgttgaagaagtagaagaagaggaaactggtgaagaaacaaaactcaaagcacggtcagcgtaactgttcagaatgatgccaaaatcctcagattcttgcaagcccttcaagaaagacttgatgggtctgggtagaaacaccaacaaggatacattgaaagcctgccttagggtagttaaaagacggagtgaatgctctcaaaaacctgcaagttaaatgtgcacagaaagaaacccaacttctatgagggaagttcacgatcttgaaaggaagtatgctgttctctatcagcctctatttgataagcgatttgaaattattaatgcaatttatgaacctacggaaggaaggaatgtgaatgggaaaccagatgaaggaaggatgaggatttcggagggaattggaaagaaaagggccagattgaagatgagaaaaaggatgaaggaaaaagaagaccccaaagggaattccctgaattttggttaactgtttttaaagaatgttgacttgctcagtgatatggttcaggaacacgatgaacctattctgaagcacttgaaagatattaaagtgaagttctcagatgctggccagcctatgagttttgtcttagaatttcactttgaacccaatgaatattttacaaatgaaagtgctgacaaagacatacaggatgaggtcagaaccagatgaattctgatcctttttcttttgatggaccagaaattatgggttgtaccagggtgcccagataggattggaaaaaaggaaagaatgtcactttgaaaactattaaggaagaagcagaaacacaagggacgtgggacagttccgtactgtgacctaaaaccagtttccaatgactccttctttaacttttttggccccctccctgaaagttccctgagaagtggagatctggatgatgatgctgaagcctatccttgctgcagacttcggaaattggtcacttttaccgtgagcgcataatcccaagatcagtggtaaattttacctggagaagctattgaagatgatgatgatgattatgatgaagaagganggtgaagaagcggatgaggtaatgtttaccaaatgagcaaataattctctgtggttaccacatttgagaagcaaatttgaatggacttattgtattcctttgctataatcattctgtgatttgggataaaaacattttggaaaacatgattttagaatttctacaagcccaaaacaatgtatgtataaggtttcaataaataaattgcaaaactcagcaacatttttttatttcaaataattttgttctgctgcagggttatcagctctttgaagaagtcaaaagctgcagtaaacttttccaacgttggctgcagtaactattttcaataaaagctgtctggatgtctcaagttgtgttgggaaatttttcatattagaagctttcaaattaaattgtattatcatcaaagtctgtaatcatgaaaatctgttgatccgtagagtaacttgtattaaattttccctccattatgagccagtttacctactatgtacatacttcatggatgcattttgaactttaatataggaaggggaagaagaaggagatgaggaaaatgatccagactatgacccgaagaaggatcaaaacccagcagagtgcaagcagcagtgaagcaggatatatgtggccttgaggataacctgcactgtcctagcctaaacacaactcttatttacttacagccttatgtttttgtattttcttggtagactaggtaatttttgttttaaaggacaggaaactgatattttaaagaccaatctgttctacctaggcatttttaactagtttttctgccagctatgttgaatgcacaaattctgtcacgcatgttcattcattgctacataatttggttcttctggaatatttttatgtagctcttggagtacagctatgaaaattaacaactgttaaaggaaataccnnnnnnnnnnnnggaaatttttcctttaaaaacccaaagatttttttcactgggttgtgaaaaagggtaaacccccttgggaataacctggccnnnnnnnnnnnnnnnnacaaaagggcggggctttatcttaaaacatttttttgttnnnnnnnnnnntggccaaaacacctattgggtaaaaattttccggggggcccccccccaaaacctgtttttaaaggg

SEQ ID NO: 1790 - DNA, 435 bp, Homo sapiens
  SIMILAR (70)..(435): 1001254mologous to Homo sapiens DKFZP434J154 protein,accession number BC004116,Smith-Waterman Score=633.
ccacgagctagagcggagaggccggcgccggccagctgctcttcgccaacttcaaccaggacaacacccgatacggaagatgtgtgcattgtagagagattgttctccagcagcctagtggccatcgtgagccttaaagcaccaaggaagctaaaggtttgccactttaagaagggaactgagatctgcaactacagctactccaacacgattctggctgtgaagctcaacaggcagaggctgatagtatgcctggaggagtccctgtacatccacaacattcgggacatgaaggtgctgcatacgatcagggagacgcctccaaaccctgcaggcctgtgtgcgctgtcaatcaacaacgacaactgctacttggcgtacccagggagcgcgaccatcggagaggtgcaggtcttcgataccattaatttgaga

SEQ ID NO: 1791 - DNA, 1102 bp, Homo sapiens
  SIMILAR (1073)..(918): 691254mologous to Homo sapiens PRO1722,accession number AF119851,Smith-Waterman Score=182.
atgcttgcattaaaagacagaagctctcaacccaacaccctgactatatctaaagtaggaaaagaagatactgaccccaaagttagcagaggaaggcctcttgcctactgccatgtaagacgtgactttgctcctcattcgccttttgccatgattgtgaggcctccccagccatgtggaactgttttgggggaacaggtggtgtttgggtgcatagaacccagcaccgagagggaccatcagaggatgttccatgagaacttggtgagggttgtggagaggttggctggtgcttctccgtcttcatacagatgtccagacaggggaccagaagtctcaggtctgagctctacctggaagcccctcacgtctgtagccatcaaacctccagataagacgagccctgaagcattttggttgcatcagaaaacagatggaaggccagtcttcacagatgcatatacttcatcctggcttccacccacagaggttgcatctgtgcagaaattcatcccagagcaccaggcaggtagccactgtgtctttatctccctccagagaagcaacgcgctccagactctgatgcactggaggcaggagacagctgcaggtggtggtgtgctctggaagagtagaaacagagacccctcatagataccctgtcttcagaatagacctaggctcttcaccccaccacccctgccaccacccccacccaagccactgcagtgtcttgcccagacaaggggcatagccaactaactgatccctcagatcttgccctggtccccctaagataactctttatatggcagctttctccatcttagcactttgggaggccgagacaggtggactgcctgagctcaggagttcaagaccagcctgggcaacatggtgaagtccagtctgtattaaaactataaaaaattagctgggcatggtggcgcacacctctaatcccaactactgtggaggctgaggcatgagaatcacttgaacctgggaggcagaggatgcagtgagccgagatggtgccacttcactccagcctggacaacagagcaagactctgtctaaaacaacaacaacaacaacaaaa

SEQ ID NO: 1792 - DNA, 457 bp, Homo sapiens
  SIMILAR (409)..(456): 1001254mologous to Homo sapiens DKFZP434J154 protein,accession number BC004116,Smith-Waterman Score=77.
agctcctcttcgccaacttcaaccaggacaacacgtccctagctgttggtagtaagtccggttataaatttttctccctttcttctgtggataagctggaacagatctatgaatgcaccgatacggaagatgtgtgcattgtagagagattgttctccagcagcctagtggccatcgtgagccttaaagcaccaaggaagctaaaggtttgccactttaagaagggaactgagatctgcaactacagctactccaacacgattctggctgtgaagctcaacaggcagaggctgatagtatgcctggaggagtccctgtacatccacaacattcgggacatgaaggtgctgcatacgatcagggagacgcctccaaaccctgcaggcctgtgtgcgctgtcaatcaacaacggcttcggagaaggggaccgtgattagggtattttccattccagaag

SEQ ID NO: 1793 - DNA, 1463 bp, Homo sapiens
  SIMILAR (771)..(1334): 521254mologous to Homo sapiens CGI-50 protein,accession number AF151808,Smith-Waterman Score=403.
atgctcctgaggctccagcgaatcaagaccctcagacccccgggctgtccccaccccatgaccacatgttccgcaggcaccctcagcgctgtgccctgcgtgtcgcccaggcaggtgtttgtttttgagcgcagattctgcctgtggcatagccatgtggagatgttcacgcatgtacttccctttgtgatttcagccgatacggaagatgtgtgcattgtagagagattgttctccagcagcctagtggccatcgtgagccttaaagcaccaaggaagctaaaggtttggccactttaagaagggaactggagatttggcaactacagctactccaacacgattctggctgtgaagttcaacaggcagaggctgatagtatgcctggaggagtccctgtacatccacaacattcgggacatgaaggtgctgcatacgatcagggagacgcctccaaaccctgcaggcctgtgtgcgctgtcaatcaacaacgacaactgctacttggcgtacccagggagcgcgaccatcggagaggtgcaggtcttcgataccattaatttgagagctgcaaacatgattccggctcacgacagtcctttagcggcactggcctttgacgcaagtggaactaaacttgccacggcttcggagaaggggaccgtgattagggtattttccattccagaaggacaaaaactctttgagtttcggagaggagtaaaaaggtgcggtaagcatctgccccctggccttcagcatggacggccatgttcctctccgcttccagcaacactgaagacccgtgcacatcttcaaactcgagactgtgaaagaaaaacccccagaggaagcccaccacctggaccgggtacttcgggaaagtgctcatggcctccaccagctacctggccttcccaagtgaccagaaatgttcaaccagggcagagctttcgccacggttccgcctgccattctgcgggccacaaaaacatcttgctcggctagcccacaattcagaagatcccgcggttgttggtgggtgccgcccgacgggtacctgtacatgtacaaacctggacccccaggagggctggcgagtgtgccctgatgaagcagcaccggctggacggcgagtctggaaacgaccaatgagatcttggactctgcctctcacgactgccccttagtcacttcagacatacggcgcagctgcaggaaaagcctacacagacgacctgggtgctgtgggtggcgcctgcctggaggacgaggccagcgccctgcgcctggatgaggacagcgagcacccgcccatgattattcggactgactgaacttgacctgtgacctctgacccggggagcagagaacactggcttcacagaggactttgtgcattgctgctatgaactttgacctgagtcgggggagaggatggcagagactttattaaaaaaaaa

SEQ ID NO: 1794 - DNA, 2728 bp, Homo sapiens
  SIMILAR (218)..(1615): 621254mologous to Homo sapiens DKFZP434J154 protein,accession number BC004116,Smith-Waterman Score=1259.
  misc_feature (1)...(2728): n = a,t,c or g
ggtgcgtcgcgggggcggggccgcgcaggcgtaccgggtgccccggctctggagcataaacaagagcggggacgggatgaggcggcggttgatcccagggtggcgagtggcggcgaccgaggcggcgagcggggcccggcgccgaccctgagtgcagcctgacccgccctcgcgcgcgcgccctccccggccgggcccactcgccgcgcgcccagccatgaacctggcgagccagagcggggaggccggcgccggccagctgctcttcgccaacttcaaccaggacaacacagaagtgaaaggggcatcaagagcagctggtcttggccgtcgcgctgttgtctggtccctagctgttggtagtaagtcccggttataaatttttctccctttcttctgtggataagctggaacagatctatgaatgcaccgatacggaagatgtgtgcattgtagagagattgttctccagcagcctagtggccatcgtgagccttaaaagcaccaaaggaagctaaaggtttgccaactttaaagaagggaactgagatctgcaactacagctactccaaacacgattctggctgtgaagctcaacaggcagaggctgataagtatgcctggaggaagtccctgtacatcccacaacattcgggacatgaaggtgctgcatacgatcagggagacgcctccaaaccctgcaggcctgtgtgcgctgtcaatcaacaacgacaactgctacttgggcgtacccagggagcgcgaccatcggagagggtttgccaggtcttcgataccattaatttgagagcttgcaaacatgattccagctcacgacagtcctttaagcggcactggcctttgacgcaagtgggacttaactttgccacggcttcggagaaggggaccgtgattagggtattttccattccagaaggacaaaaaactctttgagtttcggagaggagtaaagaggtgcgtgagcatctgctccctggccttcagcatggacggcatgttcctctccgcctccagcaacactgagaccgtgcacatcttcaaactcgagactgtgaaagaaaaacccccagaggagcccaccacctggaccgggtacttcgggaaagtgctcatggcctccaccagctacctgccttcccaagtgacagaaatgttcaaccagggcagagccttcgccacggtccgcctgccattctgcggccacaaaaacatctgctcgctagccacaattcagaagatcccgcggttgttggtgggtgccgccgacgggtacctgtacatgtacaacctggacccccaaggagggcggcgagtgtgccctgatgaaaccagcaccggctggaacggcagtcttggaaaacgacccaatgaagatcttggactctgccctctcacgactgccccttagtcacctcagacattacggcgcagcttgcaggaaaaggtacttacgtgccttcatccccaacggagacttgccctacacgagacgaccctgggtgctgtgggtggcgcctgccctggaggaccgaaggcccagccctgcgccctggatgaggacagcgagcacccgcccatgattcttcggactgactgaacttgacctgtgacctctgacccggggagcagagaacactggcttcacagaggactttgtgcattgctgcctatgaactttgacctgagtcgggggagaggatggcagagactttattaaaaaaaaaaaaaaagattgtaagtggtaagtctaaactcccaataaacgctgaaggaaaaatacatcaattttcaacttcaagtggcttttaaaatcctgccttaatgaaattttaagctttttggttgtttggtttcctctttttgcccaaaattaactgtttggttgaagcccgcaaaaacctccttcgctttgcatgcatgaacgtgcccagcccagccatggggagctaggaagccacttttccagcccacctcccgttgggtttttttttatatctgtacataatggccgagtgcgttaagggaaaccgtgggcgtcgcgncacagtggggtctggcttgttcaaggggccagtttctggccagttgacagggcccaggggctgcccacccagggtgtgctggggcagaccttcagctggggacagaagttccgattctccctaggggccccacctggaccattttccctccgtttttattttgttaattaaattctttccaaattgggatcgctctgggatttcttccatggtggacttttggtttctgaatcttgttttccctgtggatattggaggacagcgaggttctttctgatactaaaaacctttctttcaggcagcaaatgaacttgaaaggttgcctggactcgctggagcaaaggaaagcgatctttcgtttgtataattaaatgatctgttcttctacttcactcttcctgttgaaaaactgtgtgatttttttttttttttaagtaaagtttgtagctcctcccatgcccaggaaagcacagaactcaagtgtggtggccgtctgagctgtcctttcgctggccccgctgtccgcaggggcttcctacctgtgtgagaggtcgtagcgggagacagcaacagagagtaggcggctgggccacgtccttcacagggcgtcatgtgcctttctattttcatcttagaaaatttcctcagcaaaccgatgagagatt

SEQ ID NO: 1795 - DNA, 1162 bp, Homo sapiens
caactggtgcagtcactggtatgggtcagcttccaggccggcacctcttctccttactcagccccatcttttaagcccaacatcacactacgcaatgccccatctcagcttcctgatttagctggggttggaaggggatgggggagcttcgcaatgggtgggggggcggcaaaggctccaagactgccggaacaggagcctgcaaggaagtcccgagactctgattccgcccatcttcagatcactgtgccttcgagaacttgtttccccatttgcaagtggggctgacctccctcctcgcgctgttccttctgcagctgcggctttaggaaggaatctgcgtttatgaaggggatggcaccgcagaatcattcccccgtgggtggcatcgatttcgagggccgcctcatcctgggggccaagcctccactcttcaaggtgccaagtcaacctgaaaccctgggagagacttgggtcatagccaagatggcaggtacctacggagggtcccgaaatacacttcccagaagtccaggcggcaacttccgctccacggtgccaaggtaggtccagacgacgcctaggcaaccgggggcggggctcccaaagcctgtcgtcgtggcaacgagtagtgattgacaagcctctcgctctagccctgggcgctcccgcaaggacggcccggattcgttccccgcgcttccggtctcactggggagccggaatccccgagtctgcagccaccgcccccgtccacacgatagccctcccggttaagaggaccccgccctcacctctgcgctcagcgggccgctccgcgctcctgagcacgcgcagtcttcgacttccccctcccgctggactacgtctcccaggatgctccgcgcaccagctcgagcgcctccttgcccttcccccaccctcgtccccgtttctacaccctctcctcccttcccctagcggtggtcgcaatgatcaggtcatactcctggccgcttcttcccatgctccccgcctcgaatccgtgcgtcggcatgcgcaagcctctcaggtacaacagacggcagcaccgcctaccagatcgcgcatgccccccaccacgttttcctcacttctctacgggccttcctgagattagcaggatcctgcaccaatcacggcc

SEQ ID NO: 1796 - DNA, 435 bp, Homo sapiens
  misc_feature (1)...(435): n = a,t,c or g
ttttttttttttttcattttttaaatggtctttattaaaggctacaagtataaaatatgactaagttacaagtcgtcagtaagaatttattacttttgaaaatgttaattaaagaaagggagacgcaaagaaagggaggctcttcctgaaaatccacacagggggccaagggaggggctcccagatgaaacagaggctggttgctgatttcttgggggaacttttgtaaaaatgaagacactgaatcccttgagctgaatcccgggtgcagagactggggggagngtggagantccaaaatcatgctcaggtttctcctgaaaagtgtgtatttttctaaaaaataaatataaactcctgggtttgagaaactccctcatgatgaatggggagggaaaatcntggcaattggagagctaaggaacccatcttcgc

SEQ ID NO: 1797 - DNA, 1779 bp, Homo sapiens
  misc_feature (1)...(1779): n = a,t,c or g
cagcagtatctcttggagctggtgcagacaccaaggctgcccagtggtacaacgtggtccacctcccctagggaagctgctgcactcagaggctgtcctgcccagtggcccctgagccgtgtgagcctgcaggaggcgtttgagcagagcctcaagcccggtatggcgccatctccatgttgccatcactgcgttctcacctgaagccttaatctttgcgacacctgccagtgagcgctcggtttcaataccaaagtgtgtcttcttctttttttttttttttttaaatgcctgtttcataggaccttctgaaatgatttccagaatattttatctggctccaaaataaagcacatagcaactcacctcaacccctcatcatctccaggaaagtttctgccaaagctgtggcatagccaacttttgatttggttcttgccaattgttttatgtccctaaacctcatttggatccttggggtatagttttatctttctgcttcagtgatttactgtaacttttcaaatattggttctttgcgctaccatttaagtatagttgatatatgtgagggcaaaaaaagggtttcagcatgggtgggtgaggggaaaaagggagcttaggaaatcccagttggggcacagctggggggcaagcgccagttccccctcagggcttaacgggcacttgnttcacacagggatcctcaggaatcagccgggccacctgcctccaccttctgcctgggagggcatggggctgttgtaggaacctatggtaggcaaatgtatatgtatgagtttgtattctgtagtgttggtgtagcacagaagaaagacctgtgtcctagagagtaggccaaggtgatctgcctcttctattgggagaaattctaatttctttcccactttctcaacaagcccaatattccctccaagttcttcttgggtgctgagggctgtaggaattattgaaagccctctgcctcacttagtatcgtctggggcccagcacccagcaataactctaaataatgtttccttaatggtatagccctcctgagattaaaatggtaaaatcaaaaaattaggaaatcttggaagggagtcctcaagttgtattgctttggctgtgcttttgggaagaagggacgacctggaggacacaggctcctgtgggggtcttccatcctgcctgaccgggcagaatcttcctctaacaccttgggcaaaagtctatgcggaagatgggtttcttaagctctcccatttgcccatgattttcctccccattcaatcatgaggggagtttcttaaaaccagggagtttagtatttattttttagaaaaatacaccactttttcaggaagaaacctggagcatggattttgggattcttccacctcccccccagtcctcctgcaccctgggattccagcctcaaggattcagtgtcttccatttttacaaaaagttccccccaagaaatcagcaaccaagcctctgtttcaatctggggagcccctccccttgggccccctgggttttggggggtgctgcccctactgggggaacagcggggggtctgtcacccgtctgagccgcacccccctgtggtggatttcaggaagaagcctcccttttctttgggtctccctttctttaattaacattttcaaaagtaataaattcttactgacgacttgtaacttagtcatattttatacttgtagcctttaataaagccgatttaaaaaatgctaaaaaaaaaaaaaaaaa

SEQ ID NO: 1798 - DNA, 456 bp, Homo sapiens
  SIMILAR (207)..(371): 981254mologous to Homo sapiens Human secreted protein sequence SEQ ID NO:170,accession number AAY87131,Smith-Waterman Score=302.
  misc_feature (1)...(456): n = a,t,c or g
cgggggannctgagaacctgagagcctctgcagngtcgtggaatttctgcaggcgctggtcacggaattccaggagacccatagccaagacgccattgagcatgttctcgccaacctcgccaacttcgcttatgaccccagcaactaccagtatctgcggcagctgcaggtcctgcatttatttctcgattcgctgtcggaggagaatgagaccctggtggagtttgctattggaggcctgtgcaacctgtgcccagacagggccaacaaggagcacatcctgcacgcaggaggtgtcccactcatcatcaactgcctatccagccccaatgaggagacggtgctgtctgtcatcaccacgctcatgcacctgagcccgccgggccgcagctttctcccatagctgaccgccacgcccgcggtgcagtgcatgcttcgcttctccctctcgggcag

SEQ ID NO: 1799 - DNA, 338 bp, Homo sapiens
  SIMILAR (3)..(122): 1001254mologous to Homo sapiens YKL-39 precursor,accession number U49835,Smith-Waterman Score=213.
atgagatctgccagttcctgaaaggagccaagatcacgcggctccaggatcagcaggttccctacgcagtcaaggggaaccagtgggtgggctatgatgatgtgaagagtatggagaccaaggattaacttacagagaagcaggcaagatgaccttgctgcctggggcctgctctctcccaggaattctcatgtgggattccccttgccaggatggcctttggatctctcttccaagcctttcctgacttcctcttagatcatagattggacctggttttgttttcctgcagctgttgacttgttgccctgaagtacaataaaaaaaattcattttgc

SEQ ID NO: 1800 - DNA, 606 bp, Homo sapiens
  misc_feature (1)...(606): n = a,t,c or g
ttgattctggtaaaagcagcagcagcactggacacagggcatctaagtccttggtttggagtcaggtgtgctttccagaatcctgggaggagaggctgctcactgaagggaagcagcttcagtctagagtaatttgaggataggaatttcagtcaacagcagcctgtgaagaacactacatggcttccatacgtaggtctgtttccccatcactttcagtttgcactagtcctttaccttcagtcttggacatcctacctccaactgacctttattttgagcagcacagtccaattctttagctaaaggtgaagggatcgctgcactgacgttcttcccctttgagaaaagaatcgtaattttaagagtctgaaggagtttagtgggtcacctagtctctcctcccttgatacctctactgatactttctactcaagcattggggaaggcttttttaggaggaatcttatcttcaaaaattctaccttttttaatgtgtgtatttgtgggccctcaggaagttcctaaattctattacaaaggaacacaaaagtttctgggagggttggatccggggcntactgtngttcaagccaatgtnatttg

SEQ ID NO: 1801 - DNA, 1271 bp, Homo sapiens
  SIMILAR (1068)..(1268): 701254mologous to Homo sapiens Amino acid sequence of a human chitinase alpha protein,accession number AAW53121,Smith-Waterman Score=225.
atgggagcaaccaccatggaccagaagtctctctgggcaggtgtagtggtcttgctgcttctccagggagagatggggttttgctatgttgccagagctggtcttgaactcctgggctcaagaagtcctcctgcctcagcctcccaaagtgctgggataacaggatctgcctacaaactggtttgctactttaccaactggtcccaggaccggcaggaaccaggaaaattcacccctgagaatattgaccccttcctatgctctcatctcatctattcattcgccagcatcgaaaacaacaaggttatcatcaaggacaagagtgaagtgatgctctaccagaccatcaacagtctcaaaaccaagaatcccaaactgaaaattctcttgtccattggagggtacctgtttggttccaaagggttccaccctatggtggattcttctacatcacgcttggaattcattaactccataatcctgtttctgaggaaccataactttgatggactggatgtaagctggatctacccagatcagaaagaaaacactcatttcactgtgctgattcatgagttagcagaagcctttcagaaggacttcacaaaatccaccaaggaaaggcttctcttgactgcgggcgtatctgcagggaggcaaatgattgataacagctatcaagttgagaaactggcaaaagatctggatttcatcaacctcctgtcctttgacttccatgggtcttgggaaaagccccttatcactggccacaacagccctctgagcaaggggtggcaggacagagggccaagctcctactacaatgtggaatatgctgtggggtactggatacataagggaatgccatcagagaaggtggtcatgggcatccccacatatgggcactccttcacactggcctctgcagaaaccaccgtgggggcccctgcctctggccctggagctgctggacccatcacagagtcttcaggcttcctggcctattatgagatctgccagttcctgaaaggagccaagatcacgaggctccagggatcagcaggttccctacgcagtcaaggggaaccagtgggtggggctatgatgatgtgaagagtatgggagaccaaggttcagttctttaaagatttaaaacctggggaggagccatgatctggtctattgacatggatgacttcactggcaaatcctgcaaccagggcccttaccctcttgtccaagcagtcaagagaagccttggctccctgtga

SEQ ID NO: 1802 - DNA, 660 bp, Homo sapiens
gtttgaaatgggaaccagatatgtttccattttatacagataattcagttgcttgaagaagagggacacaggagaaaagatttaaactattggctaaaatgaggtgtcttattattgattttcatctatatcttgtcccataatcaggaataaacagtagctacgctgccttgtatggcagccagagcgctgcatgcatgcacttttaatgattccatcaataccatgtagattgaattagcaaggagaagtaaccctttcatttcttcgccagactatattgggaaatgaaaatcggtcagtacttttccttgctagcaattgtccgaatatctgggataaagaaatacatacaggaaaatgttagggcagtccaagtattaaaagctagggacagagcaggacaaaggaggaaggataattctacttgtttgggcaaagttacatcagttgtcttactgacacatcagggtactatctataggtggaaattgagggcccggagagggttaaatgggcatgcccggtgttcacttgctatttttcagaacaaaaattagaatccagatctgaatcctggtgcagtgttctctcctatgccctactgggctttagtgggctaaagttctgaagcaagatgttaagggctaattaaatgcg

SEQ ID NO: 1803 - DNA, 1655 bp, Homo sapiens
  SIMILAR (250)..(537): 561254mologous to Mus musculus putative,accession number AK008633,Smith-Waterman Score=305.
atgaccctggcaccctctgaccaagatctttttgtctttaggtctggccctcctgctgcagctgggatgccctgtcttttcttccctgaagttcccttctgcaccagggtccatcagcccactggcagagatgggagcaagaacctactcaatgagttatttatagcgtgccctggaggactcatggcacaagggccccttgatcctacagagagctctgttcccaacacaaaggccttgtgtggaatattctctgatgtggcggccactgctgagaaccgccagaccttcatgcagtcagccatacagtttctgaggaagtacaacttcgatgggctggacattgattgggagtatccaggcaatcgtggcagcccagctgacacccagcagctcttcaccatcctgttgaaggaaatgtatgaggcttttgagcaagagtctacccgcagcaaaaagcccagattgttgatgtctgctgctgtgtcagctggcaaaggtaccattgagactgcctgccagatccctgagatgtcgagttctactccttcccgaaaggagccacctagagtgtggaatgccccctgggaggtgccttatgtctacaaggggaaccagtggatcaggtacgacaactccaagagcttcaccctcaaggtgttcttccccactccaaagacaaagtgtagaccacagagttttttgctctcctttgcctatctcctgcccatggcaaattcacacaggctgagcccaaatcgggaggcgatagagcctctggtctattgcagagtacccacctctatcctgggcaccagcttggcccccatcatcactgcagcacctgggggtggcagcacaggtggcagtggattctgtactgggaagtccaaaggtctgtatcctagtcccacacagcaagcatgctttctacaactgtgtggatgagcacacatacgaggaggcttgtcaggaaggcctggtctttgatacccagctgcttcttgctgtaactgggcataacctactacaatttaccctctgccttactgccagactgatctttctaaaaggcactttggtcatttccctgctttaccgtccgcaaaaagttccctgcagattcaggactatattgggaaatgaaaatccgtcattacttttccttgctagcaattgtccgaatatctgggataaagaaatacatacaggaaaatgttagggcagaccaagtattaaaagctaggacagagcaggacaaaggaggaaggataattctacttgtttggcaaagttacatcagttgtcttactgacacatcagctaaagaattggactgtgctgctcaaaataaagatcagttggaggtaggatgtccaagactgaagatctgccagttcctgaaaggagccaagatcacgaggctccaggatcagcaggttccctacgcagtcaaggggaaccagtgggtgggctatgatgatgtgaagagtatggagaccaagagagaagcttccgaggccccagactctaggatgggatccagcagcctttatagctcaagtctagtagtgactctatgtcatacccgcgagcatgctgtggtacaggtagaagagttggaaaggacgctaaaaagaattgagaacaagtaa

SEQ ID NO: 1804 - DNA, 1528 bp, Homo sapiens
  SIMILAR (1179)..(1280): 731254mologous to Homo sapiens chitinase,accession number U58515,Smith-Waterman Score=123.
tcacagcagctgtggctggggagcccagatgaagtgtggctctatcttgtatgtgagcacacccacattttcactgccattatctgggacagcagaaccaggtttggctcaacagatttctctttccacccatctattgcaggtgtagtggtcttgctgcttctccagggaggatctgcctacaaactggtttgctactttaccaactggtcccaggaccggcaggaaccaggaaaattcacccctgagaatattgaccccttcctatgctctcatctcatctattcattcgccagcatcgaaaacaacaaggttatcatcaaggacaagagtgaagtgatgctctaccagaccatcaacagtctcaaaaccaagaatcccaaactgaaaattctcttgtccattggagggtacctgtttggttccaaagggttccaccctatggtggattcttctacatcacgcttggaattcattaactccataatcctgtttctgaggaaccataactttgatggactggatgtaagctggatctacccagatcagaaagaaaacactcatttcactgtgctgattcatgagttagcagaagcctttcagaaggacttcacaaaatccaccaaggaaaggcttctcttgactgcgggcgtatctgcagggaggcaaatgattgataacagctatcaagttgagaaactggcaaaagatctggatttcatcaacctcctgtcctttgacttccatgggtcttgggaaaagccccttatcactggcgacaacagccctctgagcaaggggtggcaggacagagggccaagctcttactacaattgtgaaatatgctgtggggtactggatacataagggaatgccatcagagaaggtggtcatgggcatccccacatatgggcactccttcacactggcctctgcagaaaccaccgtgggggcccctgcctctggccctggagctgctggacccatcacagagtcttcaggcttcctggcctattatgagatctgccagttcctgaaaggagccaagatcacgtggctccaggatcagccaggttccctacgccagtcaaggggaaccagtgggtgggctatgatgatgtgaagagtatggagaccaaggttcaagttcttaaagaatttaaacctgggaggagcccatgatctggtctattgacatggatgacttcactggcaaatcctgcaaccaggggcccttaccctcttgtccaagcagtcaaggaggaagccttggctccctgtggaaggattaacttacagagaagcaggcaagatgaccttgctgcctggggcctgctctctcccaggaattctcatgtgggattccccttgccaaggctggcctttggatctctcttccaagcctttcctgactttcctcttagaatcatagattggacctggttttgttttcctgcagctgttgacttgttgccctgaagtacaataaaaaaaattcattttgctccagtaaaaaaaaaaaaaaaaa

SEQ ID NO: 1805 - DNA, 537 bp, Homo sapiens
  misc_feature (1)...(537): n = a,t,c or g
gtgctctgcgcacagcaccgccctcagggtggtacgaaatcacttttatttcacaatcacagcgacccaagtgcacaagggaagcagcagccacccctgcactgacagaggtaatgagatgatggcttcctctccccaaccctcagcctttgggatccctggctggggggcccgctagccagcccccgctcccctcccacacagaaggggtctcccagggtcagtgactgggtagtggagacccatagtgggacagtgacttccccacacacccactgcaaggccagcacaaaggcccagcctgaaggtcctggcacaccacccccctggcaagccctcatggaaagaactccccgagtcacacaagaaaagccttgccccttcttttcccggnaaacaaaccaatttttataagaaatggaaagcttgggctccagggggctacgactcgggcaaggggcacacagctggtcagtgggcaggactaaaacccatgccctgcctgccacacagacggtgcagtctctgatggatgca

SEQ ID NO: 1806 - DNA, 1660 bp, Homo sapiens
  SIMILAR (752)..(1591): 551254mologous to Homo sapiens duffy antigen/cherokine receptor,accession number X85785,Smith-Waterman Score=579.
tcccaaacacatggcttttgaactgcctttccttggatccagttcaaggggatggaggagcagtgagagtcagccgcccttccactccaatttcccagcacctcccttatctctgcctcacaagtcacccagcccccctctcttccttccttgtgcttgaagaatctctccttgctggaaagccccctgttttctcaatctccctttccacttcggtaaaatctctacttgctggaaagccccctgttttctcaatctccctttccacttcggtaaaatgcccactttctggtccccacctttttcctgagtgtagtcccaaccagccaaatccaacctcaaaacaggaagacccaaggccagtggacccccataggcctggaggtttgtgcagggcagtggggcgtggggtaaggcttcctgatgccccctgtccctgcccagaacctgatggccctcattagtccttggctcttaccttggaagcacaggcgctgacagccgtcccagcccttcttgtctgcgggcctgaaccaaacggtgccatggggaacttgtctgcacagggcggagctctccccctcaacatgagaactcaagtcagctggactttcgaagatgtatggaattcttcctatggtgtgaatgattccttcccagatggagactatgatgccaacctgggaagcagctgccccctgccactcctgtaacctgctggatgactctgcactggccttcttcatcctcaaccagtgttcctggggtatcctagctagcaggactggcctcttcatgcctttcagaacctttcttccgctggcagctctgccctggggtggcctgtcctgggcacagctggctgtggggcagttgccttctttcagcatttgtgggtgcccgtctttgggccccagggctacggtagcaactcgcagctctgccctgctgtagcttggggctactggtgtctggtatggctcagcctttgcccaggctttgctgctaagggtgcccatgcctccctgggccacagactgggtgcaggccaggtccaggggcctcaccctggggctcactgtgggaatttggggagtggctgccctactgacactgcctgtcaccctggcccagtggtgcttctggtggactctgcaccctgatatacagcacggagctgaaggctttgcaggccacacacactgtagcctgtcttgccatctttgtcctggttgccatttgggtttgtttggagcccaaggggctgaaagaaggcattgggttaatgggcccaggccccctggatgaaatatccctgtgggccctggtttattttctggtggcctcatggggtggttctaggactggatttccctggtgaggttccaagcggttgctgttgtcaacatgtctggcccagcaggctttggacctgctgctgaacctggcagaagccctggcaattttgcactgtgtgggtacgcccctgctcctcgccctattttgccaccaggccacccgcaccctcttgccctctttgcccctccctgaaggatggttttttcatttggacacccttggaagcaaatcctagttctcttcccccctgtcaacctgaattaaagtttaccctgcctttgtgaaaaaaaaaaaaaaaaaa

SEQ ID NO: 1807 - DNA, 1830 bp, Homo sapiens
  SIMILAR (1411)..(515): 621254mologous to Mus musculus putative,accession number AK019097,Smith-Waterman Score=893.
actggtaatctgaagtaaaggctccaagtcttaagtatccaattttccaagataattagaaaaagaaaaaaatcaaatactcttaagcattatttttcatacttctaagactataagatctttgtataaataaaaattatacttaaacacatatacaatacaagctaatgaactgtattagaaatcctcaagcattttaaactcttaacacaaatatacatacatttctgtaagactgaaaaatatcgtgagcaaaaataatttgactgtatcatattaactcagtgtacagtactggatttaaaataacaagtgtagtaaaaacgaaaactgaggtcactttgtgtaagacaatgatccctcaaaggacattaaatacttgctttttataaatatttttgggttttggctttgtaataaatatgtaataaatatctgcagtacactgtttatgttgagagcttatctttctccatttgaaagtctttctccagagtaataatgtcttagagagtatcccagtgggcggggagttaggattttgcagcaaatccagtaacaaagcaatcttatcatcaatgtgctcctggagttcatgtattccgctgatcaatgtaatccataagtttcctttccctccggtcccttatttttagaaagaatttttttccaagtaggagcaaatagattgctcttccattccaacaccaagaatgcgttcaccatgcttggtgatgttttcctgacactcggtcttatttcccacatggagatgattaacttgactacataaattctggagaaaaggcagcaactcggagttgggtatatttgagttgtcacttactttctttggtaagaaagaggccattgcatttttaagatcattttcaagaaaggaatggttttgaggcataactttacactcatcaagcttggtagaattctctccaccaggcagttgtgtacttttatcaatgtaagtttgtaagttttcagtcacgttcccagatgtcaatccagttctaaaaggaaaaggtgtggaggacgacttgtttaaggttcctaaggtagatgaggattgtggtccaatcatatgcttgtatccagaattgcccaacaccgactgaagctgctctccaatgggaatacaattccgctgctgacacctaaccatatccatcaactgctgagctccaggacataactttgtccccatggactccattatggtttggaccttgtcaaggtctatccttgatcctagagcaggagagcttgttgaagaatttgcaaaaactgatctcatgtgtaccacaactttactgatgaacacgccctgcctttcgtcaaaggagagcaactttattttacaagcatgtgtggaggactccaattttagatttttttttatacaaaatgatcttttcatgttcactgtcatccaggacagtacaaccattcttgcccctactggttccacagtactcctctcctaagtacacttccatatttcttgctgaacttaaaatgccaatagaagcgatttcttcacctccatcagggccacacctcaggtaaaggaagcaggggttttcatctttgttgttgtggtttctcttcaaaatcaccagatcctgacctggagcaggcggtgccagcagctcctcccagtcgaagtcaccggggccgagaccggcccgggtgaggaggaggctgtgggtcagggccccgcctgcaacatcccaagaagaggccagcgccgggcggcgggtgaggcccccgtcctcggtccacgtaaacattccgccgccttcagtcaggccagcc

SEQ ID NO: 1808 - DNA, 1698 bp, Homo sapiens
  SIMILAR (531)..(587): 681254mologous to Homo sapiens putative p150,accession number U93574,Smith-Waterman Score=76.
atgatgggagactttaacaccccactgtcaacattagacagatcaatgagacagaaagttaacaaggatatccaggaattgaactcagctctgcaccacatggacctaatagacatctacagaactctccacccaaaatcaacagaatacacattcttctcagctccacaacgcacctattccaaaattgaccacatagttggaagtaaagcactcctcagcaaatgtaaaagaacagaaattataacaaactgtctctcagaccacagtgcaatcaaactagaactcaggattaagaaactcactcaaaaccactcaattacatggaaactgaacaactggctcctgaatgactactgggtacataacgaaatgaaggcagaaataaagatgttctttgaaaccaacgagatcaaagacacaacataccagaatctctgggacacattcaaagcaacactaaaccaggaagaagttgaatctctgaatagaccaataacaggctctgaaattcaggcaatgattaacagcttaggaaccaagaaactccaggaccagacggattcacagccaagttctaccagagatgacatgattgtatatctagaaaaccccatcgtctcagcccaaaatctccttaagctgataagcaacttcagcaaagtctcaggatacaaaatcaatgttcaaaaatcacaagcattcttatacaccaataacagacaaacagagagccaaatcatgagtaaactcccattcacaattgcatcaaagataataaaatacctaggagtccaacttacaagggatgtgaaggaccccttcaaggagaactacaaaccactgctcaacgaaataaaagaggacacaaacaaatggaagaacatcccatgctcatggataggaagaatcaatatcatgaaaatggccatactgcccaaggtaatttatagattcaatgccatccccatcaagctaccaatgactttcttcacagaattggaaaaaagtactctaaagttcatatggaaccaaaaaagagcctgcattgccaggtcaatcctaagccaaaggaacaaagctggaggcatcacactacctgacttcaaactatactacaaggctacagtaaccaaaacagcatggtactggtaccaaaacagagatatagaccaatggaacataacagagccctcagaaacaatgccacatatctaccactatctgatctttgagaaacctgacaaaaacaagaaatggggaaaggattccctatttaacaaatggtgctgggaaaactggctagccacatgtagaaagctgaaactggatcccttccttacaccttatacaaaaattaattcaagatggattaaagacttaaatgttagacctaaaaccataaacaccctagaagaaaacctaggcaataccattcaggacataggcatgggcaaggacttcatgtctaaaacaccaaaagcaatggcaacaaaagccaaaattgacaaatgggatctcattaaactaaagagcttctgcacagcaaaagaaactaccaccagagtgaacaggcaacctacagaatgggagaaaatttttgcaatctactcatctgacaaagggctaatatccagaatctacaaagaactcaaacaaatttacaagaaaaaaacaaccccatcaacaagtgggtga

SEQ ID NO: 1809 - DNA, 2555 bp, Homo sapiens
  SIMILAR (1590)..(1453): 1001254mologous to Homo sapiens Human secreted protein sequence SEQ ID NO:170,accession number AAY87131,Smith-Waterman Score=255.
  misc_feature (1)...(2555): n = a,t,c or g
ttttttttttttttctagtcttctaggaccctttatttgggaacataaagggacaggctccctgagcgggtgctgatgagcccttccctcccctctgagtccagtggtcccctaatctgccccatttccatgcccacgtgggtaccatttttgtagcacctgccattcctgggccatctaaggggtcagccttgagggggtacacgagaggcaagggacccccattttccctgaggctccacctttccatcggatcccacgctccttatgttgaccaggggggcaccatgggacatgggagccacatcctttacgttgccgtcttcttcctgactcccttgaggcaacactcactgcggtccctgaatggcccttcgtggggataacaattttgggggtagggctccccattattgagttgacacccaaaaaagggcccaaaccttttaacccggggccatggggtggcaaggggagaagatgcagttaccagggctggtgcctctattcagacgtatcatcacctgcatggccttgtgcttgatgcccgatggccacattaagtccctgggctgtcactcaagggcagggaccacatcttcatcttggagtcatggtgcctaacagcaaggctgggtggacagtcaatgctgggccacaggttatccaggttggcatcccccaggcccaaatgcccagcttggagagcccctgggggaggcatccatcctccagagccctggagggggcaccacatcttccccagggtgagatcctttcaccacgaggcatctcattcctatacctgaaaactactccagacacttctgttaagggataatccctgatttcctgcagcgaaggcagctctcctaaagcctcaggcccaagctcctgagaacactgtcctgcaaagcctctgggtccaggcacttggccgcttcttacaccagggcctgagtctggtggtggtggcacctgatgtaggattgagagtgccagcctatgaacgcagctccagtttgatcttctccgtgtctctgaaatctggcttcctaactcccagtggcgtttcatcagtgtaaatgcctgtcctgctgaaagaacccgcctttcagatggctgaaaaggcacccaatggggcagtatgtgctccccgttccctgcgtccacatcaggactgtggtctccagcagtaggggtgccacggtctcgcagtctccatggatcagcgctgccgtggggccacgctcctcggcagtgggatacccagggcagagtgcgcctgccggctgcgggcctcggccacctggcggggggagcagaagtcctccaggaagatctgtgccaggttccggagcctggcgctggccgagagggagaagcgaagcatgcactgcaccacgggcgtggcggtcagctctgggagaaagctgcggcccggcgggctcaggtgcatgagcgtggtgatggcagacagcaccgtctcctcattggggctggataggcagttgatgatgagtgggacacctcctgcgtgcaggatgtgctccttgttggccctgtctgggcacaggttgcacaggcctcccttccagaagtgggcacaaatccctttccctctcagttcagcaagttcaatggctgatacgctttttttttcccctttcttaaatgtaaaaacccgcggcatgtctcccgagctgacgggagcggccttcctgtgcacactggactgcgggtggggtgatgggatttctctctgtgtaaagtgtgataagatgaagcctgagtcactgcctggcagctgagtcatcaccacacccaggtgcgcctgggcagggcactgccacccagattggtggtgggggttcccgatatgtacaaaggggttagaaccatcggccttgccgttcatgaccgattcagaggccttgtggacaggctggttcaggtgggcgtgtggcgagcacatggtgtgcacaatagcaaactccaccagggtctcattctcctccgacagcgaatcgagaaataaatccaggacctgcagctgccgcagatactcgtagttgctggggtcataagcgaagttggcgaggttggcgaggacttgctccttggcgtcttggctttgggtctccctggaattcccgtgaccagggccctgcaggtatcccagccgcccgacgtgggggtnccaccttcggctttctggccnatggcccgcgatgacggaggacccccagggacgggcgggagggtgggaaaggtgcaggggcaaagccgagcgagaccctcacccgctctccacctgtctggagagggaagagggggtcggcaaatgggtttctttcctgggttcagattctgcagtattttgcagctggaaatggcatatgggagatgggacggggtctcagaatcctgtaggagttgcgtgtgaaaatcgaaattggggcgcgggaaacagggagccgtttactgtgttggggctcgcggagggggcactggcgcaccgtccccggctcctgggctcggttccgcctcgtgcc

SEQ ID NO: 1810 - DNA, 1167 bp, Homo sapiens
  SIMILAR (1089)..(1166): 501254mologous to Homo sapiens Human secreted protein encoded by gene 3 clone HNHCT15,accession number AAB38012,Smith-Waterman Score=58.
atggggagaaaccggagcagaaaagatgaaaattctaaaaaccagagtgcttcttctcctccaaaggatcgcagctcctcgccagcaacagaacaaagctggatggagaatgactttgacgagttgacagaagtaggcttcagaagactaaaccaggaagaagttgaatccctgaatagaccaataagaggttctgaaattgaggcaataattaatagcttaccaaccaaaaaaagcccaggaccagatggattcacagccgaattctaccggaggtacaaagaggagctggtaccatttcttctgaaactattccaatcatatgaaaaagaggtaatcctccctaactcattttatgaggccagcatcatcctgataccaaagcctggcagagacacaacaaaaaaagagaattttagaccaatatccctgatgaacatcaatgcaaaaatcctcaataaaatactggcaaatcaaatcccacagcacatcaaaaagcttaaccacgaagatcaagttggcttcatccctgggatgcaagccttgttccacatacaggaatcaataaacgtaatccatcacatcaacagaaccaaagacaaaaaccacataattatctcaatagatgcagaaaaggcctttgacaaaattcaacagcgcttcatgctaaaaactctcaataaattagatgacatgattgtatatttagaaaaccccatagtctcagcccaaaatctccttaagctgataagcaacttcagcaaagtctcaggatacaaaatcaacgtgcaaaaatcacaagcattcctatacaccaataataggcaaacagagagccaaatcatgagtgaactcccattcacaattgctacaaagagaataaaatacctaggaatcgaacttacaagggatgtgaaggaccttttcaaggagaactacaaaccgctgctcaaccaaataaaagaggacacaaacaaatggaagaacattccgtgctcatggataggaagaatcaatatcgtgaaaagggccacactgcccaaggtaatttatagattcaatggcatccccatcaagctaccaatgactttcttcacagaattggaaaaaactaatttaaagttcattggaaccaaaaaagatgccccattgccaaggcaatcctaa

SEQ ID NO: 1811 - DNA, 2175 bp, Homo sapiens
  SIMILAR (2075)..(2173): 871254mologous to Homo sapiens putative p150,accession number U93563,Smith-Waterman Score=160.
atggtaaagggatcaattcaacaagaagagctaactatcctaaatatatatgcacccaatacaggagcacccagactcataaagcaagtcctgagtgaccaacaaagagacttagactcccacacaatagtaatgggagactttaacaccccactgtcaacattaggcagatcaacgagacagaaagtcaacaaggatacccaggaattgaactcggctctgcaccaggcggacctaatagacatctacggaactctccaccccaaatcaacagaatatacatttttttcagcaccacaccacacctattccaaaattgaccacatagttggaagtaaagctctcctcagcaaatgtaaaagaacagaaattataacaaactgtctctcagaccacagggcaatcaaactagaactcaggattaagaaactcactcaaaaccgctcaactacatggaaactgaacaacctgctcctgaatgactactggagaaagcaggaaagatccaaaattgacaccctaacatcacaattaaaagaactagaaaagcaagagcaaacacattcaaaagctagcagaaggcaagaaataactaaaatcagagcagaactgaaggaaatagagacacaaaaaacccttcaaaaaattaatgaatccaggagctggttttttgaaaggatcaacaaaattgatagaccgctagcaagactaataaaggaaaaaagagagaagaatcaaatagacgcaacaaaaaatgataaaggggatatcaccactgatcccacagaaatacaaactaccatcagagaatactacaaaaccctctacgcaaataaactagaaaatctagaagaaatggataaattcctggacacatacactctcccaagactaaaccaggaagaagttgaatctctgaacagaccaataacaggatctgaagttgtggcaataattaatagcttaccaaccaaaaagagtccaggaccagatggattcacagccaaatactaccagaggtacaaggaggaactggtaccattccttctgaaactattccaatcaacagaaaaagagggaatcctccctaactcatttgatgaggccagcatcatcctgataccaaagcctggcagagacacaaccaaaaaagagaattttagaccaatatccttgatgaacgttgatgcaaaaatcctcaataaaatactggcaaaccgaatccagcagcacatcaaaaagcttatccaccatgatcaagtgggcttcatccctgggatgcaaggctggttcaatatatgcaaatcaatcaatgtaatccagcatataaacagaaccaaagacaaaaaccacatgattatctcaatagatgcagaaaaggcctttgacaaaattcaacaacccttcatgctaaaaactctcaataaattagtgttggaagttctggccagggcaattaggcaggagaaggaaataaagggtattcaattaggaaaagaggaagtcaaattgtccctgtttgcagatgacatgattgtatatttagaaaaccccatcatctcagcccaaaatctccttaagctgataagcaacttcagcaaagtctcaggatacaaaatcaatgtgcaaaaatcacaagcattcttatacaccaataacagacaaacagagagccaaatcatgagtgaactcccattcacaattgcttcaaagagaataaaatacctaggaatccaacttacaagggatgtgaaggacctcttcaaggagaactacaaaccactgctcaatgaaataaaagaggatacaaacaaatggaagaacattccatgctcatggataggaagaatcaatatcgtgaaaatggccatactgcccaaggtaatttatagattcaatgccatccccatcaagctaccaatgactttcttcacagaattggaaaaaactactttaaagttcatatggaaccaaaaaagagcccgcatcaccaagtcaatcctaagccaaaagaacaaagctggaggcatcacgctacctgacctcaaactatactacaaggctatagtaactcaaaacagcatggtactgctaccaaaacagagatatagaccaatggaacagaacagagccctgagaaataatgctgcatatctacaactatctgatctttga

SEQ ID NO: 1812 - DNA, 2898 bp, Homo sapiens
  SIMILAR (2856)..(2897): 1001254mologous to Homo sapiens putative p150,accession number U93569,Smith-Waterman Score=87.
atgagacagaaagttaacaaggatacccaggaattgaactcagctctgcaccaagaggacctaatagacatctacagaactctccaccccaaatcaacagaatatacattcttttcagcaccacaccacacctactccaaaactgaccacatagttggaagtaaagcactcctcagcaaatgtaaaagaacagaaattataacaaactgtctctcagaccacagtgcaatcaaactagaactcacgattaagaaactcactcaaaaccactcaactacatggaaactgaacaacctgctcctgaatgactactgggtaaataatgaaatgaaggcagaaataaagatgttctttgaaaccaacaagaacaaagatacaacataccagaatctctgggacacattcaaagcagtatgtaaagggaaatttatagcactaaatgcccacaagagaaagcaggaaagatctaaaattgacaccctaacagcacaattaaaagaactagaaaagcaagagcaaacacattcaaaagctagcagaaggcaagaaataactaagatcagagcagaactgaaggaaacagagacacaaaaaacccttcaaaaaattaatgaatccaggagctggttttttgaaaggatcaacaaaattgatagaccgctagcaagactaacagagaagaaaagaaaaaagaatcaaatagacgcaataaaaaatgataaaggggatatcaccaccgatcccacagaaatacaaactaccatcagagaatactataaacacctctacgcaaataaactagaaaatctagaagaaatggataaattcctggacacatatgtcctcccaaggctaaaccgggaagaagctgaacctctgaatacaccaatagcaggctctgaaattgaggcaataattaatagcttaccaaccaaaaaaagtccaggaccagatggattcacagccaaattctatcagaggtacaaagaggagctggtaccattccttctgaaactattccaatcaatagaaaaagaaggaatcctccctaactcattttatgaggccagcatcatcctgataccaaagcctggcagagacacaaccaaaaaagagaactttagaccaatatccttgatgaacatcaatgcaaaaatcctcaataaagtactggcaaaccgaatccagcagcacaacaaaaagcttatccaccatgatcaagtgggcttcatccctgggatgcaaggctggttcaacatacgcaaatcaataaatggaatccaacatataaacagaaccaaagacaaaaaccacacgattatctcaacagatgcagaaaaggcctttgacaaaattcaaaaacccttcatgctaaaaactctcaataaattaggtattgatgggacatatctcaaaataataagagctatctatgacaaacccacagccaatatcatactgaatgggcaaaaactggaagcattccctttgaaaacgggcacaagacaaggatgccctctttcaccactcctattcaacatagtgttggaagttctggccagggcaatcaggcaggagaaggaaataaaggatgacatgatcgcatatctagaaaacccgatcatctcagtccaaaatctccttaagctgataagcaacttcagcaaagtctcaggatacaaaatcaatgtgcaaaaatcacaagcattcttatacaccagtaacagacaaacagagagccaaatcatgagtgaactcccattcacaattgcttcaaagagaataaaatacctaggaatccaacttacaagggatgtgaaggacctcttcaaggagaactacaaaccactgctcaaggaaataaaagaggatacaaacaaatggaagaacattccatgctcatgggtaggaagaatcaatatcgtgaaaatggccatactgcccaaggtaatttatagattcaatgccatctccatcaagctaccaatgactttcttcacagaattggataaaactactttaaagttcatatggaaccaaaaaagagcctgcattgccaagtcaatcctaagccaagagaacaaagctggaggcatcatgctacctgacttcaaactatactacaaggctacagtaatcaaaacagcatggcactggtaccaaaacagagatatagatcaatggaacagaacagagccctcagaaataatgccacatatctacaactatctgatctttgacaaacctgacaaaaacaagaaatggggaaaggattccctatttaataaatggtgctgggaaaactggctagccatatgcagaaagctgaaactggatcccttccttacaccttatacaaaaattaattcaagatggattaaagacttaaatgttagacctaaaaccataaaaaccctagaagaaaacctaggcaataccattcaggacataggcatgggcaaggacttcatgtctaaaacaccaaaagcaatggcaacaaaagacaaaattgacaaatgggatctaattaaactaaagagcttctgcacagcaaaaggaactgccatcagagtgaacaggcaacctacagaatgggagaaaacttttgcaacctactcatctgacaaaaggctaatatccagaatctataatgaactcagacacatttacaagaaaaaaacaaacaaccccatcaaaaagtgggcaaaggacatgaacagacactgctcaaaagaagacatttatgcagccaaaaaacacatgaaaaaatgctcatcatcactggccatcagagaaatgcaaatcaaaaccacagtgagataccatctcacaccagttagaatggcgatcattaaaagtcaggaaacaacaggtgctggagaggatgtggagaaatag

SEQ ID NO: 1813 - DNA, 668 bp, Homo sapiens
  SIMILAR (219)..(668): 941254mologous to Homo sapiens Human secreted protein encoded by gene 3 clone HNHCT15,accession number AAB38012,Smith-Waterman Score=709.
aaatacaaactaccatcagagaatactataaactcctctacgcaaataaactggaaaatctagaagaaatggataaattcctggacacatacaccctcccaagactcaaccaggaagaagttgaatctctgaagacaccaataacaggtactgaaccaaggtttggaccaaccaaaaatgtccaggaccagatggattcacagttgaattctaccagagtgttggaagttctggctagggcaatcaggcaagagaaagaaataaagggtattcagttaggaaaagaggaagtcaaattgtctctgtttgcagatgacacgattgtatatttagaaaaccccattgtctcagcccaaaatctccttaagctgataagcaacttcagcaaagtctcaggatacaaaatcaatgtgcaaaaatcacaggcattcctgtacaccaataatagacaaacagagagccaaatcatgagtgaactcccattcagaattactacaaagagaataaaatacctaggaatccaacttacaagggatgtgaaggacctcttcaaggagaactacaaaccactgctcaacgaaataaaagaggacacaaacaaatggaagaacattccatgctcgtggataggaataatcaatatcacgaaaatggtcatactgcccaag

SEQ ID NO: 1814 - DNA, 1242 bp, Homo sapiens
  SIMILAR (130)..(1221): 921254mologous to Homo sapiens putative p150,accession number U93574,Smith-Waterman Score=1805.
acactaaaccaggaagaagttgaatctctgaatagaccaataacaggctctgaaattcaggcaatgattaacagcttaggaaccaagaaactccaggaccagacggattcacagccaagttctaccagagatgacatgattgtatatctagaaaaccccatcgtctcagcccaaaatctccttaagctgataagcaacttcagcaaagtctcaggatacaaaatcaatgttcaaaaatcacaagcattcttatacaccaataacagacaaacagagagccaaatcatgagtaaactcccattcacaattgcatcaaagataataaaatacctaggagtccaacttacaagggatgtgaaggaccccttcaaggagaactacaaaccactgctcaacgaaataaaagaggacacaaacaaatggaagaacatcccatgctcatggataggaagaatcaatatcatgaaaatggccatactgcccaaggtaatttatagattcaatgccatccccatcaagctaccaatgactttcttcacagaattggaaaaaagtactctaaagttcatatggaaccaaaaaagagcctgcattgccaggtcaatcctaagccaaaggaacaaagctggaggcatcacactacctgacttcaaactatactacaaggctacagtaaccaaaacagcatggtactggtaccaaaacagagatatagaccaatggaacataacagagccctcagaaacaatgccacatatctaccactatctgatctttgagaaacctgacaaaaacaagaaatggggaaaggattccctatttaacaaatggtgctgggaaaactggctagccacatgtagaaagctgaaactggatcccttccttacaccttatacaaaaattaattcaagatggattaaagacttaaatgttagacctaaaaccataaacaccctagaagaaaacctaggcaataccattcaggacataggcatgggcaaggacttcatgtctaaaacaccaaaagcaatggcaacaaaagccaaaattgacaaatgggatctcattaaactaaagagcttctgcacagcaaaagaaactaccaccagagtgaacaggcaacctacagaatgggagaaaatttttgcaatctactcatctgacaaagggctaatatccagaatctacaaagaactcaaacaaatttacaagaaaaaaacaaccccatcaacaagtgggtga

SEQ ID NO: 1815 - DNA, 1021 bp, Homo sapiens
  SIMILAR (943)..(1020): 501254mologous to Homo sapiens Human secreted protein encoded by gene 3 clone HNHCT15,accession number AAB38012,Smith-Waterman Score=58.
actaaaccaggaagaagttgaatccctgaatagaccaataagaggttctgaaattgaggcaataattaatagcttaccaaccaaaaaaagcccaggaccagatggattcacagccgaattctaccggaggtacaaagaggagctggtaccatttcttctgaaactattccaatcatatgaaaaagaggtaatcctccctaactcattttatgaggccagcatcatcctgataccaaagcctggcagagacacaacaaaaaaagagaattttagaccaatatccctgatgaacatcaatgcaaaaatcctcaataaaatactggcaaatcaaatcccacagcacatcaaaaagcttaaccacgaagatcaagttggcttcatccctgggatgcaagccttgttccacatacaggaatcaataaacgtaatccatcacatcaacagaaccaaagacaaaaaccacataattatctcaatagatgcagaaaaggcctttgacaaaattcaacagcgcttcatgctaaaaactctcaataaattagatgacatgattgtatatttagaaaaccccatagtctcagcccaaaatctccttaagctgataagcaacttcagcaaagtctcaggatacaaaatcaacgtgcaaaaatcacaagcattcctatacaccaataataggcaaacagagagccaaatcatgagtgaactcccattcacaattgctacaaagagaataaaatacctaggaatcgaacttacaagggatgtgaaggaccttttcaaggagaactacaaaccgctgctcaaccaaataaaagaggacacaaacaaatggaagaacattccgtgctcatggataggaagaatcaatatcgtgaaaagggccacactgcccaaggtaatttatagattcaatggcatccccatcaagctaccaatgactttcttcacagaattggaaaaaactaatttaaagttcattggaaccaaaaaagatgccccattgccaaggcaatcctaa

SEQ ID NO: 1816 - DNA, 1443 bp, Homo sapiens
  SIMILAR (385)..(1035): 891254mologous to Homo sapiens Human secreted protein encoded by gene 3 clone HNHCT15,accession number AAB38012,Smith-Waterman Score=997.
atgaagcttccagaggaagcatcaggcagcaatatttgctgttatgcaatatttgctgttctgcagcctctgctggtgatacccaaggaaacagtgtctggagtggacctccagcaaactccaacagatctgcagctgagcgacctgactcctggaaggaaaactaacaaacagaaaggaatagcatcaccatcaacaaaaaggacatccacaccaaaaccccatctacaagcaaatgctcagagattttgtcaccaccaggcctgtgttacaagagttcctaaaggaagcactaaacatggaaaggaacaactggtaccagccactgcaaaaacctgccaaattgtaaagaacatcaatgctatgaagaaactgcatcaattaacagaaatacaaattaccatcagagaataccataaacacctctatgcaaataaactaaaaaatctagaagaaatggataaattcctggacacatacaccctcccaagactaaagcaggaagaagttgaatctctgaatagaccaataatgggctctgaaattgaggcaataattaatagcctaccaaccaaaaaaagtccaggaccagatggattcacagccaaattctacgagaggtacaaagaggagttggtatcattccttctgaaactattccaatcaatagaaaaagagggaatcctccctaactcattttatgaggctagcatcatcttgataccaaaacctggcagagacacaacaaaaaaagagaattttagaccaatatccctgaagaacatcgatgcaaaaatcctcaataaaatactggcaaaccgaatccggcagcccatcgaaaagcttatccaccacgatcaagtcggcttcatccctgagatgaaaggctggttcaaaaaatgcaaatcaataaacgtaatccatcacataaaccaaaccaatgacaaaaaccacatgattatctcaatagatgcagaaaaggccttcgacaaaactcaacagcccttcatgctaaaaactctcaataaactagggacaatcaggcaaaagaaagaaataaaaggtattcaattaggaaaagaggaagtcaaattgtctctgtttgcagatgacatgattgtctatttagaaaactccatcgtctcagcccaaaatctccttaagctgataagcaacttcagcaaagtctcaagatacaaaatcaacctgcaaaaatcacaagcattcctatacaccaataacagacacatggagagccaaatcacgagtgaactcccattcacaattgatacaaagagaataaaatacctaggaatccaatttacaagggatgtgaaggacctcttcaaggagaactacaaattactgctcaatgaaataaaagaggacacaaacaaatggaagaacattccatgctcatggatagaagaatcaatatcatga

SEQ ID NO: 1817 - DNA, 969 bp, Homo sapiens
  SIMILAR (528)..(584): 631254mologous to Mus musculus reverse transcriptase,accession number U15647,Smith-Waterman Score=64.
atggggagaaaccagtgcaaaaaggctgaaaattccaaaaaccaaaacacctcttctcctccaaaagataacaacttcttgccagcaagggaacaaaactggatggaaaatgagtttgatgaattgacagaagtaagattcagaaggtgggtaataacaaactcctctgagcaaaaggagcatgatctaacccaatgcaatgaagctaagaaccttgaaaaaaggagctggtttttagaaaagatcaacaaaatagatagaccactagccagactcgtaaagaagaaaagagagaagaaccaaatcaacacaataaaaaacgataaaggagatatcatcactgatcccacagaaatacaaactaccatcagagaatactataaacacctctatgcaaataaactagaaaatctagaagaaatggataaattcctggacacatacaccctcccaactctaaacaaggaagaagttgaatccctgaataaaccaataacaagttctgaaattgaggcagtaattattagcctaccaaccaaaaaagtccaggaccagaaagattcacagccaaattctaccagagtattggaagttctggccacggcaatcaggcaagagaaagaaataaaggatactcaaacaggaaacgaggaagtcaaattgtctctgtttgcagatgacatgattgtatatttagaaaaccccattgtctcagtccaaaatctctttaagctgataagcaacttcagcaaagtctcaggatacaaaatcaatgtgcaaaaatcacaagcacttctatacaccaataacagacaaacagagagccaaatcatgagtaaactcccattcacaattgctactaagagaataaaatacctaggaatccaacttacaagggatgtgaaggacctcttcaaggggaactacaaaccactgctcaaggaaataagagaggacacaaataaatga

SEQ ID NO: 1818 - DNA, 1164 bp, Homo sapiens
  SIMILAR (1164)..(1018): 1001254mologous to Homo sapiens RNA polymerase II elongation factor ELL2,accession number U88629,Smith-Waterman Score=252.
ctatttgtaagatgccccgtgggttctatctcccttccgactctctcctctcctgtaaaacgttacaggttcccccatatggcatatccctccctcacacgatgtatccactccggtctcccacagtactgcatgtccataaactgtttccccatgcaccctggttaccgcgtcccttctcggtgcttccctgtctctcccattttttttccaacatgaaagcgtctggatttgtagtccaattacagtgtatgtgcgcctatctgagcctctctctgtacttctggctctggctcgttccccgtttacacttcccagagtcagcccaagacgccgggagctttttcgggtacgttgagcgtccgtgaacctctctctccagaacccgatgtcttgctcccggggagcgctaagtgtgcgtgagtcctcaggtctctccccaggggcactgtgttggtttgtgtccgtcctggacgcggcgcgtctccagtaacgcgatgcgccggtgtcccggagtccccccacacgcggagcgcctgtgtcctgtctctgaggatccaccgtgcctatgtaactggaaaacgcgggcagctggtgcccgcgagtcgtccctggttccttgcccatacgctgctcgctaccctccttccccgccgagggtagcgtggtcatctcacttctcttatcggggcctctctccctccttgggacccaacaagccaggaaatcctcgggggccgtcggaaagtcccgacagcggcagcgcagccgacccagggctgcggctgcctcggccccgccgccaggggccgcccgactgcccgcttccccaacgcccaggctagcccgggaccgcggcgtcagccaccctgcccggccctgccctgcctggccgctgcgggcgctgacggtagcagctgccagccacggctccgccggccccgcacccgggcgcggccaggccgtgaggggtgcgctctgcctctctgagcccagcctgccggccggcccgctcaccttgtggctctggtaagtctcgagcgcccggatcgccgtctcggtgagcttcacatgcagtacggtgatgttgtcctgccccagccgtccgcacgacagcccatagcgctgctcctcccgcaggccccctgtcccccccgccgccat

SEQ ID NO: 1819 - DNA, 2075 bp, Homo sapiens
  SIMILAR (48)..(1733): 801254mologous to Homo sapiens putative p150,accession number U93563,Smith-Waterman Score=2263.
actgtaagctccttgatggtgggcagttttatctggttccctgctgtatctccggtgaaaacaacattgactggtacatgagagacagatcaacgagacagaaagtcaacaaggatacccaggaattgaattcagctctgcaccaagcagacctaatagacatctacagaactctccaccctaaatcaacagaatatacattcttttcagcaccacaccacacctactccaaaattgaccacatagttggaagtaaagcactcctcagcaaatgtaaaagaacagaaaatgtaagaaactgtctctcagaccacagtgcaatcaaactggaactcaggattaagacactcactcaaaattgctcagctacatggaaactgaacaacctgctcctgaatgactactgggtaaataatgaaatgaaggcagaaataaagatgttctttgaaaccaacgagaacaaatacacaacataccagaatctctgggacacattcaaagcagtgtgtagagggaaatttatagcactaaatgcccacaagagaaagcaggaaagatctaaaattgacaccctaacatcacaattaaaagaactagaaaagcaagagcaaacacattcaaaagctagcagaaggcaagaaataactaagatcagagcagaactgaaggaaatagagatacaaaaaacccttcaaaaaattaatgaatccaggagctggttttttgaaaagatcaacgaaattgatagaccgctagcaagactaataaagaagaaaagagagaagaatcaaatagacacaataaaaaatgataaaggggatatcaccaccaatcccacagaaatacaaactaccatcagagaatactacaaacacctctacgcaaataaactagaaaatctagaagaaatggataaattcctcgacacatacatcctcccaaggctaaaccaggaagaagttgaatctcggaatagaccaataacaggagctgaaattgaggcaataatcaatagcttaccaaccaaaaaaagtccaggaccagatggattcacagccgaattctaccagaggtacaaagaggagctggtaccaatccttctgaaacgattccaatcaatagaaaaagtcggaatcctccctaactcattttatgaggccagcatcatcctgataccaaaggctggcagagacacaaccaaaaaagagaattttagaccaatatccttgatgaacattgatgcaaaaatcctcaataaaatattggcaaaccgaatccagcagcacatcaaaaagcttatccaccatgatcgagtgggcttcatccctgggatgcaaggctggttcaacatacacaaatcaataaatgtaatccagcatataaacagaaccaaagacaaaaaccacatgattatctcaatagatgcagaaaaggcctttgacaaaattcaacaacccttcatgctaaaaactctcaataaattagatgacatgattgtatatctagaaaaccccatcgactcagcccaaaatctcctcaagctgaaaagcaacttcagaaaagtctcaggacagaaaatcaatgtacaaaaatcacaagcattcttatacaccaacaacagacaaacagagagccaaatcatgagtgaactcccattcacaattgcttcaaagagaataaaatacctaggaatccaacttacaagggatgtgaaggacctcttcaaggagaactacaaaccactgctcaatgaaataaaagaggatacaaacaaatggaagaacattccatgctcatgggtaggaagaatcaatatcgtgaaaatggccatactgccaaaggtaatttatagattcaatgccatccccatcaagctaccaatgactttcttcacagaattggaaaaaactactttaaagttcatacggaaccaaaaaagagcctgcatcaccaagtcaatcctaagccaaaagaacaaagctggaggcatcacgctacctgacttcacactatactacaaggctacagtaaccaaaacagcatggtacttgtaccaaaacagagatatagactaa

SEQ ID NO: 1820 - DNA, 4237 bp, Homo sapiens
  SIMILAR (26)..(2668): 1001254mologous to Homo sapiens plakophilin 2b,accession number X97675,Smith-Waterman Score=4540.
cagctcggtcgcccccaccggccccatggcagcccccggcgccccagctgagtacggctacatccggaccgtcctgggccagcagatcctgggacaactggacagctccagcctggcgctgccctccgaggccaagctgaagctggcggggagcagcggccgcggcggccagacagtcaagagcctgcggatccaggagcaggtgcagcagaccctcgcccggaagggccgcagctccgtgggcaacggaaatcttcaccgaaccagcagtgttcctgagtatgtctacaacctacacttggttgaaaatgattttgttggaggccgttcccctgttcctaaaacctatgacatgctaaaggctggcacaactgccacttatgaaggtcgctggggaagaggaacagcacagtacagctcccagaagtccgtggaagaaaggtccttgaggcatcctctgaggagactggagatttctcctgacagcagcccggagagggctcactacacgcacagcgattaccagtacagccagagaagccaggctgggcacaccctgcaccaccaagaaagcaggcgggccgccctcctagtgccaccgagatatgctcgttccgagatcgtgggggtcagccgtgctggcaccacaagcaggcagcgccactttgacacataccacagacagtaccagcatggctctgttagcgacaccgtttttgacagcatccctgccaacccggccctgctcacgtaccccaggccagggaccagccgcagcatgggcaacctcttggagaaggagaactacctgacggcagggctcactgtcgggcaggtcaggccgctggtgcccctgcagcccgtcactcagaacagggcttccaggtcctcctggcatcagagctccttccacagcacccgcacgctgagggaagctgggcccagtgtcgccgtggattccagcgggaggagagcgcacttgactgtcggccaggcggccgcagggggaagtgggaatctgctcactgagagaagcactttcactgactcccagctggggaatgcagacatggagatgactctggagcgagcagtgagtatgctcgaggcagaccacatgccgccatccaggatttctgctgcagctactttcatacagcacgagtgcttccagaaatctgaagctcggaagagggttaaccagcttcgtggcatcctcaagcttctgcagctcctaaaagttcagaatgaagacgttcagcgagctgtgtgtggggccttgagaaacttagtatttgaagacaatgacaacaaattggaggtggctgaactaaatggggtacctcggctgctccaggtgctgaagcaaaccagagacttggagactaaaaaacaaataacagaccatacagtcaatttaagaagtaggaatggctggccgggcgcggtggctcacgcctgtaatcccagcactttgggaggccaaggcgggcggatcacgaggtcaggagttcgagaccagcctgaccaacatggtttgctgtggaatttgtcatctaatgacaaactcaagaatctcatgataacagaagcattgcttacgctgacggagaatatcatcatccccttttctgggtggcctgaaggagactacccaaaagcaaatggtttgctcgattttgacatattctacaacgtcactggatgcctaagaaacatgagttctgctggcgctgatgggagaaaagcgatgagaagatgtgacggactcattgactcactggtccattatgtcagaggaaccattgcagattaccagccagatgacaaggccacggagaattgtgtgtgcattcttcataacctctcctaccagctggaggcagagctcccagagaaatattcccagaatatctatattcaaaaccggaatatccagactgacaacaacaaaagtattggatgttttggcagtcgaagcaggaaagtaaaagagcaataccaggacgtgccgatgccggaggaaaagagcaaccccaagggcgtggagtggctgtggcattccattgttataaggatgtatctgtccttgatcgccaaaagtgtccgcaactacacacaagaagcatccttaggagctctgcagaacctcacggccggaagtggaccaatgccgacatcagtggctcagacagttgtccagaaggaaagtggcctgcagcacacccgaaagatgctgcatgttggtgacccaagtgtgaaaaagacagccatctcgctgctgaggaatctgtcccggaatctttctctgcagaatgaaattgccaaagaaactctccctgatttggtttccatcattcctgacacagtcccgagtactgaccttctcattgaaactacagcctctgcctgttacacattgaacaacataatccaaaacagttaccagaatgcacgcgaccttctaaacaccgggggcatccagaaaattatggccattagtgcaggcgatgcctatgcctccaacaaagcaagtaaagctgcttccgtccttctgtattctctgtgggcacacacggaactgcatcatgcctacaagaaggctcagtttaagaagacagattttgtcaacagccggactgccaaagcctaccactcccttaaagactgaggaaaatgacaaagtattctcggctgcaaaaatccccaaaggaaaacacctatttttctactacccagcccaagaaacctcaaaagcatgccttgtttctatctttctctatttccgtggtcccctgaatccagaaaacaaatagaacataattttatgagtcttccagaagacctttgcaagtttgccaccagtagataccggccacaggctcgacaaatagtggtctttgttattagggcttatggtagatggcttcctggaatcaaaatgtgaattcatgtggaagggacattaatccaataaataaggaaagaagctgttgcattactgggattttaaaagtttgatttacatttatattccttttctggttcccatgttttgtcactcatgtgcacattgcttcgccattgggcctccagtgtattgttctgcagtgttgaaacagaatggaaatgacaagaaatatctgcagttatccaggagaaagtataatggcaaaattattggtttctttctttactttgtgcttgtttttatccccttggttgtttttctctgatttttaaataaacttaagaaatttagattacagagtatgcatgactgtaagaaaaagaaattgagaggaagtgatcatagcaaattaaagaagtcttttcctcccagaacttaaagtaaaataaaaaataaataaataaataaaatcttttccacagagaaaggcaactgtgatgataaaatttaagctcccccaacactgagtcaatgagatttttctcaggagatactttacctataacaacgccgttaaatccaaatctcttctaaacgatggcattctatgtaatgcctttcctggacttttttggccactgcctggactagtgaaagaatggactctatctttatctgcaagaggaactaaggccttctatcagactgcctggccagcctggggcactgaaaatacggctcatgttaatgagttacattatcagccagcccagccttgcccaccatttaagaaatatcacagagccactagatctcatatgatcttcttcaagccattattttaactcaagaaaactctagagaagaaaagtgaagaagtcatgttgaagaagatgtaagaatgtgtcaagaccatccagaaatgatatgagaaatactgatattttaaatggttgacatcatccagcgaaatgaatctacattaaatgttgttttaactgcgctatgattaaaaccattcatatagagttagtctttacaactactattctgttatttttttttttaatctgacaacatttgtcctaagtaagataagcaaaaaaattcttcaactccttttggcaagaaaactgtaacagaaaataaattttgaatgtgtacttaagtctttattatatttgaagcaattttttttcaattttaaaagctgaatgaagacaacttaggttgctaacctagttcaaaatgaaattatttagataccaatttttaaaatactggagagaatttatatgtctttttccagagttctgatgataagca

SEQ ID NO: 1821 - DNA, 1635 bp, Homo sapiens
  SIMILAR (976)..(1620): 711254mologous to Homo sapiens Human secreted protein encoded by gene 3 clone HNHCT15,accession number AAB38012,Smith-Waterman Score=721.
atgcattgtatcctccccacaccttctggctctggctcgttccccgtttacacttcccagagtcagcccaagacgccgggagctttttcgggtacgttgagcgtccgtgaacctctctctccagaacccgatgtcttgctcccggggagcgctaagtgtgcggcactgtgttggtttgtgtccgtcctggacgcggcgtctccagtaacgcgatggccggtgtcccggagtccctgggaatgcaggtgtgtcccctccccccccgtacgcgaagcgccagtgtccccgccgttccagtgtgcgccgcccccttacacggactgcctaagtccctatctctatgagtacaccgtgtgcccctcaccatgcgcccgagtccccatcccttcgagcacacatccctgggaatacaaggtcccacccccacacgcggagcgcctgtgtcctgtctctgaggatccaccgtgcctatgtaactggaaaacgcgggcagctggtgcccgcgagtcgtccctggttccttgcccatacgctgctcgctaccctccttccccgccgagggtagcgtggtcatctcacttctcttatcggggcctctctccctccttgggacccaacaagccaggaaatcctcgggggccgtcggaaagtcccgcagcggcagccagccgacccagggctgcggctgcctcggccccgccgccaggggccgcccgactgcccgcttccccaacgcccaggctagcccgggaccgcggcgtcagccaccctgcccggccctgccctgcctggccgctgcgggcgctgacggtagcagctgccagccacggctccgcgacacccgcatccgggccgccgccagggcgtgaaggtgtgcgctctgcctctctgagcccagcctgccggccggccgctcaccttgtggctctgaaccgccctcatcggccgccctccactctcacgggggcgggcccaaagtcactagagttttgctcctgggacgggacgtccgagagactaaaccaggaagacgttgaatctctgaatagaccaataacaggttctgaaattgaggcaataattaatagcctaccaaccaaaaatgtccaggaccagaaggattcacagccgaattctacaagagtattgaaagtcctggccagggcagtcaggcaaaagaaagcaatacaaggtattcaaataggaaaagaggaagtcaaattgtctctgtttgcagatgacatgattgtatatttagaaaacccgatcgtcccagcccaaaatctcctcaagctgataagcaacttcagcaaagtctcaggatacaaaatcaatgtgcaaaaatcacaagcattcctatacaccaataacagacaaacagagagccaaatcatgagtgaactcctattcacaattgctactaagagaataaaatacctaggaatccaacttacaagggatgtgaaggatctcttcaaggagaactacaaaccactactcaaggaaataagagaggacacaaacaaatgtaaaaacattccatgctcatggataggaaggatcaatatcatgaaaatggccttactgcccaaagtaatttatagattcatgctatccccatcaagctatgactga

SEQ ID NO: 1822 - DNA, 2353 bp, Homo sapiens
  SIMILAR (1)..(951): 951254mologous to Homo sapiens Human secreted protein encoded by gene 3 clone HNHCT15,accession number AAB38012,Smith-Waterman Score=1541.
agaaagcaggaaagatccaaaattgacaccctaacatcacaattaaaagaactagaaaagcaagagcaaacacattcaaaagctagcagaaggcaagaaataactaaaatcagagcagaactgaaggaaatagagacacaaaaaacccttcaaaaaattaatgaatccaggagctggttttttgaaaggatcaacaaaattgatagaccgctagcaagactaataaaggaaaaaagagagaagaatcaaatagacgcaacaaaaaatgataaaggggatatcaccactgatcccacagaaatacaaactaccatcagagaatactacaaaaccctctacgcaaataaactagaaaatctagaagaaatggataaattcctggacacatacactctcccaagactaaaccaggaagaagttgaatctctgaacagaccaataacaggatctgaagttgtggcaataattaatagcttaccaaccaaaaagagtccaggaccagatggattcacagccaaatactaccagaggtacaaggaggaactggtaccattccttctgaaactattccaatcaacagaaaaagagggaatcctccctaactcatttgatgaggccagcatcatcctgataccaaagcctggcagagacacaaccaaaaaagagaattttagaccaatatccttgatgaacgttgatgcaaaaatcctcaataaaatactggcaaaccgaatccagcagcacatcaaaaagcttatccaccatgatcaagtgggcttcatccctgggatgcaaggctggttcaatatatgcaaatcaatcaatgtaatccagcatataaacagaaccaaagacaaaaaccacatgattatctcaatagatgcagaaaaggcctttgacaaaattcaacaacccttcatgctaaaaactctcaataaattagtgttggaagttctggccagggcaattaggcaggagaaggaaataaagggtattcaattaggaaaagaggaagtcaaattgtccctgtttgcagatgacatgattgtatatttagaaaaccccatcatctcagcccaaaatctccttaagctgataagcaacttcagcaaagtctcaggatacaaaatcaatgtgcaaaaatcacaagcattcttatacaccaataacagacaaacagagagccaaatcatgagtgaactcccagttcacaattgcttcaaagagaataaaatacctaggaatccaacttaacaagggatgtgaaggacctcttcaaggagaactacaaactactcactgatcaaggaaataagagaggacacaaacaaatggaaaaacattccatgctcatggataggaagaatgaatatcatgaaaatggccatactgcccaaagtaatttacagattcaatgctatcctcatcaagctaccattgacttccttcacaaaattggaaaaaacaactttaaagttcatatggaaccaaaaaagagcccgcatcgccaagtcaatcctaagccaaaagaacaaagctggaggcatcacactacctgacttcaaactatactacaaggctatagtaactcaaaacagcatggtactgctaccaaaacagagatatagaccaatggaacagaacagagccctgagaaataatgctgcatatctacaactatctgatctttgacaaacctgagaaaaacaagcaatggggaaaggattccctatttaataaatggtgctgggaaaactggctaaccatatgtagaaagctgaaactggatcccttcctcacatcttatacaaaaattaattcaagatggattaaagacttaaatgttagacctaaaaccataaaaaccccagaagaaaacctaggcaataccattcaggacataggcatgggcaaggacttcatgactaaaacaccaaaagcaatggcaacaaaagccaaaattgacaaatgggatctaattaaactaaagagcttctgcacagcacaagaaactaccatcagagtgaacaggcaacctacagaatgggagaaaatttctgcaatctactcatctgacaaagggctaatatccagaatctacaaagaacttaaacaaatttacaagacaaaaacaaacaaccccatcaaaaagtgggcaaaggatatgaacagacacttctcaaaagaagacatttatgcagccaaaagacacatgaaaaaatgctcatcatcactggccatcagagaaatgcaaatcaaaaccacaatgagataccatctcacaccagttagaatggcgatcattgaatcaagtcaggaaacaacaggtgctggagaggatgtggagaaatag

SEQ ID NO: 1823 - DNA, 2078 bp, Homo sapiens
  SIMILAR (1752)..(2072): 951254mologous to Plasmid F Protein E,accession number M12987,Smith-Waterman Score=513.
accctgcggaagaggtggttacttacatccccctagacttctgccactaccacagtgaagatggcaagcagtttctcctgcccctgaccccgaccctcctcactcaccccctgtgcttggtcaccggcaccacgtctctgctgctggtgtgtgtggggaagcctgagatcttcgtagcgatacactactatacaccaaacacaaagctggtgccattggcacgacctagaaacagccatgttcctcatcccccagagcgcaccacggtcactcagtacagcacgtgtgcgctgcttactgccctgtgcctgctgctgcctgtgctgcaggaaacagcccagagtcgaaggatggtcaccagccacccggaagaccgtcctgctctggcacgcaaacacggagcatcgcaaccggccggcctcggctttccaagaactcagactgtcactcccgccttcacattccagaccccaacagcagctgagcccgcacttctgaccgcgtggctgggtagagctccagaaactgagacaatcacagacatggcaggtgctgctggcacccaccggaggaagaggcgactggagcccgagaagcgacctggcgcttcccagaagacgacactgaaggagcggccccctgagactggaccatgggatcttccacccccacctacagagcgcaccacggtcactcagtacagcacgtgtgcgctgcttactgccctgtgcctgctgctgcctgtgctgcaggaaacagcccagagtcgaaggatggtcaccagccacccggaagaccgtcctgctctggcacgcaaacacggagcatcgcaaccggccggcctcggctttccaagaactcagactgtcactcccgccttcacattccagaccccaacagcagctgagcccgcacttctgagcgcgtggctgggtagagctccagatactgagaacatcacagacatggcaagggcaacctccagatccatcacgtggggcaggatggtcagtgcaaaggcacgtggggcggcagcagtgacggaggaacgagagacaccagaacggaatcttgttcagagaaatccagacagcaactcctccgacatcagccctgagtccttcctgaactcagatctgtgctggagccaatgggcctccatgcctgctgagaaaagctggaatctctgtccccacagcttgagtgcactggcctcttctcagctcaacctccgcctcttgggttcgggtaatgatggttccacgtcagcggccctccgcctcttgggtttgcgtgacggttccacgtcaccgaccctccgcctcttgggttcgggtgatgatggttccacgtcagcggccctccgcctcttgggtttgcgtgacggttccacatcaccgaccctccgcctcttgggttcgggtgatgatggttccacgtcagcggccctccgcctcttgggtttgcgtgacggttccacgtcaccgaccctccgcctcttgggttcgggaggtgcacatgctgtcgtgccccagtgttccagcatcgctgactgggagagggaagaagaggtctttaagccccatgaggacagaggtagtcttatttgcacagaactggtacatacctactatgacctacaagaggtcatggatggaaatgtcataactgcaaagagaacagctgcagtttctgccattgccaccaagtgtgacaatctaaaaacttgtcacacttcacatggatctgtcatggcggaaacagcggttatcaatcacaagaaacgtaaaaatagcccgcgaatcgtccagtcaaacgacctcactgaggcggcatatagtctctcccgggatcaaaaacgtatgctgtatctgttcgttgaccagatcagaaaatctgatggcaccctacaagaacatgacggtatctgcgagatccatgttgctaaatatgctgaaatattcggattgacctctgcggaagccagtaaggatatacggcaggcattgaagagtttcgcggggaaggaagtggttttttatcgccctgaaaaggatccggcgatgaaaaagctatga

SEQ ID NO: 1824 - DNA, 1306 bp, Homo sapiens
  SIMILAR (423)..(1034): 651254mologous to Rattus norvegicus mu crystallin,accession number Y17328,Smith-Waterman Score=586.
gcacagccgagggtacgtggatcgcggtgcggagactgaggttagaaggcacaggtggcgagatgagccgggtaccagcgttcctgagcgcggccgaggtggaggaacacctccgcagctccagcctcctcatcccgcctctagagacggccctggccaacttctccagcggtcccgaaggaggcagtcatgcagcccgtgcgcaccgtggtgccggtgaccaagcacaggggctaccttgggggtcatgcccgcctacagtgctgcagaggatgcactgaccaccaagttggtcacccttctacgaggaccgcggcatcaccttcggtcgtcccttcccaccagggtaattgtggttactcttttgagcccagcaatgggcaccctgctggcggtcatgggatgggaaatgttcataaattgcaaagagaacagctgcagtttcttgccatttgccaccaagttttttgaaacctcccagcagtgaagtgctgtgcatccttggggctggggtccaggcctacagccattatgagatcttcacagagcagttctcctttaaggaggtgaggatatggaaccgcaccaaagaaaatgcagagaagtttgcagacacagtgcaaggagaggtacgggtctgttcttcggtccaggaggctgtggcaggtgcagatgtgatcatcacagtcaccctggcaacaggagcccattttgtttggtgaatgggttgaaaccaggggctcacatcaatgctgttggagccagccagacctgactggagagaactggatgatgagctcatgaaagaagctgtgctgtacgtggattcccaggaggctgccctgaaggagtctggagatgtcctgctgtcaggggccgagatctttgcctgagctggggagaagtgatttaagggagtgaaacccagccccactgtgagaagaccccacggtgttccaagtctttgggaatggcagtgggaagacacagttgcagcccaaactcatcctatgattccctggtcatctggtaaataaaacaaaggaacttgatgttgagaatgattgcttggggaatattgctgctggttctcataatttctagagttaaatgggggagcccagtccccagtgaactctcctttggtgcttatcatgttttaccttaaatgctgagatcctcatttatgtttgtagttggaaagcaaagctaggtagccatttcttctgttctaccaagttataatagcattcatttccctttatatttccctgaaataaagcacattccaattgtgaaaaaaaaa

SEQ ID NO: 1825 - DNA, 3086 bp, Homo sapiens
  SIMILAR (53)..(2035): 1001254mologous to Homo sapiens peroxisomal acyl-coenzyme A oxidase,accession number S69189,Smith-Waterman Score=3453.
actgccacctcggtcggtcggtgcttacttcgctgccagctggtctgtcgccatgaacccggacctgcgcagggagcgggattccgccagcttcaacccggagctgcttacacacatcctggacggcagccccgagaaaacgcggcgccgccgagagatcgagaacatgatcctgaacgacccagacttccagcatgaggacttgaacttcctaactcgcagccagcgttatgaggtggctgtcaggaaaagtgccatcatggtgaagaagatgagggagtttggcatcgctgaccctgatgaaattatgtggtttaaaaaactacatttggtcaattttgtggaacctgtgggcctcaattactccatgtttattcctaccttgctgaatcagggcaccactgctgagaaagagaaatggctgctttcatccaaaggactccagataattggcacctacgcccagacggaaatgggccacggaactcaccttcgaggcttggaaaccacagccacgtatgaccctgaaacccaggagttcattctcaacagtcctactgtgacctccattaaatggtggcctggtgggcttggaaaaacttcaaatcatgcaatagtccttgcccagctcatcactaaggggaaatgctatggattacatgcctttatcgtacctatccgtgaaatcgggacccataagcctttgccaggaattaccgttggtgacatcgggcccaaatttggttatgatgagatagacaatggctacctcaaaatggacaaccatcgtattcccagagaaaacatgctgatgaagtatgcccaggtgaagcctgatggcacatacgtgaaaccgctgagtaacaagctgacttacgggaccatggtgtttgtcaggtccttccttgtgggagaagctgctcgggctctgtctaaggcgtgcaccattgccatccgatacagcgctgtgaggcaccagtctgaaatgaagccaggtgaaccagaaccacagattttggattttcaaacccagcagtataaactctttccactcctggccactgcctatgccttccagtttgtgggcgcatacatgaaggagacctatcaccggattaacgaaggcattggtcaaggggacctgagtgaactgcctgagcttcatgccctcaccgctggactgaaggctttcacctcctggactgcaaacactggcattgaagcatgtcggatggcttgtggtgggcatggctattctcattgcagtggtcttccaaatatttatgtcaatttcaccccaagctgtacctttgagggagaaaacactgtcatgatgctccagacggctaggttcctgatgaaaagttatgatcaggtgcactcaggaaagttggtgtgtggcatggtgtcctatttgaacgacctgcccagtcagcgcatccagccacagcaggtagcagtctggccaaccatggtggatatcaacagccccgaaagcctaaccgaagcatataaactccgtgcagccagattagtagaaattgctgcaaaaaaccttcaaaaagaagtgattcacagaaaaagcaaggaggtagcttggaacctaacttctgttgaccttgttcgagcaagtgaggcacattgccactatgtggtagttaagctcttttcagaaaaactcctcaaaattcaagataaagccattcaagctgtcttaaggagtttatgtctgctgtattctctgtatggaatcagtcagaacgcgggggatttccttcaggggagcatcatgacagagcctcagattacacaagtaaaccagcgtgtaaaggagttactcactctgattcgctcagatgctgttgctttggttgatgcatttgattttcaggatgtgacacttggctctgtgcttggccgctatgatgggaatgtgtatgaaaacttgtttgagtgggctaagaactccccactgaacaaagcagaggtccacgaatcttaccacaagcacctgaagtcactgcagtccaagctctgaagtgtcacaaggacaagtttaatctgcttcagaaagcgcctgtgtgcaactcaaattttgtggaatcttttcgaattcaaatagctatagagcaaatgataaattgacccctttttataaatggagggaaaaaatgaacagatttcagagattaaatgaaaaaaagcagatgtgttttaagtgcaattaacactgaaagagacctgttaaaccattcagaaaaagcttaagaaatgcgatatgacttccttttgtaatgctgctgatcccagtagactatgacttttgataattagcagaatttaactactgagtagttgattattttcacattttaattgctaatcactggctatataagtgtttttaagcaagggtatttttgaagtggtgtagaacccttccacgctttcctgctcagtgttctaccagacaagaaaagggacttggggaaggaaacttattggaaacttgatgcgaattaggttcttctttgcacaaactctgcctgcttgctctcccttgctgatgggttgcaattctcaaactattcatgctagcaatttttccacgggggggcctttttcccacgggggcctctataggggcccatttctccggtaaataggaatttcccctttaaggggtgccagtagtaggagtatagggaacctctcagctgtggcactgttgtagctttggagtcagagtgtactctgggcaatcagatttccacatattctgcatcttggataagcattaaaagttgggatactaatttggataaaaaaatgcactaggcaaactccagcgagacagaaagtatagggaaacctctcagctgtggcactgttgtagctttggagtgcagagtgtaactctggcgacaatcagatttcacatattctgtcatcttggcataagccattaaaagcttggagattactgtatttggcattaaaaaaaaatgtcacttaggtcagcactcccagacgtagcacagaaaaaccctttgacacaaaccatgtgttctgatttttggttcaga

SEQ ID NO: 1826 - DNA, 401 bp, Homo sapiens
ccacgttcttcttccaggtgaagcctgatgggcacatacgtgaaaccgcttgagtaacaagctgacttacggggaccatggtgtttgtcaggtccttccttgtgggagaagctgctcgggctctgtcttaaggcgtgcaccattgccatccgatacagcgctgtgaggcaccagtctgaaatcaagccagggtaaggatagggtcctagatgggctcagtaccaaaggcctagtttttaccccattcagatcccagaattcccaaatgtcaatacagaagatgcattagcacctgcaaaattggctagggtgataactgggcctgtaatttcatatctaggcttccttttcttaagaggaaagacagaaataaccacccttgctataatcagtgactgcca

SEQ ID NO: 1827 - DNA, 2182 bp, Homo sapiens
  SIMILAR (660)..(1670): 661254mologous to Homo sapiens HTRM clone 438283 protein sequence,accession number AAY73345,Smith-Waterman Score=1194.
tttttttttttttttttcattaaaaaattctttatttagtatattctgtcactcagagagtaagcttgataaaccatagggttggttttaaaaatattaatagtaatggttttattgataggtaatttggtttagtaggagttataaataccaaaaagggaaaggttaccagaaataagacattatttctaacaaatcttcaaagaaaaccttgaataattaaagtccctttttctctcacaagtgttgcatatacaggttttggctcttcagagccctctaccaataaggcacctgcaatagtagataatttgctaccgcagccttagagagcagtttttagaggtctgctggtgcttctcttgacaaagcacactttttttttgtttcccccgagacagagtcttgctctgttgcccagagtcggagtgcaatgggcatgatctccggctcactggcaacctctggcctcctggggttcaagcaattctcctggcctcagcatcccaagtagctgggattacaggtacccaccaccacgcccagctaatttttgtattttcagtagagacaggggtttcaccatgttggccaggctggtctcgaactcctgacctcaggtgatccgcccgccttggcctcccaaagtgctgggattacagggtctactgacattcagggatgtggccatagaattctctcaggaggagtggaaatgcctggaccctgctcagaggactctatacagagacgtgatgctggagaattataggaacctggtctccctggatacctcttccaaatgcatgatgaagatgttctcatcaacaggacaaggcaatacagaagtggtccacacagggacattgcaaatacatgcaagtcatcacattggagatacttgcttccaggaaattgagaaagatattcatgactttgtgtttcagtggcaagaaaatgaaacaaatggccatgaagcactcatgacaaaaaccaaaaagttgatgagtagtacagagcgacatgatcaaaggcatgctggaaacaaacctattaaaaatgagcttggatcaagctttcattcgcatctgcctgaagtgcacatatttcaccccgaagggaaaattggtaatcaagttgagaaggctatcaacgatgctttctcagtttcagcatcccaacgaatttcctgtaggccaaaaactcgtatttctaataagtataggaataatttcctccagtcttcattactcacacaaaaacgggaagtacacacaagagaaaaatctttccaacgtaatgagagtggcaaagcctttaatggtagctcactcttaaaaaaacatcagataatccatttaggagacaaacagtataaatgtgatgtatgcggcaaggactttcatcagaagcgataccttgcatgccatagatgtcacactggtgagaatccttacacgtgtaatgagtgtggcaagacattcagtcacaattcagccctgttagttcacaaggcaattcatactggagagaaaccttacaagtgtaatgaatgtggcaaggtttttaatcaacaatcaaaccttgcacgtcatcatagagttcatactggagagaaaccttacaaatgtgaagaatgtgacaaagttttcagtcgcaaatcacaccttggaaagacataggagaattcatactggagagaaaccgtacaaatgtaaggtttgtgacaaggctttcagaccgtgattcacacctggcacaacatattgtaattcacactggagagaaaccttacaagtgtaatgagtgtggcaagacctttgttccaaattcatctccttgtaatgcataaggtcctttcatactggagagaaacgttacaagtgtaatgaatgtggcaaggtttttaatcacaaatcaaaccttgcatgtcatccatagacctccatacctggaagagaaacctttaccagtggtaatggaatgtggccaaggtttttaatcgaaaatcaaaccttgaacgtcatcatagacttcatactggaaagaaatcttagaagtgtaaatttgcaaggtttttaggcaacagtcaaaccttgcatgtcatcatagactttatactggagagaaaccttacaaatgtgaagaatgtgacaaaagttttcaatttcaaatcactcct

SEQ ID NO: 1828 - DNA, 906 bp, Homo sapiens
  SIMILAR (328)..(900): 811254mologous to Bacillus amyloliquefaciens precursor (AA - 29 to 443),accession number X52988,Smith-Waterman Score=827.
atgacgggcggtggcttcggtggctgcacggtgacactgctggaggcctccgctgctccccaccgcatgcggcacatccaggagcactacggcggactgccaccttctacctctctcaagcagccgatggagccaaggtgctgtgcttgtgaggcacccccaggacagcacacgcttcatgccctcaccgctggactgaaggctttcacctcctggactgcaaacactggcattgaagcatgtcggatggcttgtggtgggcatggctattctcattgcagtggtcttccaaatatttatgtcaatttcaccccaagctgtacctttgagggagaaaacactgtcatgatgctccagacggctagagtcggcgacaactcaatcgactgctggaaagacgcgcgccgtctctttcaagacggcgataagtctcgagcgccacacgatccgatcctgacagatcagacgcaagaatggtccggttctgcaacctttacatctgacggaggaatccgtttattctacactgactattccggtaaacatcacggcaaacaaagcctgacaacagcgcaggtaaatgtgtcaaaatctgatgacacactcaaaatcaacggagtggaagatcacaaaacgctttttgacggagccggaaatacatatcagcacgttcagcagtttatcgatgaaggcaattatacatccggcgacaaccatacgctgagagaccctcactacgttgaagacaaaggccaaaaataccttgtattcgaagccaacacgggaacagaaaacggataccaaggcgaagaatctttatttaacaaagcgtactccggcggcggcacgaacttcttccgtaaagaaagccagaagcttcagcagagcgaggaaagacagaaataa

SEQ ID NO: 1829 - DNA, 462 bp, Homo sapiens
  SIMILAR (193)..(360): 961254mologous to Homo sapiens acyl-CoA oxidase,accession number U03268,Smith-Waterman Score=298.
ccctcaggaaaaatggaaattaccaagagctataaagtaatacagaaaggggcagtgctcccatatatgattaagtgcacgcaactaattcatacttaaggtttttttgtctccttcccttgctctatttaaatagctgattctgtcacacctgatgactcttctctcaaatgcccatccttgatatttcctcgaagttttgtgcaccgaggccggcctgagcctctggatcttcacttgggcatgttcctgcccaccttgcttcaccaggcaactgcggagcagcaggagcgcttcttcatgcccgcctggaacttggagatcattggcacttatgcccagacagagatgggtcatggtatggagtattcagtctaccttaaggagatgggcgggcccctgtgagcttaccatgtgtggagtgccccctcgtgccaagataggcgtaatgatgctacgatt

SEQ ID NO: 1830 - DNA, 373 bp, Homo sapiens
  SIMILAR (2)..(202): 1001254mologous to Homo sapiens peroxisomal fatty acyl-coA oxidase,accession number U07866,Smith-Waterman Score=339.
catgacagagcctcagattacacaagtaaaccagcgtgtaaaggagttactcactctgattcgctcagatgctgttgctttggttgatgcatttgattttcaggatgtgacacttggctctgtgcttggccgctatgatgggaatgtgtatgaaaacttgtttgagtgggctaagaactccccactgaacaaagcagaggtaaaaatccagtgtctctgcacctttttaaaagtcttcacttaaatattgaagcaggaaaggcctctcgaaggggatttatctgtgaaagctctgaaagtaccatggccacttctgacagtcactttatttgagcaacaggttcagaagggaactgggttgttcccacagtaa

SEQ ID NO: 1831 - DNA, 4204 bp, Homo sapiens
  SIMILAR (107)..(238): 901254mologous to Homo sapiens peroxisomal acyl-CoA oxidase,accession number X71440,Smith-Waterman Score=200.
  misc_feature (1)...(4204): n = a,t,c or g
ccgtcggccggaactcccgggatgacgctttcgtgctggagctgcggatttagattgtcactgccacctcggtcggtgcttacttcgctgccagctggtcgtcgccatgaacccggacctgcgcagggagcgggattccgccagcttcaacccggagctgcttacacacaccctggacggcagccccgagaaaacccggcgccgccgagagatcgagaacatgatccttgaacgacccagacttccagcatgaggacttgaactttcctcactcgcagccagcgttatgaggtggctgtcaggaaaagtgccatcatggtgaagaagatgagggagtttggcatcgctgaccctgatgaaattatgtggtttaaaaattttgtgcaccgagggcggcctgagcctctggatcttcacttgggcatgttcctgcccaccttgcttcaccagggcaactgcggagcagcaggagcgcttcttcatgcccgcctgggaacttgggagatcattgggcactttattgcccagacagagatggggtcatgggaactcacctttcgaggctttnggaaaccacagccacgtatgaccctgaaacccaggagttcattctcaacagtcctactgtgacctccattaaatggtggcctggtgggcttggaaagacttcaaatcatgcaatagttcttgcccagctcatcactaaggggaaatgctatggattacatgcctttatcgtacctattcgtgaaatcgggacccataagcctttgccaggaattaccgttggtgacatcggccccaaatttggttatgatgagatagacaatggctacctcaaaatggacaaccatcgtattcccagagaaaacatgctgatgaagtatgcccaggtgaagcctgatggcacatacgtgaaaccgctgagtaacaagctgacttacgggaccatggtgtttgtcaggtccttccttgtgggagaagctgctcgggctctgtctaaggcgtgcaccattggcatcctatacagcgctgtgaggcaccattctgaaatcaagccaggtgaaccagaaccactgattttggattttcaaacccagcagtataaactctttccactcctggccactgcctatgccttccagtttgtgggcgcatacatgaaggagacctatcaccggattaacgaaggcattggtcaaggggacctgagtgaactgcctgagcttcatgccctcaccgctggactgaaggctttcacctcctggactgcaaacactggcattgaagcatgccgtatggcttgtggtgggcatggctattctcattgcagtggtcttccaaatatttatgtcaatttcaccccaagctgtacctttgagggagaaaacactgtcatgatgctccagacggctaggttcctgatgaaaagttatgatcaggtgcactcaggaaagttggtgtgtggcatggtgtcctatttgaacgacctgcccagtcagcgcatccagccacagcaggtagcagtctggccaaccatggtggatatcaaccagccccgaaagcctaaccgaagcatataaactccgtgcagccagattagtagaaattgctgcaaaaaaaccttcaaaaagaagtgattcacagaaaaagcaaggaggtagcttggaacctaacttctgttgaccttgttcgaggcaagtgaggcacattgccactatgtggtagttaagctcttttcagaaaaactcctcaaaattcaaagataaggccattcaagctgtcttaaaggagttttatgtctgctgtattctctgtatgggaatcagtcaggaacgcgggggatttccttcaggggagcatcatgaccgggcctccagattacaccaagtaacccagccgtgtaaagggagttactcactctgattcgctcagatgctgttgctttggttgatgcatttgattttcaggatgtgacacttggctctgtgcttggccgctatgatggggaatgtgtatggaaaacttgtttgagtgggctaaggaactccccacttgaaccaaaggcagaggtccacggaatctttacaaggcacctggaagtccactgccagtcccaagctcttgaagtgttcacaagggacaagtttaaatctggctttcagaaagcgcctgtgtggcaactgcaaattttgtgggaatctttttcgaattcaaataggctataggagccaaatgattaaattgacccctttttattaatggggggggaaaatgaacagatttcagaggttaaaatgaaaaaaagcagatgttttaagtgcaattaacactgaaagaggacctgttaaaccattcagaaaaagcttaagaaatgcgatatgacttccttttgtaatgctgctgatcccagtagactatgacttttgataattagcagaatttaactactgagtagttgattattttcacattttaattgctaatcactggctatataagtgtttttaagcaaaggtatttttgaagtggtgtagaacccttccaagctttcctgctcagtgttctaccagacttaccctggggcctggctttaaaagcaggattgaagaaaagggactgggggaaggaaacttattggaaaacttggatgcgaatgagtttctgcttggcaccagtctctgccctgctttgctctcctttgctggatgggattgcatttatcaaactattcatgcttagcatttgttcccaacggaggggaactttattccgcaacgggccttactgttagggaccatttgtctcggtgtaattaaggaattttcccatttgaaggaattgctaaattgtcacagtagtagggaagtataggggaaacctctcaagctggtggcaccggttgtagctttggagtgccagagtgttaactctggggacaatccagattttcacatattctgtcatccttggcataagcccattaaaagcttgggagattactgtattttggcattaaaaaaaaaaatgtcaccttagggtccagcactccccagacgtaagcacagaaaaacccctttgacacaaacccatgtgttctggatttttgggtcagaaaatattgaaactgtgagttgtttttttttttaacaactgggaaaaaacaaaaacaaaaaaactatagttagaaaaatggaagttccataggttctatttcttactctatgtatggctttgttttcagtctatttctaggagctttctctgaatcgctaattgtcctttcagttgaaatctaatttatacaatcattctatacttaaaggttaaatacatcttaattaatttaatcttaaagtcaatgtaagtcactttgttttgtttttttttaatctacgccatatgcctcatgaaaccagctgttctagaatcagtcctgagaatatggcttaattccatggaaacataaactccctatccttgggacctgacataatatctatcctatccccggggaactggtaatatgaagaccttaataggttaacagcagaaatgcctacatgttggacaaaagcccttaatcgttcccactgggagaactaattgataattgtgttaagattgaagattaaccctgtgttaatctcacttgagtctatccctgacagtagttcagattctgggaaaatgataaactgacctggctaggatgtaggaattgtttcaaaattaggtgttgaaataccttgttcacagatgaatatctggggcagggttctgagggtgtttggaatgacaccccccaatccagttgccataggatggggaggcctttggcaggtttgaggagatcatcgacctgcagagccccctttgacccagtacctcacgttttatttaaaatctaaatctggggccaggcgtggctgtcacgcctgtggtccaggcactttgggaggccgaggcgggtggatcgcctgaggtcaggagtttgagaccatcctggccagcatggtgaaaccccgtctctgctgaggagaatgcagaaattggctgggcatggtggtagcgcgcgcctgtggtcccagctactcgggaggctggggcgggataatcgcttggacttggcgggtggaggttgcagtgagccgggatggtgccactgcactgcagcctgggtggctgagtcgagctccgtctc

SEQ ID NO: 1832 - DNA, 463 bp, Homo sapiens
  SIMILAR (342)..(449): 1001254mologous to Homo sapiens Ro ribonucleoprotein autoantigen (Ro/SS-A) precursor,accession number M32294,Smith- Waterman Score=203.
  misc_feature (1)...(463): n = a,t,c or g
tttgacacaaaatttaatttaatagaaattttgtttgtagttcttacattctcagtgtgagccaatctgggacccactgccccacccagaagtggcccagtcctgggggcaggggagaaagggaggggtgaaatgagaagagccccgttcttcctcagtgctggggggttggagacaccacccccttctgctgccctcctctgggctccaggaaggagagcagatgaaatctcaggcctgtgnngtctccacaccactgccccccaggttggaggggagctaagagatgagagaaggggacagatgtcgggaccaaacatgatgttgtattctgagtctccggctatgtgaagctgtttcctaatagtttggaccagacagacatgcacggagactcagaatacaacatcatgtttggtcccgacatctgtggncctggcaccaagaaagggtttcatggtnc

SEQ ID NO: 1833 - DNA, 648 bp, Homo sapiens
  SIMILAR (321)..(157): 611254mologous to Mus musculus mouse 57-KD Calcium-binding protein (MCaBP),accession number X56603,Smith-Waterman Score=143.
  misc_feature (1)...(648): n = a,t,c or g
gagacacaaaatttaatttaatagaaattttgtttgtagttcttacattctcagtgtgagccaatctgggacccactgccccacccagaagtggcccagtcctgggggcaggggagaaagggaggggtgaaatgagaagagccccgttcttcctcagtgctggggggttggagacaccacccccttctgctgccctcctctgggctccaggaaggagagcagatgaaatctcaggcctgtggcttctccacaccactgccccccaggttggaggggagctaagagatgagagaaggggacagaggcaagaaaagatgttgatcaagaaagatgagaaccanntnnnagtngaggaggggaacaaaaccaaaatccaccccaaatccgaaccagcctggaaaaaaatgaaagttctcgagtctcacagagacattatttggcgcggcaagctctgcggcaggagcgctcaggcctcagtccagccctggaggcaggcctctctacagctcgtccttggcctggccggggacatttcctcctcatcttcctccttgtctcncatcntctcacctcatcttgtcccanatctcctgtcnctgctgtccgatnttggctcgaggccaatccttatggcgatnatcgtacaag

SEQ ID NO: 1834 - DNA, 2184 bp, Homo sapiens
  SIMILAR (1493)..(900): 371254mologous to Homo sapiens Ro ribonucleoprotein autoantigen (Ro/SS-A) precursor,accession number M32294,Smith- Waterman Score=282.
cgaggatgtctcccttttttgccagggtccaagccaggtggttttttttcgtccccacagcgtcattaaattgggggcccccagggtttttcccccaccccctctttaaaaccccggcccaggatatttaaaaccccccccataagggggaattgggggccgcgccccccccctggggttagtccgcagttccaggggtttggtggagacacaaaatttaatttaatagaaattttgtttgtagttcttacattctcagtgtgagcccaatctggggacccagctgccccacccagaagtggcccagtcctgggggcaggggagaaagggaggggtgaaatgagaagagccccgttcttcctcagtgctgggggggttggagacaccaccccccttctgctgccctcctctgggcacttatttggtgagctatttgaaatctcctggcctgtggccttcgtccacaccacttgccccccaggttggaaggggaagctaagaagattgagagaaaggggaccagaggcaaagaaaaagattgtttgatcaaagaaaagattgagaacccaggggtgaagggctgaaggagaatcaaagattaaaataccagtttaaaaaaaaaaaaaaaaaaagggcggggagggggtggggggagagtggaggaggggagacaaaaccaaaatccaccccaaatccgaaccagcctggaaaaaaatgaaagttctcgagtctcacagagacattattttggcgcggcaagctctgcgggcaggaagcgctcaggcctcagtccgagcccgtggaggcaggcctctctacagactcgttctttggctggccgggggacatcttccctcctcatatttcctcttggtgcctctcaatcctcctcatacccaatctttgtcctcatcatcctccttgtcctctgcctcctcctcctctttgcgtttcttgtcttcttcctcctccttaagcctctgctcctcgtcctgtttgtccttcatttgtttctctgctgcctttgttacgccccacgtctcgttgccaaactcctcagcgtatgcctcatcgttggtgatgaggaagttgtcaaagatggtgccagacttgacctgccagaggtccaggcccagcacgccaaagttatcataggcatagatactgggatcgggagaatactcggggttgtcaatttctgggtggatccaagtgcccttgtaatctgggttgtcgatctgccggggcttccactcacccttgtactcagggttctgaatcactgggggttcccactctccgtccatctcttcatcccagtcctcgggcttcttagcatcagggtcagggatatgctcgggcttgtcccagtcctcaggcttggagtctgtgggatcatcgatcttggcccgctcatcccagtcttccggttttgaagcatcaggatcctttatcttcttgggtggcaggaagtcccaatcgtcttccaaggagccggactccacctggctgttgtcaatcttcacctcataggtgttgtctggccgcacaatcagtgtgtacaggtgtgtaaactcatcatccttgcaacggatgtccttgttgatcagcacgttcttgcccttgtagttgaagatgacatgaaccttcttggtgccagggccacagatgtcgggaccaaacatgatgttgtattctgagtctccgtgcatgtctgtctggtccaaactattaggaaacagcttcacatagccgcccccacagtcgatgttctgctcatgtttcaccgtgaactgcaccaccagcgtctggcctttgttgctgaaaggctcgaaactggccgacagagcataaaagcgtgcatcctggcttgtctgcaaacctttatctttctcctcgtcaccgtagaacttgccggaactgagaacgaatttgccaaaatctgacttgtgtttggattcgatccagcgggaagtccacccgtctccgtccagaaactgctccttgaagtagacggcgggctcggcgacggccaggccgaggaggccgagcagcagcggcacggatagcagcatggcgggccgagggggcggcaacgcgcggccctttaaaacgaccctccggcagcggctctgcagtacggacggggggggggggggaggaggttaagatgatccggaattc

SEQ ID NO: 1835 - DNA, 949 bp, Homo sapiens
ttttttgaagctcacaaagccaagattgattttttgaacaccgagtacaattgacaaatctctaacaagtttgattaagaaaaaagaaagcatgaataaacaattttagggataaaaagggaaacatcgctaaagatatcccagaaatgtaaaagataataagggaatattatgaaaatattcatgccaatacatttgaaaacttaggtgacatagacaaaaacaaaattgaccaaaattgagcaaaaaagaaacaaaatctgagtagtcctataacttagtaaaaattgagttagaaaagttaaagaagtctttacacaaatcaaacatcagactcagttttctaggagagttttgccaaacattcaagtagcagataattctggtctatttttggccccagaagatatattttacttgccatgcatttaatgagatagctgttgatttttttcaatcaccgtgacaggtgttttatattaggtgttattcgccagacatctagtccacctgttgccagatatggaattaatattcacttattttgaattaaaatttgttaataaattaataaaacaaagtcaaagttcaaattattaaaaaagtaaaagaaataaaatatattttatagagagcccttacaaaacagtaccaacataatgagctttccaaattttgaatgggcaaaataaatgaataggcatttcacaaaagaaggaagggtggccaataagtatatattaatataaaaatggttacttgtaataggaatcaaaagtgtttgacttattgactaagagtcagtttttgttttgatccctgttagtctatccagaaggcatgggtcttaataaacaccttgacctcaacagtttactgaatacaagggtaatttcatatgccttgccttctttaagggtttgttgtaaagattaaaatcctagtgccg

SEQ ID NO: 1836 - DNA, 239 bp, Homo sapiens
  SIMILAR (2)..(112): 911254mologous to Homo sapiens CGI-27 protein,accession number AF132961,Smith-Waterman Score=173.
gaagaatggaatgaatatgagtttctcgttttcgaattatgcccagtcgagccagtttagaacctggcaagacagttcagtgagttatgcagctggagcactcacggtccactgaagctctgaatcctcatactctgtccggggccccagcctagcctttaccacgatactggccctggtttggggggattctgaacctcacactaatagacttctctcttcttctagtaggtgtagtc

SEQ ID NO: 1837 - DNA, 215 bp, Homo sapiens
  SIMILAR (47)..(214): 961254mologous to Homo sapiens CGI-27 protein,accession number AF132961,Smith-Waterman Score=279.
  misc_feature (1)...(215): n = a,t,c or g
acagtattgaaatgcatttgccttatacagctaaagccatggaaagggtatgagtattatagaacaattagactctgtatcttttagcaattacttgaagaaataccataatactatatgtggaagacatcccattggggtgttattaaatgctatcacagagctccagaagaatggaatgaatatgagtttttcgnttttgaattatgcccagt

SEQ ID NO: 1838 - DNA, 933 bp, Homo sapiens
  SIMILAR (326)..(156): 1001254mologous to Homo sapiens gastric cancer-related protein VRG118,accession number AF320072,Smith-Waterman Score=324.
tttacatgtaattttgtattttatttacttatttattttttacttagctcccagcatcggggaatattttaaattacattttacaaaaatcaccactaagatgaagcaggttcttctatcttgagtatatttctctttcatgaactgtgtcctcagcccattcgtctaccatagtttccgtgttcttgttgtctatttttacagctcactgtatcctgaagacacagttccttaataccactcccccaacggggaacagaaagactgcatgccttacctggcttcttgccaccataaaagtgagtgtattcagcacaggtaatgtacttggctttaggcaagcaaggcagccccaggtgccagggggtgatgaggtcaccacggagaccatggtggtggtagcagcagaggtggcagcagggttggtggcaggcatggggaggtcaaccggtcccacaagaggttgggttctggtttcttctgtcttggcttctttctcgtcttcttggtgtccccgcccagggcccagcacggggagaggttgatcctcgccccgggagtagaggtgcacgcggtggatgctctgcttcagctgctccacctgctcgtgcatctccagggcgcccatgctgttggaatggttcacgtccgcctgcacaacacagaagaacttcgcctgcaacaagagtaggagaggcagggcagggggaggtccgtggcgtgagacgcctgcccgctccactcctccaggctgtgcagcctcggctttctgatagatcctaccctgcagccccagctaggccgacggcgacctctccaccccacccccatccccggcccccaaagctccaatcgtcggagctctttcctaggggacggcggacccgggtagtgacagttacccgcccagccggtcccatgccccgcggccgc

SEQ ID NO: 1839 - DNA, 627 bp, Homo sapiens
  SIMILAR (112)..(468): 771254mologous to Homo sapiens CGI-27 protein,accession number AF132961,Smith-Waterman Score=471.
atggcagagaaatgcacctctcagcagaaacgcacccagaacaagcatggcagcacaggcatcaagatgtccaaccgagtggtccgctgggaagccagccactctgggaactggtacacagcctcaggaccacagctgaatgcacagctagaagacaaagatgaacacggtattgaaatgcatttgccttgtacagctaaagccatggaaatccataaggatgagtttaccattattcctgtactggttggagctctgagtgagtcaaaagaacaggaattcggaaaactcttcagtaaatatctagcagatcctagtaatttctttgtggtttcttctgatttttgccattggggtcaaagattccgttacagttactatgatgaatcccagggggagacttatagatccattgaacatctagataaaatggcccgagcctccccgacgagcgccgccccctgctccacggcgcccagtcccatcgaccgcccaagggctgaggagtgcgagcgcatggctcaggactggcaggcagctccacctgcagccctggtgcgggatccactgggtgaagccagctgggctcctgagtctggtggggacgtggagaacctttatgtctag

SEQ ID NO: 1840 - DNA, 853 bp, Homo sapiens
  SIMILAR (494)..(778): 821254mologous to Homo sapiens CGI-27 protein,accession number AF132961,Smith-Waterman Score=396.
ggcacgaggcaccataggcggcacaggcaccaagatgtccaaccgagtggtctgccgagaagccagtcacgccgggagctggtacacagcctcaggaccgcagctgaatgcacagctagaaggttggctttcacaagtacagtctacaaaaagacctgctagagccattattgccccccggagaattttcatccttgggccttctcatcatgtgcccctctctcgatgtgcactttccagtgtggatatatataggacacctctgtatgaccttcgtattgaccaaaagatttacggagaactgtggaagacaggaatgtttgaacgcatgtctctgcagacagatgaagatgaacacagtattgaaatgcatttgccttatacagctaaagccatggaaaggtgccctgttgatgtagtgatgcagattctgcccaagaagcccctgcattgcagagggactggagatctgtatgatctgtttatttcgcaattgacaggccataaggatgagtttaccattattcctgtactggttggagctctgagtgagtcaaaagaacaggaattcggaaaactcttcagtaaatatctagcggatcctagtaatctctttgtggtttcttctgatttctgccattggggtcaaaggttccgttacagttactatgatgaatcccagggggagatttatagatccattgaacatctagataaaatggctatcacagagctccagaagaatggaatgaatatgagtttttcgtttttgaattatgcccagtcgagccagtgtagaaactggcaagacagttcagtgagttatgcagctggagcactcacggtccactga

SEQ ID NO: 1841 - DNA, 1119 bp, Homo sapiens
  SIMILAR (748)..(984): 681254mologous to Homo sapiens CGI-27 protein,accession number AF132961,Smith-Waterman Score=251.
atgcaagtaccctgtgaccaccaccactgggactgtgctgggtcagacctgaagccagcaatgcactggaccttatccaaggctctttccttaagggtgacaagaattcgagatgcattgggtgtggggacccaaaaaggctgtcacactgactcttcactgagctgttcagcacttaagccatccgtggatgggaaagctaaaagagcattgtttgtaacacatgctttctggggctccagaggtcgcgggcaactcctagatgctgctgtgggctggctggtgttcaagtttcttttagagctatatactggaatgtctgcagatgaaatgatatgctattcaggtaaaagtactgagttaagtggaaagttggttttaaactatgttttgactgtgatggagggagagaggagcagaggagtgaggccacagcaaggaaatgactgtgatgatggatttttgagtctcagactaggaccgcagctgaatgcacagctagaaggttggctttcacaagtacagtctacaaaaagacctgctagagccattattgcccctgtgggttggacttcagcgactcacatccaaagaacagaatacggcaaaaggaagatagcaactttacaacagacaaacctggcaaacacttactaccttaaccaaacgatcaaaatgcagattctgcccaagaagcccctgcattgcagagggactggagatctgtatgatctgtttatttcgcaattgacaggccataaggatgagtttaccattattcctgtactggttggagctctgagtgagtcaaaagaacaggaattcggaaaactcttcagtaaatatctagcggatcctagtaatctctttgtggtttcttctgatttctgccattgggtttacggagaactgtggaagacaggaatgtttgaacgcatgtctctgcagacagatgaagatgaacacagtattgaaatgcatttgccttatacagctaaagccatggaaaggtgccctgttgatgtagtgagcaggggtcctcagctggtccgtggcctgttaggaactggactgtgcaacaggatgcgaacggtgggccagcgagcattacccacctga

SEQ ID NO: 1842 - DNA, 2325 bp, Homo sapiens
  SIMILAR (440)..(1039): 981254mologous to Homo sapiens CGI-27 protein,accession number AF132961,Smith-Waterman Score=1053.
  misc_feature (1)...(2325): n = a,t,c or g
atggctgaaggtgaagcagaagcaggcaccctcttcacaagaggtcttttagcacaggtgctgcctttggactttccagtgcctcagcatcagcctggggatcacgtttctcatcaaagaggggaaagaagggaaactcgagccagcccgggaaggaccctaccttgtgctgctaaccactgagactgctgttctgcttatatccattactattcctaccactagcaactctaaccccactttagaacgcttctgtggtttaggagcagaggtcactggaaaggatcctatgggcttctttaaggtgctcagacagtcgctggatgcagatgagggaacggctgtggacattcagtccttcagaccacaaaaggactttggaaggagaagaaccctggaagaatgccatgttactggcaaaggcggcacaggcaccaagatgtccaaccgagtggtctgccgagaagccagtcacgccgggagctggtacacagcctcaggaccgcagctgaatgcacagctagaaggttggctttcacaagtacagtctacaaaaagacctgctagagccattattgccccccatgcaggatatacgtactgtgggtcttgtgctgcccatgcttataaacaagtggatccgtctattacccggagaattttcatccttgggccttctcatcatgtgcccctctctcgatgtgcactttccagtgtggatatatataggacacccctgtatgaccttcgtattgaccaaaagatttacggagaactatggaagacaggaatgtttgaacgcatgtctctgcagacagatgaagatgaacgcagtattgaaatgcatttgccttatacagctaaagccatggaaagccataaggatgagtttaccattattcctttactggttggagctctgagtgagtcaaaagaacaggaattcggaaaactcttcagtaaatatctagcggatcctagtaatctctttgtggtttcttctgatttctgccattggggtcaaaggttccgttacacgttactatgatgaatcccagggggagatttattgatccattgaacatctagataaaatgggtatgagtattatagaacaattagaccctgtatcttttagcaattacttgaagaaataccataatactatatgtggaagacatcccattgggggtgttattaaatgctatcacagagctccagaagaatggaaatgaatatgagtttttcgtttttggaattatgcccagtcgagccagtgtaagaaactggccaagacagttcagtgagttatgcagcctgggagcactcacgggccactgaagctctgaatcctcagggatgccacctgccacattcttcatactctgtccgggggtccccagcctaggccttttaccacgatacttggtcctggtttgggggggattctgaaaccctcaaactaaattagaacttttcttccctttttttttctaagtaggtgtaagtcccttcccctaatttcaactccattaaaaaaatggctttatagttttaggggccagttggaagggaagggctgggcatcaaaataattttggatccaaaaaaggatgacaatgtaaaaggctccagttggtgggcagacagttttttttgaaagtaacttgtaaagcatttacccatatccctaaatttgcactcttttgcagacttgtgcnacatatattccgctttcagaatagttttgcaaattgtacacaaacaaacgaaaaaggtggaagctttttaataaagaaattgcatttataaatgatctgtatctagaatataataaatctccagttatagtcaattactacccatgttgtacaacagatacgcttctattttgagttgcgtaatagaagggctacacaacctcaaaataataaataaataaataaataatttaaaaaataaataaaaataaactgaatgaaattgaaaacatatcaatgtgagatgccactaaagtcatactaaaagggaatttacaccacttactgcctacattagaaaagaagtctcaaatcaatgcaaatcaatgacttctgcctttacagtaagaaaccagaaaaagagcaaataaaatccagtaagcagaagaaaggaaacaaagatcagaacagaaattaatataatcaggaaaagagagagagagagaatcattgtaaccagaagtttgaggaaaatcaaatcaattggtaaacctctagccagacagatcagaaaaaaacacgaaagacacaaaccagtctcagaaatgacaggtagcatcattac

SEQ ID NO: 1843 - DNA, 2108 bp, Homo sapiens
  SIMILAR (284)..(697): 411254mologous to Mus musculus putative,accession number AK002983,Smith-Waterman Score=192.
  misc_feature (1)...(2108): n = a,t,c or g
agcagggtnnnnnnnaaatcgacgttctgatgacttctgcacgagcggctnttctcttccttcgctaacgcctcccggctctcgtcagcctcccgccggccgtctccttaacaccgaacaccacataaatgagcatattctgatgtactctttggatctgaactcatcttcacagatgccttcaatctaaggcgcaaacatctgatggagagatatttgaagttgatggggaaatgcccaaccatctgttgcctattaaggcccatgtggaaagatttgggaaatggatgatgaaggagatgatgacccagttcctcctcccaaatgtgaatgcagcaatattaaaaaaggtccattcagttggtgcaccccccccacaaggatgaccctccttcctcctgaagatgatgaggaacaaaggaaaagcgtaccagatgatatccctgtttggggaccaaggaattcctggaaagtttgaccaaggaacacttttttgaaactcatttctgggcttgcaaacttactttaggacatccaaaggtttgcttgatgttacatgcaagactgtttgccaatatgatcaaaagggaaaactcccttgagagattcgcaagccttttcccaaatcaaaaatgacttttactgaagaggaggaagcccaggtacgcaaaggagaacccagtggtgtgaagagaagtgaaaatgtttgtgccctgacacttgtaaacacttgttagggattgttcccaaatacctagttgcactgctctgtttataattgttaatattagacaaaccagtagacaaatgcagcagcaagtcaattgtattagcaagaatattgtcctcaattgcatgtgtagtttgagcacagattcccaaaccttacggccaagtttcttctagtatgatgggaaagtttcttttttctttgctctggaattaaaactggaactgtgggggttctctataagtggcattttgggctttcctcccttttttgtaaagcaatgtctgcctagtttattgtccaagttaactttaggtgaccttttaaaagttggcgatagtacatacaacaacttgcaaaaaagcttttctgggaataggaattaacaaaatattatctttaattcatgagttgggaaactgggaaaaagggcttcttgaagtaaaatgttcccgagtggggagctactaaggatggtccttccagcctcctggcagtccaaggaagtaccactggaattgattaagcctgtatggtaggccaggggccccccctcatggccacccgagggacctgtttcccctttttctttatttttaaccccccncctagttttaaatatattgcccccagagacctcagttacctacccccagtttgtggttttttggggagaaatgtaacctggacagttagcttttcaattaaaaagacaccttaaccccatgtgggatgtcatctttttataattagtgttcccatgtgggagaaaattattcacactacttgcatgtaaaggataatttaacttttaacattaaaatatgtgggtaaaacccagaaagcatccatcatgaatgcaagatactttcaataaaaagtaagttatatagtaggtagttaagtttgcttttgtggacttaaatgtgtctcttcacttaaatgggttgaatgtgtatatatttgttcagcttgaaaagacttagtttatatcctagctcactggaggctgctgacataaccataacttctgtcccttctaattgtcatttatatgcctaactggagctagtactttaattcttaacacaaaattactctgccattgtttccagcttccctcctacaatagaatgaagtttttttgatggcttgagatggctcacaaattttgatttttttttcttccttgtgctccctttttttctccttgcttttccagttaacatctatattcacatgtaatcttgttttctcttcacattcactgagttgttcaggctcagatcatcccttgacagtagtttgccttcatctcacctttcatttgtcccaaattcaccttatttaataaagtcccatatgttgtctcacttaa

SEQ ID NO: 1844 - DNA, 665 bp, Homo sapiens
  misc_feature (1)...(665): n = a,t,c or g
agtncatgaaggggggtnnngggnaattgaagaccatgattacccctcggnggaancctgggaagtgatccagtgtcatcgctgggagtgggagacagaaatgttacttccaaagatttcgagtcctgtggtactgccaggagaaccgggggctggggtgatgggtaaggagaggcaccattagccccgccaggcagaggcaagatggggtgggggcggcacctgccaattatgccaaagtcttggagtggcagctggcaccatcaccaaggcacaaatgccagcagagacctggcactcacctgggttgtgattccatagggcccctgtctcctgttggtctcccagggctcaaaggctgacctgataattcaagtgaaggatgccctagttcaaggccctcccagttccctcatccccaggccaccctgggtcaggtggtcccaagggacaagctaggtccctcctgaactgcagaggctgcccaataaactggcaacacaggtgttgcaggaagatatagctgggtcctcatcctgggtctgtaatttattagacgtgtggctttggacaaatgacataatttcccagagcctccttagataaaaaactagggctttgcttaccttggcgtattgttaggaaaattaaatgagttgctcaat

SEQ ID NO: 1845 - DNA, 1394 bp, Homo sapiens
  SIMILAR (50)..(187): 321254mologous to Homo sapiens phosphate carrier,accession number X77337,Smith-Waterman Score=52.
gcaacctttccaagggagtggttgtgtgatcgccatcttagggagaaagatgttctcgtccgtggcgcactctggcgcgggcgaaccccttcaacacgccacatcctgcagctggtgcacgatggtctcggggacctccgcagcagctccccagggcccacgggcaagccccgccgcccctcgcaaccatggcagccgccgccgtggaagagcagtatagctgtgactatggatctggcagattctttatcctttgtggacttggaggaattattagctgtggcacaacacatacaagcattggttcctctagatcctggttaaatgcagaatgaaggttggacccccaaaagtacaaagggcatatttaacggattctcagttacacttaaagaggatggtgttccgtggtttggctaaaggattggctccgacttttccttggctactccatgcagggactctgcaagtttggcttttatgaagtctttaaaagtcttgtatagcaatatgcttggagaggagaatacttatctctggcgcacatcactatatttggctgcctctgccagtgctgaattctttgctgacattgccctggctcctatggaagctgctaaggttcgaattcaaacccagcccaggttatgccaacacttgagaggggatcagcttcccaaaatgtataaaggagaaaggccttacaagcattctacaagggggtttgctcttctctggatgagacagataacatacaccatgaattgaagttccccatgccttgaacgtactgtttgaagccactgtaccagtttgggggtccctaagcccccgcagtgaatgattcaaacgccagagcagactggttgtaaccatttggtagcaggttaccatagctcgagtcttttgtgccaattgtttctcacccctgctgattcgtgtggtatctggtgttgaataaagaataaagtgtagcagtgtcttctcttggtcttcagtgtgactttggattttaaaggtgtaatggaagggactgtttgcccgtatcatccatgattggtacccctgactggcactacagtggtttatatattactcagtaaagggttactttaggacttccctcgccctcctccaccccgagatggccagagtctcttaaataataagtttgggttaactccagtagttagatcaaagcaaattgtggactgaatctgcttgttgatccagtgtttgaagaaagtgcaaaaggaacttttatatatttgacagtgtaggaaattgtctattcctcgatacaattactgtaggtactcttgcttaaggcaagaagtttcagatttactgttgtaaataaacccgaactcttcatgaaaaaaaaacaacaaaaa

SEQ ID NO: 1846 - DNA, 2237 bp, Homo sapiens
  SIMILAR (2230)..(2072): 541254mologous to Homo sapiens Human secreted protein encoded by gene 167 clone H2LAO11,accession number AAW74894,Smith-Waterman Score=148.
tttttttttttttttttggatgaaacttggaggcttacaggtatagacagctttcagctacagcacattctaattttttattttgtttagttcttttgtattcacttctgggctctttaagactgttttaaaagaaatcaatttacgcgcgaaccccagttatataatataaactttgtaatcctgagagaaaaaatgtatagtaaatctaagtccttgatttttaactttctattgtaaaaaataataatatacagagtttaatagaagcgtgatgttttggttttgttttccccagaagctggccatatggtcctttgagtacgggggatgtccccaaactgggcccacccaattgagccatgggcggcttccggccaggaaatgccacaagttagcctcccaggctttgcgggtggacatgcctgctcccctgccagcctcccaagtggccctggcccagcccctccccgagcctgtctgccctcccccaggggtgggaggaagtctctgggggccccaggaggattccctcccggagactcgcacggtgctccctgctcacgcgttgtcacagttagtcccggaaatgacttgaaaccagggcattctccccggaccctccagcgtggggggagcctcccaggcagacgctgggtatggagctgtggtgtggtctgtcctgtatggtggccagtgctttctgccagcatttctggatggatatagggactatcattagtatcctaatacacggtgattttaaaacaaccattaaaatttgatttcagagtccactgacccttaacagatgttaggtatacccttactggagagggaactctgatgaggagatgctggtaaattatcattttttaaattgctggtgagtctgacacttggtgagttttcagccagtttgttaaacttttaattaagttttgtttataataaaaatatgagatggatttgaaagtttccatttttgaaagttaccctcgtttttcaaaggtattttctaaacagatctttaatggactatttaaaccgaatttaaggaattcacacacgacagttgacaggtcttcacgcaggctcggttggtaacgtgctgccagcacagggctgggtgatacgtacaccctaagccgggggtgcctggggctggggggcgctccttgcaatgcccctccagccacaagggcagtgaaggtgctgcctgtgtgagccgtcgggggagcggccggctgtgggggcagcgcagcagcgaagcatccgtggggcctttccttctcggctggttctctgtgacggtggcgtcggctcgcctctgctcctttcatctaagaaagaagccacttgaccctgacagcccacggcggggtaacactgagcagctgcattggtgctgtcacttttttaaggctttctgtccagactttcaacactgggtttcttttcagaagtttcgaaggattaatgactttcttcaacgcccttgcttgcgggctgagggtgacagtcacgtccgtttcttctgtattagaaggctgcggtgattcaattagattgtcccactgctgagacctgtaggggcagcttctaacatgcttttttcaaggggagaggagtagtgacaagtcgtgtgtcggaattggatttgagaacactctgaatgaccccctgggaggcccgagggggccaggctttcgggcgtgaactgaactccagacccctctttgtgttgggcagtgtcatcttgcttacaaactgtaagacacatttttttgtgtgtttgtttatgttgttgttcttttgcagcactcacgcctctgaccagtcttttggggaaaggagtaaccacccccacaataacagaaatttgtcaccatccaagagtagccactgtttccttaatactggcataatgcttccaggaagtttttcttttttatatttaaaatgttacttttctgtatgatgtgcatgcaaggtttacccgtaacttttccttaaactttttagtgcccgtttcctagtataatcctgtaaatgtcagttacgtgaaagagtgagtccaatgtaagtagtttagcttgtttattgcaatgctggcctcaacacaacagaataaaaggtggtagaaagtactctttgatgtttctggtaatcatggacccttctcctggggcatttgttttgttttcataataaaaagcaaaaaaaaaaaaaaaaaa

SEQ ID NO: 1847 - DNA, 2358 bp, Homo sapiens
  SIMILAR (96)..(947): 781254mologous to Homo sapiens Human secreted protein clone cs756_2 protein sequence,accession number AAY29326,Smith-Waterman Score=1102.
atcccatttcgaagcataggaatgagcagattgggagaagatgttaatggtgaagcaacagaatctcagcagaagccaagaaataagaagtctaagatggatgggatggtgccaggcaaccaccaagggagagaccccagaaaacataaaagaaagcctctgggggtgggctattctgccagcaaaatcacctcttttatgataactgctttctccatgctcctgatggacagcccctctgcacttgtgatagaagaaaagctcagtggtacctggacaaaggcattggtgagctggtgagtgaagagccctttgtggtgaagctgcggtttgaacctgcaggaaggcccgaatctcctgggagactattactttgatggttaaagagaacctgtgtgtagtgtgtggcaagagagactcctacatgtggaatcacgttcttccgaatgagtaccggaagcactttccccattcgagatggaaggaccacaatttcccacgatgtgctgctgctctgcacctcctgccatgccatttccaactactatgacaaccatctgaagcagcagctggccaaggagttccaggcccccatcggctctgaggagggcttgcgcctgctggaagatcctgagcgccggcaggtgcgttctggggccagggccctgctcaacgcggagagcctgcctactcatcgaaaggaggagctgctgcaagcactcagagagttttataacacagacgtggtcacagaggagatgcttcaagaggctgccagcctggagaccagaatctccaatgaaaactatgttcctcacgggctgaaggtggtgcagtgtcacagccagggtggcctgcgctccctcatgcagctggagagccgctggcgtcagcacttcctggactccatgcagcccaagcacctgccccagcagtggtcagtggacccacaaccatcagaagctgctccggaaattcggggaagatcttcccatccagctgtcttgatagctgctttcctcccagttaggacaagtgggaagctggagccaaggttgaagagtcacctcttcccattttagtacatcattaattgtcaaagcctgtgtggacacaactcagaatactaacctaggactaatcccaggggtgctttttgctgggagcaaagatattgtttgaaggagagtttatggttttggatttttaaacgggcagggtcttttttcctctcatttttgtggacaagagaggccttcgccttttatttttacatctccctcttcatgctgtccctgtgcagaggaaaaatgaagaattctcccagaagtgacttgtcaagacttaaaaaaaaatgtttttaatgcatttcttccttgtctagtgcctcggtttatctctaacaggggctgtccagtatatcggtcctgttaggaggggagaaaaagttcttccaaaggctgggagaagtgaacaaggagtcaaatttattttcccaattcaacttcataaattatccatttctttgggcttcatgcttcttcccgttaactcatgtggttgggggatccatcccatctgggtcacttcagtctacttcacgtacttgaaaagggctttcctttacacttccagggaccaaacaggcaacttcctgccacacacttccaccctatcactggggaggaaatccttttctgggacatgaggcctttggactggggtggggggcaggaaaggaaccaccaaacttccatctcccaataggaactttggaaattcaactcagcttttccttttcatgctgtttgttgcctgcttgttggcattcctcctgcccccagaacggcaagatttttaggcctcaccccctgtctgagagtaaggttatcttttatccagaatcagtatcagttcccctggtattctgtgcctccatccgaatttggccaaggacctgaccctcctttaaaggcatttaaattccacctccccagagtcatcctggtccaggttgccaatatgaggaccttcctctgtctccctctgaagccctgggacacttgagcttaccttaatacattagattgttccaaaagaggagcgttgtttccatctttcaaaatgttaggtccattactttgagtataaaatcgtacttattaatgattagtaatttttactaaagtattgggaaaactttacttattttataagatcttaacaagcttaaaaaagaattttatgaccagaatccaacaagagactctattttggcaattgtgcccaagttggtgatgtttactctaaaattaataataagaactacttgtaagcccaaaaaaaaaaaaaaaaaaa

SEQ ID NO: 1848 - DNA, 936 bp, Homo sapiens
  SIMILAR (580)..(933): 1001254mologous to Homo sapiens histamine N- methyltransferase,accession number U44111,Smith-Waterman Score=640.
atgctgggagccatcatcctcagcaaactaacaggaacagagaaccaaataccgcatgttgtcattcataagtggcagttgaacgatgagagcacatggacacagagcggggagcaacagacaccagggcctgttgggggtgaaattgatcttcaaattctctccaaagttcaggctcaatacccaggagtttgtatcaacaatgaagttgttgagccaagtgctgaacaaattgccaaatacaaagagcttgtagccaagacatcgaacctcgagaacgtaaagtttgcttggcataaggagacatcatctgaataccaaagtagaatgttggagaaaaaggagcttcaaaagtgggactttattcatatgattcaaatgctgtattatgtaaaagacatcccagctaccctgaaattcttccatagtctcttaggtaccaatgctaagatgctcattattgttgtgtcagctcactggtctgtgggacccacccccacctatcccccaggtgattacagtagccttctcgctgttctccccacctctgcccttatgcgccagtactctcttcccatcggaagcagtggctgggacaagctgtggaaaaagtacggatcacgctttccccaggatgacctctgccagtatatcacatcagatgacctcactcagatgctggacaacctagggcttaagtatgagtgctatgaccttttgtccaccatggatatatctgactgctttattgatggtaatgaaaatggagacctgctttgggattttttgactgaaacctgcaactttaatgccacagcaccacctgatctcagagcagagcttgggaaagatctacaagagcctgaatttagtgctaagaaagaggggaaggttctttttaataatactctgagtttcatagtgattgaggcataa

SEQ ID NO: 1849 - DNA, 1820 bp, Homo sapiens
  SIMILAR (1147)..(443): 521254mologous to Homo sapiens Human mammastatin amino acid sequence,accession number AAY23756,Smith-Waterman Score=408.
  misc_feature (1)...(1820): n = a,t,c or g
ggccacagcaacgcggcatccacaggtctcgagtgccgaagtccttcaggattggggcaacgtcccctctagagcatgggccgaggccggggtggggtttggctccagccaaccgcacacagcctacgcgccgttgctgagcaacgcttgcccgctgaatcccgaggttttagctctagtcaagtgccaaaagagcccaatgtgtgttcgggtttcaattctccagtcagcgtcagagttggaggcctcaattttaaagaaggcaaagccatggtcatcgttgcgggtaaggaacaacgcagaagcctcttccacccccaaatttcgacctgcttctgggtcggggtttcgtacgtagcagagcagctccctcgctgcgatctattgaaagtcagccctcgacacaagggtttgtctacgaatggtttagcgccaggttccccacgaacgtgcggtgcgtgacgggcgagggggcggccgcctttccggccgcgccccgtttcccaggacgatatgtcactccgcaccggaccccggtcccggcgcgcggcggggcacgcgccctcccgcgcgcgcggggcgcgtggagggggggggggccggcccgccggcggggacaggcgggggaccggctaatccgaggccaaaccgaggctccgcggcgctgccgtatcgttccgcctgggcgggattcatgacttagaggcgttcagtcataatcccaccagatgggtagctttcggccccattgggctcctcaancccaagcacattacaccaaatgtctgaacctggcggttccttctcgtactgggagcaggattaccatggcaaccaaacacaatcatcaagtaggggtaaaaacttaaccttgtctcacgacgggtcttaaccccagctcacggttccctattagtgggggtgaacaattcacgcttttgggtgaaatttctgttttacatgtagggggaagagccgaattcaaaagggatcaaaagcgcgaacgtcgctatgaacgcttggccgccacaagccagttatccctgtggtaacttttctgacacctcctgctttaaaacccaaaaggtcagaaggatcgtgaggccccgctttcacggtctgtattcgtactgaaaatcaagatcaagcgagcttttgcccttctgcttcacggggaggttttctgtcctcccttgagctcgccttatgacacctgcgttaccgtttgacaggagtaccgccccagtcaaactccccacctggcactgtccccggagcgggtcgcgcccggccggcgcgcggccgggcgcttggcgccagaagcgagagcccctcggggctcgcccccccgcctcaccgggtcagtgaaaaaacgatcagagtagtggtatttcacccgggggcccgcaaggccggcgggaccccgccccgggcccctcgcggggacaccgggggggcgccgggggcctcccacttattctacacctctcatgtctcttcaccgtgccagactagagtcaagctcaacagggtcttctttccccgctgattccgccaagcccgttcccttggctgtggtttcgctggatagtaggtagggacagtgggaatctcgttcatccattcatgcgcgtcactaattagannnnnnnnnnnnnnnnnnnnnnnnnnnnnnnnnnnnnnntcccgccgtttacccgcgcttcattgaatttcttcactttgacattcagagcactgggcagaaatcacatcgcgtcaacacccgccgcgggccttcgcgatgctttgttttaattaaacagtcggattcccctggt

SEQ ID NO: 1850 - DNA, 372 bp, Homo sapiens
  SIMILAR (1)..(204): 861254mologous to Mus musculus pancreatitis-induced protein 49,accession number AF332189,Smith-Waterman Score=304.
cccaacctggccaaggtgtgcgcactgctacggggctacctgctgcctggcgcgcccgccgacctccgcgaggagctgggcacacagctgcgcacctgtaccacgctgagcgggctggccagccaggtggaggcccatcactcgctggtgctcagccacctcaagactctgctctggaagaagatctccaacaccaagtactcttgatggggcagtgaggggcctggccacccttcctggagctggccaggtgccagggtccaaccctccctcaaggagagtcctccaagggggtttgttactctgaagaacgtaatgtcaataaacagcttttatgtaatgcccagggctgagcaccctgagcccccatca

SEQ ID NO: 1851 - DNA, 2120 bp, Homo sapiens
  SIMILAR (741)..(1430): 481254mologous to Rattus norvegicus histamine N- methyltransferase,accession number D10693,Smith-Waterman Score=465.
  misc_feature (1)...(2120): n = a,t,c or g
atgaggagagaaggatttaagttcagcagaagtaaggtatttgtccaagatgagatgactaagaagtggcataaatcagatcttcactgggtctccaggattcagtgtacagttctaggagttttgacaaatgccactgagatgagaagtcttctcccaatcgaaagtcttttcttgatccaatgtttcgtggtctcaggggcttcaagaaatgaagccacggactgcagcggcgagtgttacagctcgatgagagaaacacgtggatccaaagagtgtgcggcggcaagatttattaaagtgaaagggaaagtacttcaaaaagttgaatcctacaagttatatcacccatacttccttgccaactggttttcagctagttttagtaaagtgggaaaattggtagagatgaggggtcaggaagaggagacactgggtacttttgcccatgtcctgatgtttcaggcagcatcctcaagagcgcttgttctacctcccactatgcagcttgagctccagaactttggtaacacctgctcctacagaaaaccaaatatggcatcttccatgaggagcttgttttctgaccacgggaaatatgttgaatctttccggaggtttctcaaccattccacggaacaccagtgcatgcaggaattcatggacaagaagctgccaggcataataggaaggattggagacacaaaatcagaaattaagattctaaggcataggcggtaggtgcaggtgaaattgatcttcaaattctctccaaagttcagggctcaatacccagggagtttgtattcaacattgaagttgtttgaggccaagtgctggaacaaattggccaaattacaaagagcttgtagcccaagacatcgaacctcgagaacgtaaagtttgcttggcataaggagacatcatctgaataccaaagtagaatgttgggagaaaaaggagctttcaaaagttgggacttttattccatatgattcaaaatgctgtattatgtaaaagacatcccagctacccctgaaattcttccatagtctctttaggtaccaatgctaagatgctcattattgtttgtgtccagggaagcagtggctggggacaagctgtgggaaaaagtacggatcacgcttttccccaggaatgacctctgccagtatatcacatcagatgacctcactcagatgctggacaacctagggcttaagtatgagtgctatgaccttttgtccaccatggatatatctgactgctttattgatggtaaatgaaaatggagacctgctttgggatttttttgactgaaacctgcaactttaatgcccacagcaccacctgatctcaggagcagagcttgggaaagatcttacaagagcctgaatttagtgcctaagaaaagaggggaaggttctttttaataatactctgagtttccatagtgattgagggcataactatccaatcacaaaagtatattcaaaaattatattttgaacaactcgaatcactcatttatttccatattaaaatcacaaactcatcccattaatgtagataaagcactgtttggatatgagatgtagccaaatcccaataccattattggaccttcccatttgggaatccatatgggataccgccnggtccttatccctgttccctccccccccggtagagagacccacaagcaggctcaacataacataagcctaggaaaattagatgactgaatttcctatggcatattgataataaaattcattccatttgctgattgtctgaaattttctagaatactaataaaatacatactatagattctttattagtgaagtatgcactaatcaatactttgaacacaaagcctgtgttactgatttggccgttttgtgaagaaacatttatctttgtacgttcttctattgtgctttctatctaatttttattaatttgtaagagtaagcacctttagaatattaaaaattaattctttatcacatgttgtcatttcttcccattgtgttttctcttgtaattttatctgtgaattaatagctttttgtttgtctttttgatatactgaagttttctattatattcagcca

SEQ ID NO: 1852 - DNA, 6753 bp, Homo sapiens
  SIMILAR (802)..(3198): 961254mologous to Homo sapiens putative p150,accession number U93572,Smith-Waterman Score=3961.
atgcccacttctgagagtgagggtgggtcaggcactcaagcctgcagaaagactcagcctaacatccatgactactactggaatgggattggtgttgaagactggattgctgctgagcggtggatcaaatttaggtttcagaccatggatggagactgggaaaatagcgtgtcctgggctgatgatgagaatgaagccagtattgggtcctggagtggggctagtgataaggctgggattattcggtcttgggctgtggcttgtgatgagaccagtgttaagtcctgggctggggccagggctgagaatgtggttggtattgggacttgggctagagctggggagcaggccagtggagggctctgggctgggggtcagactagtgaggggacctgggctggggacaaggccagtggaggagcctggactggggctgagaaccaggccagtggggggtcttgggctctcgctgggaatcaggccattggagagctttgggctgcgggtcaggccagtgatgggtcctggcctgggggacaggccagtggggtgtcctgggttggggaagaggccattggagggtcctggactggggctgagaaccaagccagtgaagggtcttgggctggagctggggctgggaatatgagtagtgtttcatactgggctggggttgtggatcaggccggtggagggtcctgggctgggactaatgatccatttggtgtgaggttacacaggactaggaataaagaagtcatgaaagcagtggcccttttcactattgcaccagttaacctactgaagaaacacagactggcaaattggataaagagtcaagacccatcagtgcgctgtattcaggaaacccatctcacatgcagagacacacataggctcaaaataaaaggatggaggaagatctaccaagcaaatgggaaacaaaaaaaggcaggggttgcaatcctagtctctgataaaacagactttaaaccaacaaagatcaaaagagacaaagaaggccattacttaatggtaaagggatcaattcaacaagaagagctaactatcctaaatatatatgcacccaattcaggagcacccagattcataaagcaagtcctaagtgacctacaaagagacttagactcccacacattaataatgggagactttaacaccctactgtcaacattagacagatcaacgagacagaaagtcaacaaggatacccaggaattgaactcagctctgcacaaagtggacctaatagacaactacagaactctccaccccaaatcaacagaatatacattcttttcagcaccacaccacacctattcaaaaattgaccacatacttggaagtaaagcactcctcagcaaatgtaaaagaacagaaattataacaaactatctctcagaccacagtgcaatcaaactagaactcaggattaagaatctcactcaaaaccgctcaactacatggaaactgaacaacctgctcctggatgactactgggtacataacgaaatgaaggcagaaataaagatgttctttgaaaccagtgagaacaaaggcacaacataccagaatctctgggacacatacaaagcagtgtgtagagggaaatttatagcactaaatgcccacaagagaaagcaggaaagatccaaaattgacactttaacatcacaattaaaagaactagaaaagcaagagcaaacacattcaaaagctagcagaaggcaagaaataactaaaatcagagcagaactgaaggaaatagagacacaaaaaacccttcaaaaaattaatgaatccaggagctggttttttgaaaggatcaacaaaatagatagaccgctagcaagactaataaagaaaaaaagagagaagaatcaaatagatgcaataaaaaatgataaaggggatatcaccaccgatcccacagaaatacaaactaccatcagagaatactacaaacacctctacgcaaataaactagaaaatctagaagaaatggataaattcctcgacacatacactctcccaagactaaaccaggaagaagttgaatctctgaatagaccaataacaggagctgaaattgtggcaataatcaatagtttaccaaccaaaaagagtccaggaccagatggattcacagccgaattctctcagaggtacaaggaggaactggtaccattccttctgaaactatttcaatcaatagaaaaagagggaatcctccctaactcattttatgaggccagcatcattctgataccaaagcctggcagagacacaaccaaaaaagagaattttagaccaatatccttgatgaacattgatgcaaaaatcctcagtaaaatactggcaaaacgaatccagcagcacatcaaaaagcttatccaccatgatcaagtgggcttcatccctgggatgcaaggctggttcaatatacacaaatcaataaatgtaatccagcatataaacagagccaaagacaaaaaccacatgattatctcaatagatgcagaaaaggcctttgacaaaattcaacaacccttcatgctaaaaactctcaataaattaggtattgatgggacatatttcaaaataataggagctatctatgacgaacccacagccaatatcatactgaatgggcaaaaactggaagcattccctttgaaaactggcacaagacagggatgccctctctcaccactcctactcaacatagtgttggaagttctggccagggcaattaggcaggagaaggaaataaaaggtattcaattaggaaaagaggaagtcaaattgtccctgtttgcagacgacatgattgtatatctagaaaaccccattgtctcagcccaaaatctccttaagctaataagcaacttcagcaaagtctcaggatacaaaatcaatgtacaaaaatcacaagcattcttatacaccaacaacagacaaacagagagccaaatcatgagtgaactcccattcacaattgcttcaaagagaataaaatacctgggaatccaacttacaagggatgtgaaggacctcttcaaggagaactacaaaccactgctcaaggaaataaaagaagatacaaacaaatggaagaacattccatgctcatgggtaggaagaatcaatattgtgaaaatggccatactgcccaagggggtgctggggaggagggcgagctcggcggtgacgcgcggtcctcacgtgacccggagctgcagagctacgcagccttcgttgcagtcgtcactcgcatctggctaccagctccccgctgccctgcgctcggcgggctggcatcgggcccggggaaagcggagcagatctgcctgcatgtctgctgcagggcttaagatcactggaagcaaagaaacaaagaggagattgctcctgatcagtatagactggtccagagatctcatgaatttatgtatctactttagggtgtactgccaagagaagcaagaggagaggagggaactgcctcggatcattacaggtccacctccagaggcagctgtagtggcctttgagtggctgaagaccagcaccctcacaggcctacacccacaactaccactctctttaccccagcccgagtgcgctctaccataccttgttcgtgcttttagcaggggtgattacatgggccgcattcaggaagtgggctgggtgactgcaggactggtgatctgggctggcacctgctactacatttacaaatttaccaagggaagagcccagagtgtgaggactcttgccagaaatggatccacagttaagatggagactgtggttggggtacagagccagaccttggccataaatgaagcagagattaagactaaaccccaagtcgagattggagcagaaactggagcaagaagtgggcctagggctgaagtagagaccaaggccactgctatagccatacacagagccaactctcaggccaaggcaatggttggggcagagccagagactcaatctgagtccaaagtggtggctggaacactggtcatgacagaggcagtgactctgactgaggtcaaggccaaagccagggaagtggccatgaaagaagcagtgacccaaactgatgctgaggctggcaaaatagttaagaaagaagcagtgacacagaccaaggctaaagcttgggcgctggttgccaagacagaggccaagagagaagcaatgacccagaccaaagctgaaactcatatattggctgaaaaagagacagagattaacagagtaatggttacacagagtgagaccttggcagtacccagggaagtggccaagatgggggccacgaacaagactggaattgtggatgaaaccaagacaagagctctggaagagactgtgagtgtggctaagactcagtctgaggccaggcctggtgccacagttgatgctaggggaaatcccaatggcatgtccagggaggtggctggagtggacatgaagtcctgtgcacagtctcaggctgtgaccaagatccagggtgatgacatgcctggtactggggttgaggacatggggaattgtaaaaccatgtctagggcagagtctggggcagacacgagggcttctgctcagcctcaaatttttgccaaaacccagactgaggccattcctggggcaaagattgatgccgggggtaacaccaatgccatgtggaaaataccaatgtcatatctaaaggcaataactggagctgacatgagagctgctgctcagcctcaagctgttgccagtactcacgctgaggccatgtctgatgctaaggttaagaacagaggcaatcccaatgccatgactaaagcaggggccaaggcaaacttgagggccaattcccaggttgaggccttgcctgatgccagggataagagcagaggcaatcccaatgttatggctaaggtgggggatgggacagacatgttgtcctgtacacagcctcagcttgtggccagtgttcaggctgataccttgtctgatggcaaaattaaggtcaggggcaatgtcaattccatgcctaaggaaggagctggggtggatatgaaggctcaagatgataacagaagagtaagtcaggtagcctcagtgaagagtacagatggaaaaactgaggacagaacactgaggaagcctagtacatgtggggctttggcagagaatagcgcagaattgaaaccgaggttggaattgccatcaactattaaggcatgtgaagtcaccaccctgacacataaactctgggataattctgtgaaagcaggaacccttataactaaattatttctctccagtgctcagagcatgaaaattttctgctgtctttggaactttgtctacaaacagttagaagatgcagcccaagggctcaccatgggtggcgatgttgaagaacatgagtctaggcttggggctggggaagaggctggtgtagagtcctggaccttggctaggaatgtgggagaggatgagctaagtagagagtccagccctgatattgaggagatcagtttaaggtctttgttttgggctgagagtgagaacagtaatacgttcagatctaagagtgggaaagatgccagttttgagtctggagctggggataacaccagcatcaaggataagtttgaggctgctggtggagttgatatagggtcttggttctgtgctggtaatgaaaacacaagtgaggacaaatctgcacctaaggctaaagccaaaaagtcatctgagtcaagaggcatatatccgtacatggtccctggggcaggaatggggtcatgggatggagccatgatctggtcggaaactaagtttgcacaccaaagtgaggccagcttcccagttgaagatgagtccagaaaacaaaccaggactggggaaaaaactcggccctggtcttgccgctgtaaacacgaagctaatatggatccacgagatcttgaaaaactcatttgcatgattgagatgactgaagatccttctgttcatgaaatagccaataatgctttatataacagtgctgattattcttattctcatgaagttgttcgtaatgtaggtggaatttcagttattgaaagcttgctcaataatccctaccccagtgttaggcagaaggctttaaatgcactgaataatatctcagtggctgctgaaaaccataggaaggttaaaacttacttaaaccaagtatgtgaagacactgtcacctatcccttgaattcaaatgtgcagttggctggactaaggttgataaggcatctgactattaccagtgaatatcagcatatggttacaaattatatttcagaatttcttcgtttgttaacggtgggaagtggagaaactaaagaccatgttttgggaatgcttttgaatttctctaaaaatccatctatgacaaaagacttgctcattgccaatgcaccaacatcactgattaacatttttagcaagaaagagacaaaggagaatattcttaatgctctttcactatttgaaaatataaattaccattttaaaagaagagcaaaagcatttacccaggacaaattcagtaaaaattccctttatttcctattccaacgacctaaagcatgtgccaagaaacttcgagccttagcagcagaatgcaatgaccctgaggtgaaagagagagttgagctattaataagtaaactctga

SEQ ID NO: 1853 - DNA, 404 bp, Homo sapiens
acaaaaaaaatatcaattgagaaatactaaattagaaacaaatggaagagccaacattatatgtaggaaattttcctatccaactcacataagcttccacaaatttgaagatggtgctatcagcagtaaggtcttcatgttcttcaacatcgccacccatggtgagcccttgggcctgcatcttctaactgtttgtagacaaagttccaaagacagcagaaaattttcatgctctgagcacaacatgttttcagaactttttgaagttccagtatggtgctgtcacggttggtgagctgtctgtccttgatccagtagacaatgcgagtttcttccgtcattcgccacgctgaccacttccctaaagctgccacccgctgaagccccagcccggccgcggccgc

SEQ ID NO: 1854 - DNA, 7502 bp, Homo sapiens
  SIMILAR (6681)..(7370): 481254mologous to Homo sapiens Human secreted protein (clone fj283-11),accession number AAY17220,Smith-Waterman Score=594.
ggggtgctggggaggagggcgagctcggcggtgacgcgcggtcctcacgtgacccggagctgcagagctacgcagccttcgttgcagtcgtcactcgcatctggctaccagctccccgctgccctgcgctcggcgggctggcatcgggcccggggaaagcggagcagttttccagatccctctacctacctgaccatcttggtgaaggaaatggtgggcttttggggaaatccctagaaccctacagatctgcctgcatgtctgctgcagggcttaagatcactggaagcaaagaaacaaagaggagattgctcctgatcagtatagactggtccagagatctcatgaatttatgtatctactttagggtgtactgccaagagaagcaagaggagaggagggaactgcctcggatcattacaggtccacctccagaggcagctgtagtggcctttgagtggctgaagaccagcaccctcacaggcctacacccacaactaccactctctttaccccagcccgagtgcgctctaccataccttgttcgtgcttttagcaggggtgattacatgggccgcattcaggaagtgggctgggtgactgcaggactggtgatctgggctggcacctgctactacatttacaaatttaccaagggaagagcccagagtgtgaggactcttgccagaaatggatccacagttaagatggagactgtggttggggtacagagccagaccttggccataaatgaagcagagattaagactaaaccccaagtcgagattggagcagaaactggagcaagaagtgggcctagggctgaagtagagaccaaggccactgctatagccatacacagagccaactctcaggccaaggcaatggttggggcagagccagagactcaatctgagtccaaagtggtggctggaacactggtcatgacagaggcagtgactctgactgaggtcaaggccaaagccagggaagtggccatgaaagaagcagtgacccaaactgatgctgaggctggcaaaatagttaagaaagaagcagtgacacagaccaaggctaaagcttgggcgctggttgccaagacagaggccaagagagaagcaatgacccagaccaaagctgaaactcatatattggctgaaaaagagacagagattaacagagtaatggttacacagagtgagaccttggcagtacccagggaagtggccaagatgggggccacgaacaagactggaattgtggatgaaaccaagacaagagctctggaagagactgtgagtgtggctaagactcagtctgaggccaggcctggtgccacagttgatgctaggggaaatcccaatggcatgtccagggaggtggctggagtggacatgaagtcctgtgcacagtctcaggctgtgaccaagatccagggtgatgacatgcctggtactggggttgaggacatggggaattgtaaaaccatgtctagggcagagtctggggcagacacgagggcttctgctcagcctcaaatttttgccaaaacccagactgaggccattcctggggcaaagattgatgccgggggtaacaccaatgccatgtgtaaggtgggggcaggggcagatgtgagagcttgtatacaacctcagactgtggccaagaaacaggctgaggtgacgtctggtgccagggttgatggtaggggaaataccaatgtcatatctaaggcaataactggagctgacatgagagctgctgctcagcctcaagctgttgccagtactcacgctgaggccatgtctgatgctaaggttaagaacagaggcaatcccaatgccatgactaaagcaggggccaaggcaaacttgagggccaattcccaggttgaggccttgcctgatgccagggataagagcagaggcaatcccaatgttatggctaaggtgggggatgggacagacatgttgtcctgtacacagcctcagcttgtggccagtgttcaggctgataccttgtctgatggcaaaattaaggtcaggggcaatgtcaataccatgcctaaggaaggagctggggtggatatgaaggctcaaggtatggcccagagccagggtgaagccttacctaatactagaggtaaggctaggggcaaagccaaagccaagtgtaagacagggcctgggatggacatgaaaacctgtacacaacctcaggctggggtcaagaccccagctgaggccttgcttgattccagggttgatggtaggggcaatcctaatgccacttctaaagccgggactaaggcagaccagagggtctgtggtcagcccctggttgtggccaatccccagggtgaggccttgcctggtgccaagaataaagtcaagggcaatccccatactgtgcttaaggtgggggctggagaaggtacaacagactctgcccagcctgaggcagtggtcagtttccagggtgaggccttgcttggcaccaagaataaagttaagggtaatcccaatgttgtgcttaaggcagaagttggggaaggtgcaatgggcactgcccagcttcagattatggccagttccaagggtgaggccttgcttgattctaagaataaggtcaagggtaattccaatgctgtgtctaaggcaggggctgggacagatacaacaggctctgtccagccccagattgtggccaattcccagggtgaggtcttgcctggtgccaagaataagatcagaggcaatcccactactgtgcctaattcaggggttgggccatatacaacagactctgcccggctccaggctgtggccaattctcagggtgaggtcttgcctggtgccaaaaataaggtcaaggccaatcttaatgctgtgtctaaggcagaagctgggatgggtgcaacaggctctgtccagccccaggctgtggctaattcccattgtgagaccttgcctggtgccaagaataaggtcaggggaaattggaatgctgtgtctaaggcaggggctgggatggatacaaggggctctgcccagccccaggctgtggccaattcccagggtgaagtcttgcctggtgccaagaataaggtcaagggcaatcccaatgtcgtgtctaaggcaggggccagagaagatacagtgggctctacccagcctcaggttttggccagctcccagcgtgagaccttgcctggtgccaggaataaggtcaagggcaattccaatgttgtgtctaaggcaggggccagagaagatacaatgggctctgcccagcctcaggttgtggccaactcccagcgtgagaccttgcctggtgccaggaataaggtcaagggcaattccaatgctatttctaaggcagaggctggggcaggcataatgggctctgtccaggtccaggttgtggccagttttcagggtgaggtcttgcctggggccaaaaataaggtcaggggcaattccaatgctgtgcctaaggcagaggctggggcagatacagtgggctctgcccagccccaagctgtcgctaattcccagagtgagaccttgcttggtgccaggaataaggtcaagggcaataccattgctgtgcctaaagcagggactggggcaggcacaaggcactctgcccagcctcagattgtggccggttcccagggtgagaccttgcctggggcaagggacaagtctatgtccacttctgaggcagaagccacagcagaagatgaggcctatgcaaagcctgaggctgaggccatgcccacttctgagagtgagggtgggtcaggcactcaagcctgcagaaagactcagcctaacatccatgactactactggaatgggattggtgttgaagactggattgctgctgagcggtggatcaaatttaggtttcagaccatggatggagactgggaaaatagcgtgtcctgggctgatgatgagaatgaagccagtattgggtcctggagtggggctagtgataaggctgggattattcggtcttgggctgtggcttgtgatgagaccagtgttaagtcctgggctggggccagggctgagaatgtggttggtattgggacttgggctagagctggggagcaggccagtggagggctctgggctgggggtcagactagtgaggggacctgggctggggacaaggccagtggaggagcctggactggggctgagaaccaggccagtggggggtcttgggctctcgctgggaatcaggccattggagagctttgggctgcgggtcaggccagtgatgggtcctggcctgggggacaggccagtggggtgtcctgggttggggaagaggccattggagggtcctggactggggctgagaaccaagccagtgaagggtcttgggctggagctggggctgggaatatgagtagtgtttcatactgggctggggttgtggatcaggccggtggagggtcctgggctgggactagtgatcaatctggtggtgggtccaagcctagatttgaggatcaagccagtggagaagggtcctgggctggggctggtggccaggctagtggagggtcaatgttggggcctgaggaccagtccagtggaaggtcttgggctgacactgcagaccaagccagtggagggtctaggctgggccacgtagatcagtccagtggtggggcctgggctgggacacttgatcagtctggtggtgggtccaagcctagatttgaaaatcagaccacagaagaagggtcttgggctggggctggtggccaggctggtggagggtccaaggtggggcctgaagaccagtccagtggaaggtcatgggctaactctggggaccaaatcagtggaggattcttagttgggattgtggaccaggccaatggagggtcctggactggggctgggcatccagctagtgttgggccaaagcctatatttgaggatcaggtcagtggcagagggtcctgggctgatgccagggagcaggttgttggagattctaggctggggcttagggaccagtctagtggagattcctgggctgacactggggaccaggccagtggatggttctgtgtttgccctgggagtcagacgaatggagggtcttggggtggggctagtggccaggatgttggagggtctaggccagggcccacgaaccagtccagtgctgggtcctgggatagccctgggagtcaggtcagtggaagctgctggactggggctggggctgtggatcaggctggtggttgttccaaacctggatttgaggatcaggccattggaggggggttctggcctggtgctggggaccagactggtggaggctccaggccagggtctgaggatcagtccagtggaataggttcctggggtgtggctggtggccaggtccttgggggagctaggccggggcctgcagaccagtccagtggtgggtcctgggctggcactgggaatcagtccagtggaaggtcctggattgggcctggggatcaggctgttgactgttccaagcctgaatttgaggatcaggcttgtggaggaggctcctgggctggtgctgggagccaagccagtggagaatcctgggctggatctaggcctgggaatgaggccattggaggatctaggatgggatctgaggaccaggccactggaggatcctgggctagatctgaggaccaggccagtggaaggttccaggtcagttttgaggtggaggccaatgaaggattctggtttgggcctggagctgaggccgttatagggtcttggtgctggacagaggaaaaagctgatattgtgtccaggcctgatgataaagatgaggccactactgcatccagatcaggggctggggaagaggccatgatttgttctaggattgaggctgagaacaaggctagtagtggctcctggattagatctgaggaggtggcttatatgggctcctgtgtaggggctgaggctggggctggggctgaggctggggctggggctgaggctggggctggggctggggctgaggctggggctgaggctggggctggggctggggctgggcctgggactgagtctggggctgggatttggtcctgggatggagatgcaaccactgtagagtctaggcttggggctggggaagaggctggtgtagagtcctggaccttggctaggaatgtgggagaggatgagctaagtagagagtccagccctgatattgaggagatcagtttaaggtctttgttttgggctgagagtgagaacagtaatacgttcagatctaagagtgggaaagatgccagttttgagtctggagctggggataacaccagcatcaaggataagtttgaggctgctggtggagttgatatagggtcttggttctgtgctggtaatgaaaacacaagtgaggacaaatctgcacctaaggctaaagccaaaaagtcatctgagtcaagaggcatatatccgtacatggtccctggggcaggaatggggtcatgggatggagccatgatctggtcggaaactaagtttgcacaccaaagtgaggccagcttcccagttgaagatgagtccagaaaacaaaccaggactggggaaaaaactcggccctggtcttgccgctgtaaacacgaagctaatatggatccacgagatcttgaaaaactcatttgcatgattgagatgactgaagatccttctgttcatgaaatagccaataatgctttatataacagtgctgattattcttattctcatgaagttgttcgtaatgtaggtggaatttcagttattgaaagcttgctcaataatccctaccccagtgttaggcagaaggctttaaatgcactgaataatatctcagtggctgctgaaaaccataggaaggttaaaacttacttaaaccaagtatgtgaagacactgtcacctatcccttgaattcaaatgtgcagttggctggactaaggttgataaggcatctgactattaccagtgaatatcagcatatggttacaaattatatttcagaatttcttcgtttgttaacggtgggaagtggagaaactaaagaccatgttttgggaatgcttttgaatttctctaaaaatccatctatgacaaaagacttgctcattgccaatgcaccaacatcactgattaacatttttagcaagaaagagacaaaggagaatattcttaatgctctttcactatttgaaaatataaattaccattttaaaagaagagcaaaagcatttacccaggacaaattcagtaaaaattccctttatttcctattccaacgacctaaagcatgtgccaagaaacttcgagccttagcagcagaatgcaatgaccctgagtgtttagaggcggcagaaactgctgcaggcaacagtgctcaaggaaagttttacaaaggagggggacccttaggtgttgatcccaagagcattccctag

SEQ ID NO: 1855 - DNA, 3571 bp, Homo sapiens
  SIMILAR (2451)..(3026): 301254mologous to Homo sapiens Human secreted protein (clone fj283-11),accession number AAY17220,Smith-Waterman Score=211.
gtccacctccagaggcagctgtagtggcctttgagtggctgaagaccagcaccctcacaggcctacacccacaactaccactctctttaccccagcccgagtgcgctctaccataccttgttcgtgcttttagcaggggtgattacatgggccgcattcaggaagtgggctgggtgactgcaggactggtgatctgggctggcacctgctactacatttacaaatttaccaagggaagagcccagagtgtgaggactcttgccagaaatggatccacagttaagatggagactgtggttggggtacagagccagaccttggccataaatgaagcagagattaagactaaaccccaagtcgagattggagcagaaactggagcaagaagtgggcctagggctgaagtagagaccaaggccactgctatagccatacacagagccaactctcaggccaaggcaatggttggggcagagccagagactcaatctgagtccaaagtggtggctggaacactggtcatgacagaggcagtgactctgactgaggtcaaggccaaagccagggaagtggccatgaaagaagcagtgacccaaactgatgctgaggctggcaaaatagttaagaaagaagcagtgacacagaccaaggctaaagcttgggcgctggttgccaagacagaggccaagagagaagcaatgacccagaccaaagctgaaactcatatattggctgaaaaagagacagagattaacagagtaatggttacacagagtgagaccttggcagtacccagggaagtggccaagatgggggccacgaacaagactggaattgtggatgaaaccaagacaagagctctggaagagactgtgagtgtggctaagactcagtctgaggccaggcctggtgccacagttgatgctaggggaaatcccaatggcatgtccagggaggtggctggagtggacatgaagtcctgtgcacagtctcaggctgtgaccaagatccagggtgatgacatgcctggtactggggttgaggacatggggaattgtaaaaccatgtctagggcagagtctggggcagacacgagggcttctgctcagcctcaaatttttgccaaaacccagactgaggccattcctggggcaaagattgatgccgggggtaacaccaatgccatgtggaaaataccaatgtcatatctaaaggcaataactggagctgacatgagagctgctgctcagcctcaagctgttgccagtactcacgctgaggccatgtctgatgctaaggttaagaacagaggcaatcccaatgccatgactaaagcaggggccaaggcaaacttgagggccaattcccaggttgaggccttgcctgatgccagggataagagcagaggcaatcccaatgttatggctaaggtgggggatgggacagacatgttgtcctgtacacagcctcagcttgtggccagtgttcaggctgataccttgtctgatggcaaaattaaggtcaggggcaatgtcaattccatgcctaaggaaggagctggggtggatatgaaggctcaagatgataacagaagagtaagtcaggtagcctcagtgaagagtacagatggaaaaactgaggacagaacactgaggaagcctagtacatgtggggctttggcagagaatagcgcagaattgaaaccgaggttggaattgccatcaactattaaggcatgtgaagtcaccaccctgacacataaactctgggataattctgtgaaagcaggaacccttataactaaattatttctctccagtgctcagagcatgaaaattttctgctgtctttggaactttgtctacaaacagttagaagatgcagcccaagggctcaccatgggtggcgatgttgaagaacatgagtctaggcttggggctggggaagaggctggtgtagagtcctggaccttggctaggaatgtgggagaggatgagctaagtagagagtccagccctgatattgaggagatcagtttaaggtctttgttttgggctgagagtgagaacagtaatacgttcagatctaagagtgggaaagatgccagttttgagtctggagctggggataacaccagcatcaaggataagtttgaggctgctggtggagttgatatagggtcttggttctgtgctggtaatgaaaacacaagtgaggacaaatctgcacctaaggctaaagccaaaaagtcatctgagtcaagaggcatatatccgtacatggtccctggggcaggaatggggtcatgggatggagccatgatctggtcggaaactaagtttgcacaccaaagtgaggccagcttcccagttgaagatgagtccagaaaacaaaccaggactggggaaaaaactcggccctggtcttgccgctgtaaacacgaagctaatatggatccacgagatcttgaaaaactcatttgcatgattgagatgactgaagatccttctgttcatgaaatagccaataatgctttatataacagtgctgattattcttattctcatgaagttgttcgtaatgtaggtggaatttcagttattgaaagcttgctcaataatccctaccccagtgttaggcagaaggctttaaatgcactgaataatatctcagtgggctgctgaaaaccataggaaggttaaaacttacttaaaccaagtatgtgaagacactgtcacctatcccttgaattcaaatgtgcagttggctggactaaggttgataaggcatctgactattaccagtggaatatcagcatatgggttacaaattattatttcaggatttcttcgtttgttaacggtggggaagtgggagaaacttaaaggaccctgtttttggggatgcttttgaatttctctaaaaatccatctatgacaaaagaatttgctcattgccaatgcaccaacattacctgggtaacatttttagcaagaaagagacaaaggagaatattcttaatgctctttcactatttgaaaatataaattaccattttaaaagaagagcaaaagcatttaccccagggacaaattcagtaaaaattccctttatttcctattccaacgacctaaagcatgtgccaagaaacttcgagccttagcagcagaatgcaatgaccctgaggtgaaagagagagttgagctattaataagtaaactctgattggctgtatgttcccaaacaaatttgagtaatattttggttttgcactctggaagtaatgcacattgtaaattgcattataactttgaaactgatgttacctatgatggtctatagctggaaccatttaatggaacaccaaatgaattcaagcttgtactaaaaatacatgtgttgatttttatcttgtctggattgagatatttttagtatgcttcatgagcagaaactgaatggattcttcataagtaaggtaatctttggtcctttgtgtggacttatgtttatacatttaagactatttttatgtcatcaataaagttgtgtgttttaagcagcagaaaaa

SEQ ID NO: 1856 - DNA, 757 bp, Homo sapiens
  SIMILAR (85)..(276): 1001254mologous to Homo sapiens Human secreted protein sequence encoded by gene 42 SEQ ID NO:102,accession number AAB44803,Smith-Waterman Score=377.
  misc_feature (1)...(757): n = a,t,c or g
aattattttctttccctgaggtttgattggcacagcagcaaaagttgaggccaccccacttgtgtccactgtttttagaaaaaaatgaatggcttcctgccattgtggggctggactcttgggctttcttggtgggagcggagaaggggcctcccacccttgtccgagttgcctcccactggaggtcaggagtctacactgcagcctcgggcactgtggggagtgcatgcctggggcctctgggtggggaccatggacaggccctggtcactgtcctaacctttgtcaggacaaaggtagcaagaggatttcctggcgggtgggaaggaatggctgggggcggccaagttttgacaacgccccagttgccctggangaaacaaccagggtcaatctgcacttgatgactgctccccgacccacagcccggacacctcatttccctcccactacagggatcaagtgacctgggaagaaccgagtttaacaccaggatgtgtttccttagatgtcctgtcctaggcgagtttccagggagagccctgattggacaatcacatcacagatcacactgcagtttccatgttagcactgtggatgggtttttaatcaataaaaactgggggtttcttctcaccgactctccactggcccaaactgccaaaagctggtgattctgggacaggccttcactttggagcacgggatggggtgggggagcccatgggctgggaaggagggtgctgtggagggggct

SEQ ID NO: 1857 - DNA, 1206 bp, Homo sapiens
  SIMILAR (198)..(695): 491254mologous to Homo sapiens Clone HUVBB80 of TM4SF superfamily,accession number AAW61626,Smith-Waterman Score=289.
ggcacgagcagctcagctcttcagttggtgatcattggctattggtctccaaacagtaaaccagtatttcacactgagattgtcggctgcgggtatattccaattccccgtctcctcatgatatactatgggaagggctctgaccctggaagtggttctaagcagggcaaaatggggtctctggaagtgcggagcgctgcctaagctgtttgctgattccgcttgcactttggagtataatcgagaacatattattgtatatcccgaatgggcacactttctatgcatccagcaataaactcaccaactacgtgtggtattctgaaagaatctgactctcaggcatcatggatgcttatagtaacaacagttcttctggtactggagaataataacaactataaatgtttgccagagtgaaaactgcagcaaaaaatatgtgacactgctgtcaattatcttttcttccctcggaattgctttttctggatactgcctgggtcatctctgccttggggtcttgtccctgagccatatgcccgcacccttgatgggctggggagtatgcttttgaagggcactgctgggacgtttccttacagattctaggcatatgggattcagtgcctgggaacctggcacatgttgtggagtggaacatcattttattttccattctcataaccctcagtggggcttcaagtgatcatctgcctcatcagagtagtcatgcaactatccaagatactgtgtggaagctattcagtgatcttccagcctggaatcatttgaataaggacataaatgttttccattatcaagacatgggcatctatctaaatattatatcaactgtgtggacttgatggcaatattgaattgatggtgctttctgcatttgggtgtttatttgtaaaaaatttgcagtcctcactgcacatgcaaggtatacccaccccttcccatttaggtatggttttttaagtaatatgcatcagaaacttcagaaatacttctgccctttgatcaaacaaatcccatttcccaagaatctgtactagggaagtaaataagaatatgagagaaacctttatgcaaatatgtatattgcaacattatttaatattctggaaaattggaaacaccccaaaattctaaactcagaggaaggattaagtaaagagtggtacatactgtaaatgtttt

SEQ ID NO: 1858 - DNA, 3285 bp, Homo sapiens
  SIMILAR (1)..(3282): 1001254mologous to Homo sapiens tie receptor tyrosine kinase,accession number A16754,Smith-Waterman Score=5822.
atggtctggcgggtgccccctttcttgctccccatcctcttcttggcttctcatgtgggcgcggcggtggacctgacgctgctggccaacctgcggctcacggacccccagcgcttcttcctgacttgcgtgtctggggaggccggggcggggaggggctcggacgcctggggcccgcccctgctgctggagaaggacgaccgtatcgtgcgcaccccgcccgggccacccctgcgcctggcgcgcaacggttcgcaccaggtcacgcttcgcggcttctccaagccctcggacctcgtgggcgtcttctcctgcgtgggcggtgctggggcgcggcgcacgcgcgtcatctacgtgcacaacagccctggagcccacctgcttccagacaaggtcacacacactgtgaacaaaggtgacaccgctgtactttctgcacgtgtgcacaaggagaagcagacagacgtgatctggaagagcaacggatcctacttctacaccctggactggcatgaagcccaggatgggcggttcctgctgcagctcccaaatgtgcagccaccatcgagcggcatctacagtgccacttacctggaagccagccccctgggcagcgccttctttcggctcatcgtgcgggcctgcagagagggccgttttgggcagagctgccaggagcagtgcccaggcatatcaggctgccggggcctcaccttctgcctcccagacccctatggctgctcttgtggatctggctggagaggaagccagtgccaagaagcttgtgcccctggtcattttggggctgattgccgactccagtgccagtgtcagaatggtggcacttgtgaccggttcagtggttgtgtctgcccctctgggtggcatggagtgcactgtgagaagtcagaccggatcccccagatcctcaacatggcctcagaactggagttcaacttagagacgatgccccggatcaactgtgcagctgcagggaaccccttccccgtgcggggcagcatagagctacgcaagccagacggcactgtgctcctgtccaccaaggccattgtggagccagagaagaccacagctgagttcgaggtgccccgcttggttcttgcggacagtgggttctgggagtgccgtgtgtccacatctggcggccaagacagccggcgcttcaaggtcaatgtgaaagtgccccccgtgcccctggctgcacctcggctcctgaccaagcagagccgccagcttgtggtctccccgctggtctcgttctctggggatggacccatctccactgtccgcctgcactaccggccccaggacagtaccatggactggtcgaccattgtggtggaccccagtgagaacgtgacgttaatgaacctgaggccaaagacaggatacagtgttcgtgtgcagctgagccggccaggggaaggaggagagggggcctgggggcctcccaccctcatgaccacagactgtcctgagcctttgttgcagccgtggttggagggctggcatgtggaaggcactgaccggctgcgagtgagctggtccttgcccttggtgcccgggccactggtgggcgacggtttcctgctgcgcctgtgggacgggacacgggggcaggagcggcgggagaacgtctcatccccccaggcccgcactgccctcctgacgggactcacgcctggcacccactaccagctggatgtgcagctctaccactgcaccctcctgggcccggcctcgccccctgcacacgtgcttctgccccccagtgggcctccagccccccgacacctccacgcccaggccctctcagactccgagatccagctgacatggaagcacccggaggctctgcctgggccaatatccaagtacgttgtggaggtgcaggtggctgggggtgcaggagacccactgtggatagacgtggacaggcctgaggagacaagcaccatcatccgtggcctcaacgccagcacgcgctacctcttccgcatgcgggccagcattcaggggctcggggactggagcaacacagtagaagagtccaccctgggcaacgggctgcaggctgagggcccagtccaagagagccgggcagctgaagagggcctggatcagcagctgatcctggcggtggtgggctccgtgtctgccacctgcctcaccatcctggccgcccttttaaccctggtgtgcatccgcagaagctgcctgcatcggagacgcaccttcacctaccagtcaggctcgggcgaggagaccatcctgcagttcagctcagggaccttgacacttacccggcggccaaaactgcagcccgagcccctgagctacccagtgctagagtgggaggacatcacctttgaggacctcatcggggaggggaacttcggccaggtcatccgggccatgatcaagaaggacgggctgaagatgaacgcagccatcaaaatgctgaaagagtatgcctctgaaaatgaccatcgtgactttgcgggagaactggaagttctgtgcaaattggggcatcaccccaacatcatcaacctcctgggggcctgtaagaaccgaggttacttgtatatcgctattgaatatgccccctacgggaacctgctagattttctgcggaaaagccgggtcctagagactgacccagcttttgctcgagagcatgggacagcctctacccttagctcccggcagctgctgcgtttcgccagtgatgcggccaatggcatgcagtacctgagtgagaagcagttcatccacagggacctggctgcccggaatgtgctggtcggagagaacctagcctccaagattgcagacttcggcctttctcggggagaggaggtttatgtgaagaagacgatggggcgtctccctgtgcgctggatggccattgagtccctgaactacagtgtctataccaccaagagtgatgtctggtcctttggagtccttctttgggagatagtgagccttggaggtacaccctactgtggcatgacctgtgccgagctctatgaaaagctgccccaggctgaccgcatggagcagcctcgaaactgtgacgatgaagtgtacgagctgatgcgtcagtgctggcgggaccgtccctatgagcgacccccctttgcccagattgcgctacagctaggccgcatgctggaagccaggaaggcctatgtgaacatgtcgctgtttgagaacttcacttacgcgggcattgatgccacagctgaggaggcctga

SEQ ID NO: 1859 - DNA, 564 bp, Homo sapiens
  SIMILAR (123)..(191): 471254mologous to Homo sapiens Amino acid sequence of TIE1 protein,accession number AAY30319,Smith-Waterman Score=37.
cccacgcgtccgcccacgcgtccgcccacgcgtccgcttccttcatgtggcccaagtgatttcctgacagtcctggcactgggatctttcacctctccctctgtgtaaccccatggtggcctctgggttccctgacccaggtgtccccacaatctgcccctctcactgtgtccagggctgcaggctgagggcccagtccaagagagccgggcagctgaagagggcctggatcagcagctgatcctggcggtggtgggctccgtgtctgccacctgcctcaccatcctggccgcccttttaaccctggtgtgcatccgcagaagctgcctgcatcggagacgcaccttcacctaccagtcaggctcggccttcctgggctcgggagccagcctctgtctgcacacatctttggctgatgttcttagccctgctgtggccacctgccagtaggccagtcatgctgtcctgtctcctctgagggcttcttcattgtcgtcacttaggatctgaactctgtccttggccttccaggcctggactcttgatatttagagctaagctttg

SEQ ID NO: 1860 - DNA, 3966 bp, Homo sapiens
  SIMILAR (57)..(2468): 991254mologous to Homo sapiens Amino acid sequence of TIE1 protein,accession number AAY30319,Smith-Waterman Score=4336.
tttcgtctgaccccaggcccagctcgttctggctggtttgggtcggcctctggagtatggtctggcgggtgccccctttcttgctccccatcctcttcttggcttctcatgtgggcgcggcggtggacctgacgctgctggccaacctgcggctcacggacccccagcgcttcttcctgacttgcgtgtctggggaggccggggcggggaggggctcggacgcctggggcccgcccctgctgctggagaaggacgaccgtatcgtgcgcaccccgcccgggccacccctgcgcctggcgcgcaacggttcgcaccaggtcacgcttcgcggcttctccaagccctcggacctcgtgggcgtcttctcctgcgtgggcggtgctggggcgcggcgcacgcgcgtcatctacgtgcacaacagccctggagcccacctgcttccagacaaggtcacacacactgtgaacaaaggtgacaccgctgtactttctgcacgtgtgcacaaggagaagcagacagacgtgatctggaagagcaacggatcctacttctacaccctggactggcatgaagcccaggatgggcggttcctgctgcagctcccaaatgtgcagccaccatcgagcggcatctacagtgccacttacctggaagccagccccctgggcagcgccttctttcggctcatcgtgcggggttgtggggctgggcgctgggggccaggctgtaccaaggagtgcccaggttgcctacatggaggtgtctgccacgaccatgacggcgaatgtgtatgcccccctggcttcactggcacccgctgtgaacaggcctgcagagagggccgttttgggcagagctgccaggagcagtgcccaggcatatcaggctgccggggcctcaccttctgcctcccagacccctatggctgctcttgtggatctggctggagaggaagccagtgccaagaagcttgtgcccctggtcattttggggctgattgccgactccagtgccagtgtcagaatggtggcacttgtgaccggttcagtggttgtgtctgcccctctgggtggcatggagtgcactgtgagaagtcagaccggatcccccagatcctcaacatggcctcagaactggagttcaacttagagacgatgccccggatcaactgtgcagctgcagggaaccccttccccgtgcggggcagcatagagctacgcaagccagacggcactgtgctcctgtccaccaaggccattgtggagccagagaagaccacagctgagttcgaggtgccccgcttggttcttgcggacagtgggttctgggagtgccgtgtgtccacatctggcggccaagacagccggcgcttcaaggtcaatgtgaaagtgccccccgtgcccctggctgcacctcggctcctgaccaagcagagccgccagcttgtggtctccccgctggtctcgttctctggggatggacccatctccactgtccgcctgcactaccggccccaggacagtaccatggactggtcgaccattgtggtggaccccagtgagaacgtgacgttaatgaacctgaggccaaagacaggatacagtgttcgtgtgcagctgagccggccaggggaaggaggagagggggcctgggggcctcccaccctcatgaccacagactgtcctgagcctttgttgcagccgtggttggagggctggcatgtggaaggcactgaccggctgcgagtgagctggtccttgcccttggtgcccgggccactggtgggcgacggtttcctgctgcgcctgtgggacgggacacgggggcaggagcggcgggagaacgtctcatccccccaggcccgcactgccctcctgacgggactcacgcctggcacccactaccagctggatgtgcagctctaccactgcaccctcctgggcccggcctcgccccctgcacacgtgcttctgccccccagtgggcctccagccccccgacacctccacgcccaggccctctcagactccgagatccagctgacatggaagcacccggaggctctgcctgggccaatatccaagtacgttgtggaggtgcaggtggctgggggtgcaggagacccactgtggatagacgtggacaggcctgaggagacaagcaccatcatccgtggcctcaacgccagcacgcgctacctcttccgcatgcgggccagcattcaggggctcggggactggagcaacacagtagaagagtccaccctgggcaacgggctgcaggctgagggcccagtccaagagagccgggcagctgaagagggcctggatcagcagctgatcctggcggtggtgggctccgtgtctgccacctgcctcaccatcctggccgcccttttaaccctggtgtgcatccgcagaagctgcctgcatcggagacgcaccttcacctaccagtcagggctcgggcgaggagaccatcctgcagttcagctcagggaccttgacacttacccggcggccaaaactgcagcccgagcccctgagctacccagtgctagagtgggaggacatcacctttgagggacctcatcggggaggggaatttcggccaggtcatccgggccatgatcaagaaggacgggctgaagatgaacgcagccatcaaaatgctgaaagagtatgcctctgaaaatgaccatcgtgactttgcgggagaactgggaagttctcgtgcaaattggggcatcaccccaacatcatcaacctcctgggggcctgtaagaaccgaggttacttgtatatcgctattgaatatgccccctacgggaacctgctagatattctgcggaaaagccgggtcctagagactgacccagcttttgctcgagagcatgggacagcctctacccttaggctcccaggcagctgctgcgttttcgccagtgatgcgggccaatggcatggcagttacctggagtgaggaaggcagttcattccacaggggacctggggcttgcccgggaatgttgctggtcgggagagaacctgggcctccaagatttgcagactttcggccttttttcgggggagaggaggtttatgtgaagaagacgatggggcgtctccctgtagcgctggatggccattgagttccctggaactacagtgtctataccaccaagagtgatgtctggtcctttggagtccttctttgggaggatagtgagcttggagggtacaccctaactgtggcatgacttgtgccgaggctcttatgaaaagcttgccccaagggctacccgcatggaagcaagcctcgaaactggtgacgatgaagtgtacgagctgaatgcgtcagtgctggccgggaccgtccctatgagcgaccccccttttgcccagattgcgctaacagctaggcccgcatgctgggaagccagggaaggccctatgtgaaaccatgtcgctgtttgaaaaactttcacttacgcgggcaattgaatgcccacagctgaggaaggccctgaagctgcccatcccagcccagaaccttgggttctgctggccgggagcaaaactctgctgtcctaaacctgtgacccagtcttgaccccttacaggcctcttgacttaagctgcctcaaaggaatttttttttaacttaagggagaaaaaaagggatactggggatggggtgggcttaaggggaactgggttcccatgactttgtaggtgtctcatagctatccctgggcatccttctttcctagttcatgctgccccacagggtgtgtttcccatcccactggcttcccccaacacaaacccccactccagctccttcgcttaaagccagcactcactccacttaacatgccctgttcagctactcccactcccggcctgtcattcagaaaaaaataaatgttctaataagactccaaaaaaaaaaaaaaaaaaagat

SEQ ID NO: 1861 - DNA, 738 bp, Homo sapiens
  SIMILAR (410)..(562): 1001254mologous to Homo sapiens Human secreted protein sequence encoded by gene 12 SEQ ID NO:70,accession number AAB75251,Smith-Waterman Score=289.
gctggcctctaggggtctgaagggatagtgggaaggtggagggtgccttcaccaggagcagccttcatgagtgagttttaagaacctgtgaggatcggtcaggtctggtgtgcgctggatcatgccgtacaccatgtcaggatcacgcaggacaggactggggaagggtttgctggcgtctcagttaatagcagtaacggcagccgcttgtgttcttgattctttgccaagcattcttgttatttaacacgggaaggaggtgacttcgcctgtgatggacttccagtgtgagcactggccagagtgaccaggctgaccagcaccagccctgatccagatgcagaggccaggatgtgggcccagccctgtgccaggaggctggctggaataaagggatgggcaggctggcatgggggcagccgctgcccctgcctgggtgttgctgtgtattcctgccggccaggggccactgccaggaccacgcctcccttttcatatcccgattcttaagttctgctattgtggtattctggtggagaaaaaagaaccgcgtggctgtttttgaactgcctggaacctaagaccctgaattcttttcccccccaaggggaaaatctatatggaaaacatttattttaaaatacaggatgaagtgaattaaaagatttaaatgcacatttctttaaggataatatttctgtgttggcaaaatttgagagtaaattggtcttgaatgga

SEQ ID NO: 1862 - DNA, 508 bp, Homo sapiens
  SIMILAR (106)..(507): 981254mologous to Homo sapiens 14.3.3 protein,accession number X56468,Smith-Waterman Score=673.
  misc_feature (1)...(508): n = a,t,c or g
agctctcgaggctcctcccgctgcgggtcggcgctcgccctcgctctcctcgccctccgccccggccccggccccgcgcccgccatggagaagactgagctgatccgcaggtccgcctggagggtcatctctagcatcgagcagaagaccgacacctccgacaagaagttgcagctgattaaggactatcgggagaaagtggagtccgagctgagatccatctgcaccacggtgctggaattgttggataaatatttaatagccaatgcaactaatccagagagtaaggtcttctatctgaaaatgaagggtgattacttccggtaccttgctgaagttgcgtgtggtgatgatcgaaaacaaacgatagataattcccaaggagcttaccaagaggcatttgatataagcaagaaagagatgcaacccacacacccaatccgcctggggcttgctcttaactnttctgtattntactatgagattcttaataacccagagcttgcct

SEQ ID NO: 1863 - DNA, 2335 bp, Homo sapiens
  SIMILAR (148)..(873): 411254mologous to Homo sapiens 14.3.3 protein,accession number X56468,Smith-Waterman Score=221.
aaagccaaaagcagatcaaaagaggtgggactcgcgtcgcggccgcggagacgtggaagctctcgaggctcctcccgctgcgggtcggcgctcgccctcgctctcctcgccctccgccccggccccggccccggccccgcgcccgccatggagaagactgagctgatccagaaggccaagctggccgagcaggccgagtcgcatacgacgacatggccacctgcatgaaggcagtgaccgagcagggcgcccgagcttgtccaacgaggagcgcaacctgctctccggtggcctacaagaacgtggtcgggggccgcaggtccgccttggagggtcatctctaagcatccgagcagaaagaccgacacctccgacaaagaagttgcagctgattaaggactatcgggagaaagtggatttccgaagctgagatccatctggcaccacggtgctgggaatttgtttggataaatattttaattagccaatggcaacttaattccagagagtaagggtcttctatcttgaaaatgaaggggtgatttactttccgggtacctttgcctggaagttgcctgttgttgatgatcgaaaaacaaacgatagataattacccaaggagcttaccaagaggcattttgatataagcaagaaaagagatgcaacccacacaacccaatccgccttggggctttgctcttaactttttctgtattttactatgagattccttaataacccagaagcttgcctgcacgcctggctaaaaacggctttttgatggagggccattgcctgacttgatacactgaatgaaagactcatacaaagacagcacccctcatcatgcagttgctaagagacaaccctaccactttggacatcagacagtgcaggagaagaatgtgatgcggcagaaggggctgaaaactaaatccatacagggtgtcatccttctttccttcaagaaacctttttacacatctccattccttattccacttggatttcctatagcaaagaaacccattcatgtgtatggaatcaactgtttatagtcttttcacactgcagctttgggaaaacttcattccttgatttgtgtttgtcttggcttcctgggtgtccagtactgctgtagaaaagtattaatagcttcatttcatataacataaagtaactccaaaccacttatggaagaggactaaaaatgtatctggtatttaagtaatctgaaccagttctgcaagtgactgtgttttgtattactgtgaaaataagaaaatgtagttaattacaatttaaagagtattccacataacttcttaatttctacattccctcccttacttctacggggatttcatttaagatagcaacgtttcccatgctctaaatgaattcctattctagtaggaatccgggaggtattagattggaatggaaaggcacttgcccatctctggtctagggggtcaccaaatgaaaatggcctccgtaatcacaatacggaaggtcttgtgtaacctgtggccaaccagggagtttccttaattaactctttattttgctgctggtttaagttgacaacccacccttctcaaataaaaaatacactatacacctacctgccattagtagtttctggtattccactttactatgtgatagaagtagcatgttgctgccagaatacaagcattgctttgggccaaattaaagtgcatgtcatttctttaatacactcgtaaggggagattaaattaaggtacacaaggtcccaaggtctaaaacctttagtactttttccatgtcggatttgttcacatgtgagagggatgtcccagttttttctagtgattgttatttagagagttggaccactattgtgtgttgctaatccattgactgtagtcccgaaaaaaagccttgtgaaaatgttatgccctatgtaacaggcaggagtaacataaaataaaagtacattttataaacccatttactatggctttggtaacaaattgccatacccatattttaagggacaggtgaaatttactactttctaaagtttattgatacttcccttttatgtaaaatgtagtagtgatacctatatttaccacattgtgcattgtgacacactttgtctagggatgcctggaagtgtataaaattggactgcatttcttagagtgttttactatagatcagtctcatgggccatctcttcctcagatgtaaatgatatctggttaagtgttatatggccataaagtggacattttaaaactagcaaagttaaaaaaaaaaaaaaaaaaaaaaggcggccgct

SEQ ID NO: 1864 - DNA, 363 bp, Homo sapiens
  misc_feature (1)...(363): n = a,t,c or g
cataaaactgatgaccgtcatcatactgttgcagttagcacactttctcctgacataagtgcacagagcttcagtgtccaccaactgaccatgaaatagagtatgctgtaatcttaaggcataggttattagtgggaagagagtaataggttgctagtgtctgattatatggtagaaataatgcaaggaaaaaggtagccaccttctccattgaacagcagtacctgctgtttagcaaagactgatgagaagtagacnnnnnnnnnnnggnnnnnnnnnnnnnnnnnnnnnnnnnnnnnnnnnnnnnnnnnnnnnnnnnnnnnnnnnnnnnnnnnnnnnnnnnnnnnnnnnnnnnnnnccttg

SEQ ID NO: 1865 - DNA, 2904 bp, Homo sapiens
  SIMILAR (293)..(1261): 561254mologous to Homo sapiens FLJ00032 protein,accession number AK024442,Smith-Waterman Score=1022.
  misc_feature (1)...(2904): n = a,t,c or g
cagggacccttgaaattcatggatgcgggcatagaggttctctcaggatgagtggaaatgcctggaccctgcgcagaggactttatacagggacgtgatgttggagaattataggaacctggtctccctgggaatctgtcttcctgacctgagtgttacctccatgatagagcaaaagagagatccctggactctgcagagtgaagagaaaatagcaaacgatccagacggcagggagtgcatcaaaggtgtgaacacagagaggagctctaaattgggaagtaatgcaggaaacaagccttgtaaaaatcaacttggattcacttttcagttacatctgagtgatctacagctatttcaagctgaaaggaaaatttctgggtgtaagcattttgaaaaacccgtcagtgacaattcctcagtttcaccgcttgaaaaaatttcttccagtgtcaaatcccaccttttaaataaatatagaaataattttgatcatgctccattacttccacaagaacagaaagcacacattagggaaaaagcttataaatgtaatgagcacggccaagtctttagagcatctgcaagccttactaaccaagtaatccataacgcagataatccttacaaatgcagtgaatgtggcaaggtctttagttgcagttcaaagcttgtgatacatcgaagaatgcatactggagagaagccttacaaatgtcatgaatgtggcaagctcttcagtagcaattcaaacctttcacaacatcaaagaattcatactggagagaagccttacaaatgtcatgaatgtgacaaggtctttcgaagcagttcaaagcttgcacaacatcaaagaattcatactggagagaagccttacaaatgtcatgaatgtgacaaggtcttcaatcaaattgcacaccttgtacgacatcaaaaaattcatactggagagaaaccttacagttgtaataaatgtggcaaggtctttagtcgccattcatatctagcagaacatcaaacggttcatactggtgagaaaccttacaaatgtgaagaatgtggcaaagcattttcagtgcgttccagcctcataacccatcagttaattcacactggaaggaaaccttacaaatgtaaagaatgtgacaaggtctttgggcgcaagtgtttcctgacctctcatcagagaattcatactagagagagaccttatggatgcagtcagtgtggcaagatctttagtcagaaatcagacctttatacgacatcgaaaaactcatactgatgagaagccttacaatggtaataaatgtggcacagcgtttagagagttttcagaccttactgcccattttctaatccatagtggagagaaaccttatgaatgtaaagaatgtggcaaagtcttcaggtacaagtcttctctaaccagtcatcatagaattcatactgggagagaagccttaccaaatggtaacagatgtggcaaggtcttcagtcgcagttcaaacctggtatgccatcagaaaattcatacaggagaaaagccttacaaatgtaatcaatgtggcaaggtctttaatcaagcatcataccttacaagacatcaaataattcatactggagagaggccttacagatgtagtaaatgtggcaaagcatttcgagggtgttcaggccttactgcccatcttgcaatccatactgaaaagaaatctcatgagtgtaaagaatgtggcaagatcttcactcagaagtcttccctcaccaatcaccatagaattcacattggagagaaaccttacaaatgcaccctgtgcagttaaggtctttcagtcacaattctgaccttgcacagcttcagagggttccatcatgagggtccctacaaactgtgtatggcaaaaccatcatcatgagttctagcattaatcaacatcagtgagtccatactaagtggaaatcatataaatgaaatgtatgtgacacaggctttatcaaggcctgccaaatcactggacatcaccacatcactgtggaggatgaaagcacacagatgaattgtgtgtacttgggctattattcaaggaccattgctatagaacacgataggatttacacaagaagtaactctgtctctggttctctgatactaatctatgatattgcatgatgcagaataatgctaagtcaaaatatgttgaatctcatgacctgatgtatatcaaaggtgcaacggcttgtaaatgaccagttttattcaggctataaagcattcaattatttggggcttatagaaaaggctactttactctttgtgacttcgaaatcttttcatgtgccttccatacaggccattcactgtggtccctgggaaagaatcagtaggatgacagggctgacttcattagctgaggattatttctatccaatttcctgatgaaggacattgccttttgagattaaatattgtctgatttaaagagcatggaggtgggcagagtaacataaaactgatgatcgtcatcatactgttgcagttagcacactttctcctgacataagtgcacagagcttcagtgtccaccaactgaccatgaaatagagtatgctgtaatcttaaggcataggttattagtgggaagagagtaataggttgctagtgtctgattatatggtagaaataatgcaaggaaaaaggtagccaccttctccattgaacagcagtacctgctgtttagcaaagactgatgagaagtagacnnnnnnnnnnnggaaaaaaaagtttaatttttttccccagcctgaagttaaggggggtgttttgggttaattgccccttccccttcttggcttaagccgccctttttgcttaaccctcttaggaagctggaacactac

SEQ ID NO: 1866 - DNA, 769 bp, Homo sapiens
  SIMILAR (116)..(610): 431254mologous to Homo sapiens longest open reading frame,accession number X02490,Smith-Waterman Score=192.
  misc_feature (1)...(769): n = a,t,c or g
gggaaaagggaaggggctccattgagaacccatcccggttacccccgatcaccgcttggtcaccatgacccacattgttgcaaaccttctctcctgtcaacagcggcccaggcttcccaactacgagatgctcaaggaggagcaggaagtggctaagcctgggggcgccccaaaaaccgtgcttacccgaatgtccacctgtgatccactatccgcaacgagaacctcgtggcctgaccatgttcgtctggtccctgttcaaacaccctcttcatgaacacctgcttngcctgggcttcataagattcgccctactccgtgaaaagtctaagggacaggaaagatggttggcgaagtgaaccggggccccaaggcctaatgcctccaccgccaaagtgcctgaaaaatctggggccctgattttggggcatcttcatgaaccaattcttgctcatcaatcatccccccccaagttttgggtcgtcccaggcccagcgatagaatagagaggcatcattgaaggccaggagctctgcccgtgacctgtaatcccacgtactctaatcttccattcctcgccctgcccccagaggccaggaagttctgcccttgacctgtattccacttactccaccttccattcctcgccctgtccccacagccgagtcctgcatcagccctttatcctcacacgcttttctacaatggcattcaataaagtgtatatgtttctggtaaaaaaaaaaaaaaaaaaaaaaaaaaaagtttt

SEQ ID NO: 1867 - DNA, 2732 bp, Homo sapiens
  SIMILAR (1152)..(1601): 491254mologous to Homo sapiens nicotinamide N- methyltransferase,accession number U08021,Smith-Waterman Score=244.
ggcacgaggccagacactgggtcatggcagtggtcggtgaagctgcagttgcctagggcagggatggagagagagtctgggcatgaggagagggtctcgggatgtttggctggactagattttacagaaagccttatccaggcttttaaaattactctttccagacttcatctgagactccttcttcagccaacattccttagccctgaatacatttcctatcctcatctttcccttcttttttttcctttcttttacatgtttaaatttaaaccattcttcgtgaccccttttcttgggagattcatggcaagaacgagaagaatgatggtgcttgttaggggatgtcctgtctctctgaactttggggtcctatgcattaaataattttccctggacgagctcaagtgctccctctgggtctacaatccctggcggctggccttcatcccttgggcaagcattgcatacagctcatggccctccctctaccataccctccacccccgttcgcctaagctcccttctccgggaatttcatcatttcctagaacaagcccagaacatttggtggtctatttctctgttagtgtttaaccaaccatctgttctaaaagaagggctgaacttgattggaagggaatgcttgttagccctgagactcaggaagacaacgttcttgcagggtcactccctggcttctggaggaaagagaaggagggcagtgctccagtggtacagaagtgagacataatggaatcaggcttcacctccaaggacacctatctaagccattttaaccctcgggattacctagaaaaatattacaagtttggttctagggcactctgcagaaagccagattcttaagcaccttcttgaaaaatcttttcaaggatattctgcctaggacggtgttgaaggggagacctgcttgatttgacatcggcttctgggccccacttatcttatccagctcctcttcttgctttgtggaatccttttaagggaggatcgttcgttcactggactacttcaggacccaggaacctggcagggagcttgggaggaagtgggcttgaaggaaaggaggccagaggcctttttgactgggtccccccaatggtgacccctatgtgtttgaatcttgaaagggaaacagaagtcaaaggtcccagaagaaggaggaagaagttgaaaacaggcggtcaaagcaaggtgcctgaaaatgtgaatgtgaactcaaaagccaagccacttgggggccgtcccccttaccccccggctgaactgccgtgcctcaagcacacttgtgtttgggatgcccgccttgccccagacctccccaacctacttgcaagggcgcctcaggaacgctcggccagccctacctgaaacccagggggccttccctggtgatcatggatgcggctcaagagcagcctacctacatgattggtgagcagaagttctcccagcctcccccctgggccgggaggcagtaaaggcttgctgtgaaagaggctggctacacaatcgaatggtttgaggtgatctcgcaaagttattcttccaccatggccaacaaccgaaggacttttctccctggtggcgaggaagctgagcagacccctgtgatgcctgtgaccatcaattaaagcaattcctttgacctgtccagatgactttagtccttgtttctaactgccaagtcatgtgctgaagtagaggcctcagtgggtggggcccaatggttcatctaggacgggactagagaggtcagtctacaagcaatccattgaccacttacttggtgctgcacacaaatgttggtgctatgggacccaaagatgagcaattagtattccagtcttcattgcctgtgcttacaaaagaagacctcacttggctaaacatctagttatggcgggtcaagcccgtacctgcctacagagaagggtctgcagttactcactattagtttcctaagggggcactgctggctccttctctcccaggaaagggcttctcctattctttaactcttgccttctccctggagaggctaccaaaccctggcctctgccgctgttcaggctgccatgtgggtatagctgtttgctagactccactctggcctcaggggccagagaacagctgtccagcatttctgttcatcccagcaatccaaaaaaaaatttttttaagctacaaagatcactccattttcaaattcagactctgccacttattagctgtttctcattaggcaagttatataaccttgcagtgcctcactttcctcatctataaaatgagattaaaatagtctttttattaagagaattaaagtgaattgtgggccagggcactgtgggcttcatgcctgtaaatcccagcgctttggggaggctgaggcaggacaggatttgcttggggcttcaggaagtttcgagactggcctggggggaacatggcaaaaaccctgttcttgttatttaaaaaatacaaaaaaattagctaggtgtggcggcatatgcctgtggtcgcgcgagctactcaggaggctgaagtgggaggatggcttgagcccgggaggcggaggttgcaatgaactgagatcgcaccactgtgttccagacagagtgcgatgctgtctcgaaaaaagtaaaataataaataaataataaataaaataaaataaagtgaattgttacatgtaaaggaaaaaa

SEQ ID NO: 1868 - DNA, 1540 bp, Homo sapiens
  SIMILAR (1)..(1380): 991254mologous to Homo sapiens MAGUK protein VAM-1,accession number AF162130,Smith-Waterman Score=2370.
atggagaatcctattgtaaaatcacttgctaaggctcgtgagaggctagaagattccaaactagaagctgtcagtgacaataacttggaattagtcaatgaaattcttgaagacatcactcctctaataaatgtggatgaaaatgtggcagaattggttggtatactcaaagaacctcacttccagtcactgttggaggcccatgatattgtggcatcaaagtgttatgattcacctccatcaagcccagaaatgaataattcttctatcaataatcagttattaccagtagatgccattcgtattcttggtattcacaaaagagctggggaaccactgggtgtgacatttagggttgaaaataatgatctggtaattgcccgaatcctccatgggggaatgatagatcgacaaggtctacttcatgtgggagatataattaaagaagtcaatggccatgaggttggaaataatccaaaggaattacaagaattactgaaaaatattagtggaagtgtcaccctaaaaatcttaccaagttatagagataccattactcctcaacaggtatttgtgaagtgtcattttgattataatccatacaatgacaacctaataccttgcaaagaagcaggattgaagttttccaaaggagagattcttcagattgtaaatagagaagatccaaattggtggcaggctagccatgtaaaagagggaggaagcgctggtctcattccaagccagttcctggaagagaagagaaaggcatttgttagaagagactgggacaattcaggacctttttgtggaactataagtagcaaaaaaaagaaaaagatgatgtatctcacaaccagaaatgcagaatttgatcgtcatgaaatccagatatatgaggaggtagccaaaatgcctcccttccagagaaaaacattagtattgataggagctcaaggtgtaggccgaagaagcttgaaaaacaggttcatagtattgaatcccactagatttggaactacggtgccatttacttcacggaaaccaagggaagatgaaaaagatggccaggcatataagtttgtgtcacgatctgagatggaagcagatattaaagctggaaagtatttggaacatggggaatatgaaggaaatctctatggaaccaaaattgattctattcttgaggttgtccaaactggacggacttgcattctggatgtcaacccacaagcactgaaagtattgaggacatcagagtttatgccctatgtggtatttattgcggctccggagctagagacgttacgtgccatgcacaaggctgtggtggatgcaggaatcactaccaagcttctgaccgactctgacttgaaggaaaacagtggatgaaagtgcacggattcagagagcatacaaccactattttgatttgatcatcataaatgataatctagacaaagcctttgaaaaactgcaaactgccatagagaaactgagaatggaaccacagtgggtcccaatcagctgggtttactga

SEQ ID NO: 1869 - DNA, 2017 bp, Homo sapiens
  SIMILAR (142)..(1311): 941254mologous to Homo sapiens MAGUK protein VAM-1,accession number AF162130,Smith-Waterman Score=1927.
gaattcgttctcaactacgagccacgagtttgcagatggggctgctcggcggcgcctgtggctgagggagagcagcggcggcggggagcgaccgggagcggcggcagcggcggcgcggaggcggctgaggtgcgagccgcaatgcagcaagtcttggaaaaccttacggagctgccctcgtctactggagcagaagaaatagacctaattttcctcaagggaattatggagaatcctattgtaaaatcacttgctaaggctcatgagaggctagaagattccaaactagaagctgtcagtgacaataacttggaattagtcaatgaaattcttgaagacatcactcctctaataaatgtggatgaaaatgtggcagaattggttggtatactcaaagaacctcacttccagtcactgttggaggcccatgatattgtggcatcaaagtgttatgattcacctccatcaagcccagaaatgaataattcttctatcaataatcagttattaccagtagatgccattcgtattcttggtattcacaaaagagctggggaaccactgggtgtgacatttagggttgaaaataatgatctggtaattgcccgaatcctccatgggggaatgatagatcgacaaggtctacttcatgtgggagatataattaaagaagtcaatggccatgaggttggaaataatccaaaggaattacaagaattactgaaaaatattagtggaagtgtcaccctaaaaatcttaccaagttatagagataccattactcctcaacaggtatttgtgaagtgtcattttgattataatccatacaatgacaacctaataccttgcaaagaagcaggattgaagttttccaaaggagagattcttcagattgtaaatagagaagatccaaattggtggcaggctagccatgtaaaagagggaggaagcgctggtctcattccaagccagttcctggaagagaagagaaaggcatttgttagaagagactgggacaattcaggtgatgagctcgacacaataaaatttgatcgtcatgaaatccagatatatgaggaggtagccaaaatgcctcccttccagagaaaaacattagtattgataggagctcaaggtgtaggccgaagaagcttgaaaaacaggttcatagtattgaatcccactagatttggaactacggtgccatttacttcacggaaaccaagggaagatgaaaaagatggccaggcatataagtttgtgtcacgatctgagatgaaagcagatataagagctggaaagtatttggaacaatggggaatatgaaggaaatctctatggaaccaaaattgattctattcttgaggttgtccaaactggacggacttgcattctggatgtcaacccacaagcactgaaagtattgaggacatcagagtttatgccctatgtggtatttattgcggctccggagctagagacgttacgtgcccatgcaccaaggctgtggtggatgcaggaatccaccaccccaggctctgaccgaactctgacttgaagaaaacagtggatgaaagtgcacggattcagagagcatacaaccactattttgatttggatccatccataaatgataatcctagaccaaagccctttgaaaaacctgcaaactgcccatagagaaacctgagaatggacccccacagtgggtcccccaatcagcctgggtttacctgatgattcagtaaggtttaccaatgaaaattaaactcttaaaaagtgacctgcaacaaataaaccttcctacctgagaaaatacatcacagatagaagattatctgcctaagtcccaggcatttttatggtgtagattgaaataatagtacacttctgaatttttatataaaatgtggttggaaggtgtactaatatataatttatcttaatttttctaactttgtatggataatctttctattcatatcacataaagaaatgcgttgaagcaaaaaaaaaa

SEQ ID NO: 1870 - DNA, 2353 bp, Homo sapiens
  SIMILAR (17)..(244): 901254mologous to Mus musculus pancreatitis-induced protein 49,accession number AF332189,Smith-Waterman Score=371.
  misc_feature (1)...(2353): n = a,t,c or g
gcggccgcccttccacccctggttgcgcccactgctgccgcctgccctgcagggtgctctccagcagtggctggggcctgcgtggccttggcgggccaagatcgccagcggcctgctggagttcgtggaggagctcttccacggctcttacgggactttctacatgtgtgagaccacactggccaacgtgggctacacagccacctacgacttcaagatggccgacctgcagcaggtggcaccccgaggccaccgtgcgccgcttcctgcagggccgccgctgcgagcacagcaccgactgcacctacgggcgcgactgcagggccccgtgtgacaggctcatgaggcagtgcaagggcgacctcatccagcccaacctggccaaggtgtgcgcactgctacggggctacctgctgcctggcgcgcccgccgacctccgcgaggagctgggcaacaacaagtgcgcaccttgtaccacgctgagcgggctggccagcccaggtggaggcccaatcactcgctggtgctcagccacctcaagactctgctctggaagaagatctccaacacccaagtacttcttgatggggcagtgaggggcctggccacccttccctggagctggcccaggtgcccagggtccaaccctccctcaaggaatcctgtcagaagatgtgaaatgcaactgtgttgcaaaatcactcccctaccgtcagggctctggattccagcaccacagacattgagaccccagctcggagcaaaggcggacatggacatcccggcaggagagtcctccaagggggtttgttactctgaagaacgtaatgtcaataaacagcttttatgtaatgcccagggctgagcaccctgagcccccatcgatgctgtgtgtgggacccttcgccccgctgtggatccacccagcccaggcactcaggctggggttgagcccctgaatccttcctggcgaggcagccctcaggtgttagtccaaggtgaggtctattgcagagctgcctgcccttcaacccacacacacctctgaagccgccagggcagttccccaaacacagcggcttctgaaacagtcaatgaccagtaccccccaaacctgggctgtgcacaacagaccaagaaaaaggtgttccagtaagaaaacagatatatgcggtattttaaaaactgattttacaaaatccagccatgagatgtacaactcattccctaggaaacagcccaggaatggccatcttctccagccccgtacgctctccccagtagcccagggcacccagcaaccatcccctaggagaacaggcaaggaccctcgtgggaagatcccaccacagcaacacctttcttcaaggcgggctctgctccgcaatgtgtgagtcaagacaatccattccattcaagaccaatttactctcaaattttgccaacacagaaatattatccttaaagaaatgtgcatttaaatcttttaattcacttcatcctgtattttaaaataaatgttttccatatagattttccccttgggggggaaaagaattcaggggtcttagggttccaggcagttcaaaaacagccacgcggttctttttttctccaccagaataccacaatagcagaacttaagaatcgggatatgaaaagggaggcgtggtcctggcagtggcccctggccggcaggagatacacagcaacacccaagcaaggggaaggggttgcccccattgccagcctgcccatccctgtaatgacagcagggcaggagatgcagctgtggccctgggggaaggttgggctcttgaggctgcaaacaccctgagtgccagtggtcccaaaggggggtgaggcctctatctgtacctttattccagccagcctcctggcacaggggctgggcccacatcctgggcctctgcatctggatcaggggcgggtgcttgtcagcctgggtcactctgggcagtgttcacactggaagtccatcacaggcgaagtcacctccttcccgtgttaaataacaagaatgccaacaccccacgcacgtgtcatctccagtgagcagacgtccaggcttcccgaagcttcctggctggaaaccgcgcagggccggcagcgccctctccaccaagggacacaccagcggcgcctcctccgcggcccgggcccccatcccncggctcgctcgnccaggacgccccaggtcggagcctgcccccaccccgcacccggaggccagcagcccagtcccctaggccgcgcagcgccagcgagagcgaggctgcacggcgaggcccggtgaggcgctcgagaactggccgggaggagaagtcaggcg

SEQ ID NO: 1871 - DNA, 747 bp, Homo sapiens
  misc_feature (1)...(747): n = a,t,c or g
cgtatgcgggtagtttgccaccttataccccttaaaaatttttattttccccaaagcctttaacccttggagggaggtgggcccactatgtcccccccccaaagtaagggtccctccccaaaatccccaggttgggtttaaatcggccccctatagggaaaaaactaattccttgcaagccccggttaacttgggcccccccaaggattctttaaaacggcccccccnnnnnnnnnnnnnnngacaggcttaattttactgcagaaacgggttggctgaagggaacaggccagcgaggtgggctcaggacacccccaacagccaggatgggggcacggcaggatctggcgcccagaagtcagagggaggcccaggaaatttgcgccagttttcctgccttgtggctgcctgaggagccctcactcccagttctgtgggtgcccagggtcacccagagttcaagtcagggctgtgccaagcctgcgagcccccacaaagacggagcaggcggaatagggtggcagctcacagccctgaacatacagggggattcctgcggccccacatgggcacagccttctcacagcacccctcaacacgcacagcggtgggcttgtgggaggtgctggtggtggcactgtctcagctcctggtggcctctggcacgggctctggccctacacgtctgtgctcctggccctgaagatggatgctggggtgggatgggcaggcattgggggccgagag

SEQ ID NO: 1872 - DNA, 1059 bp, Homo sapiens
  SIMILAR (240)..(938): 301254mologous to Herpesvirus papio NTR,accession number AF200364,Smith-Waterman Score=169.
ctacggcgcggtttccgcggcagagacatgttttccggtcgtccttggctcgattttcttccggggcgggacttcctttccatcattgataggcgcgggcagctgagctgaggctctccgcttcctctttccccccccaggtccgccccccagcgtcccgtggccatgacgaccgctcagagggactccctgttgtggaagctcgcggggttgctgcgggagtccggtgagtggacttccggttggctgggctcggacctcggacgaggtgggggtggtgctttcagccaggatgacattgaaggtgatggcctcatgccgggtctcacacacatactccccggcgtcctcaggctgggcgtggggcagggtcagggtgcgggtgggcccctcggcacccagctgcagggcatctgatgcctccacttccagcccgtccttgtaccagcgcacctgtgacagtgacagtgaagaaggccgagtcatctccagcatcacatacaaactcgcccccgtcctcgggctgagcagcaggtagcaccaggcgcagcgtggcccatccctctccagcaccagggcctcgctctcctccacttccagcccatccttgtaccagcgcacaggggcatcctcccgagacagttcacacatcagcaccacacactccaaggtcacggcgatcaaggtcacctcatcgcgagggtatatgatccgcactgggggttcttccgtgtgggagtccccctcagctgtcaccctccactgcaccagaacgcccatcaggctgagcaggggccagagtgccagcagggccccagcaggcagcagtgcgagcagcaggccgagcagcagccccaccaggaagaggcccacgctgcgcactagcatggccaccagcccgcagagcagcccgatgcccagagcgatgcccgcgctcgccccagcactcagctgtgtctctagcacccgctctcggtagcagaggaggaagatgaccaccgagccaaacagcaacccagtgagaaagagcactgccttgaagcagcggtaaccctccat

SEQ ID NO: 1873 - DNA, 547 bp, Homo sapiens
  SIMILAR (71)..(547): 821254mologous to Mus musculus putative,accession number AK004757,Smith-Waterman Score=668.
cgccgggcagctgagctggtaggaggaccagacggggatgttcggctccgccccccagcgtcccgtggccatgacgaccgctcagagggactccctgttgtggaagctcgcggggttgctgcgggagtccggggatgtggtcctgtctggctgtagcaccctgagcctgctgactcccacactgcaacagctgaaccacgtatttgagctgcacctggggccatggggccctggccagacaggctttgtggctctgccctcccatcctgccgactcccctgttattcttcagcttcagtttctcttcgatgtgctgcagaaaacactttcactcaagctgggccatgttgctgggcctggccccacagggcccatcaagattttccccttcaaatcccctttcggcacctggaagctccgaggtgttcccctccactgtctgcatggcctccgaggcatctactcccagctggagaccctgatttgcagcaggagcctccaggcattagaggagctcctctcagcctgcggcggcgacttctgctct

SEQ ID NO: 1874 - DNA, 468 bp, Homo sapiens
  SIMILAR (2)..(166): 831254mologous to Homo sapiens prothymosin alpha,accession number M26708,Smith-Waterman Score=240.
  misc_feature (1)...(468): n = a,t,c or g
gaaaagggaagaaggtggggaggaaaaggaggaggaaaaagaaggtgatggtgaggaagaggatggagatgaaaatgaggaagctgagtcagctacgggcaagcgggcagctgaagatgatgaggatgncgatgtcgataccaagaagcagaaggccgcgagggattgnctagcagccaaaaaaggaaaagttaaactaaaaaaaaaaaggccgccgtgacctattcaccctccacttcccgtctcagaatctaaacgtggtcaccttcgagtagagagggccgccctttttttttttttttttttttttttttttttttttttttttggtatatattgttagggtcagccatttttaatgatctcggatgaccaaaccagccttcggagcgttctctgtcctacttctgactttacttgtggtgtgaccatgttcattataatctcaaaggagaaaaaaaaccttgt

SEQ ID NO: 1875 - DNA, 427 bp, Homo sapiens
  SIMILAR (204)..(419): 1001254mologous to Homo sapiens prothymosin alpha1,accession number M14630,Smith-Waterman Score=377.
aagcccttgtcctggggcagttaatgtgcaggtttcatgatggagcctggagggtgttgactggagaagggtctctggggtgggcttggcttggctgggctgtagatgcagccgccagcctctggtgggaggccgggcatcaggagcaacgctctgtccagcctggggccagctggtaatgacatggcctgttttctgtcgaggagaatgaggaaaatggggagcaggaggctgacaatgaggtagacgaagaagaggaagaaggtggggaggaagaggaggaggaagaagaaggtgatggtgaggaagaggatggagatgaagatgaggaagctgagtcagctacgggcaagcgggcagctgaagatgatgaggatgacgatgtcgataccaagaagcagaagaccgacgaggatgactagacagc

SEQ ID NO: 1876 - DNA, 1458 bp, Homo sapiens
  misc_feature (1)...(1458): n = a,t,c or g
cccccccccgccccactggctgctctgaaaagccatctttgcattgttccttcatccgccttccttgctcggccgcaagccgcctccgccgcgcgccttcctccgccgccgcggactccggcagctttatcgcccagagtccctgaactctcgctttctttttaatcccctgcatcggatcaccggcgtgccccaccatgtcagacgcagccggtagacaccagctccgaaatcaccaccaaggactttaaaggagaagaaggaagttgtgggaagaggcagaaaatgggaagaagaccgcccttgcttaacggggaatgctgagaatgagggaaaatgggggagcaggaggcttgacaattgaggtaggacgaagaaggagggaaggaaggttggggagggaaggagggagggagggaaggaaggaaggttgattggttgaggaagaggatgggagattgaagattgaggaagctgagtcagctacgggcaagcgggcaactgaaagatgatgaggatgacgattgtcgataccaaagaagcagaagacccgacgaggatgacttagacagcaaaaaagcgaaaagttaaactaaaaaaaaaaaaggccgccgtgaccgtattcacccgtccacttcccgtctcagaatctaaacgttggtcaccttccgagtagagaggcccgcccgcccacccgtgggcagtgcccaccccgcagatgacaacggcgctctccaccacccaaacccaaaccatgagaatttgcaaccgggggaggaaaaaagaaccaaaaacttcccagggccccggctttttttcttaaaaggtactttaaaaaggggaaatttggtttgtatttttttattttacattttatattttttggtacataattgttaaggggtcagccaattttttaaatgattctcggatgaccaaaaccaagccttccggagcgtttctccttgtcctactttctggaccttttacttgtgggtgtggaccatgttcattattaatctcaaaggagaaaaaaaaaaaccttgtaaaaaaaagcaaaaatggaccaacagaaaaacaatctttattccggaggcattccagtaacttttttgtgtatggtacttagccggtactataagtagttgggtttgtatggagatgggttaaaaaggccaaagataaaaagatttttttttttccttttctttctgtctatgaagttgctgtttatttttttttggcctgttttgatgtatgttttgaaacaatgttgtccaacaataaacaggaattttattttggctgaatttgttctaacnnnnnnnnnnnnnnnngggggggccgttttaaaggatcctttggggggcccaagtttacgcgggcatgcaaggccatagttttctccttatagggaggcgaattataagctatctggggatttttgggaaggaactg

SEQ ID NO: 1877 - DNA, 381 bp, Homo sapiens
agcggccgcccttttttttttttttttttttttttttttttttttagtgtaaaggttttttaattgggtatatgtagcattagacaaaattatttaaagtcaataaattgttattcgaggaattccatgttgggatttcttccactgtccatcaagggcactttagatcctttaaagagctggagtcaaaagatttatcttcaagtttgcccataattactttggcttctgtcatctcgttttaatatggatatactgatgaagacttcaaaattcacctttttactgtaggtggtggggatctacctggttctcaatttgacaccctctcaacatgaatgagttcaaatcacattcattcctttgacattcatgatcctg

SEQ ID NO: 1878 - DNA, 444 bp, Homo sapiens
  SIMILAR (444)..(262): 1001254mologous to Homo sapiens unnamed protein product,accession number AK027016,Smith-Waterman Score=304.
tagtgtaaaggttttttaattgtgtatatgtagcattagacaaaattatttaaagtcaataaattgttattcgaggaattccatgttgtgatttcttccactgtccatcaaggtcactttagatcctctaaagagctggagtcaaaagatttatcttcaagtttgccctttttaatgaaactgatccagttgtcctgtcagccctttaactccagacaccatgttctcaagaaaaagcctttgacattcatgatcctgtcacattttcaggcctctctgtccagtatttttggcttttgtagctctctttttagacaaagcagcttcttcagtaatatcctcttcttctaagtatacactcagtcttacagggaattcagaacttactatgaaactatcccctgccaatttgatatcacattcgttatcttcaagatgtgttgc

SEQ ID NO: 1879 - DNA, 408 bp, Homo sapiens
gagggatagttctgatttttcatgccttgggaagaatctcttgcttcaatgctaaaaatacttggtagatcagcatgctggctctcctcctgtgaagaatattctggctgaagctgttcaaaacattgttcagatcctgcattaagaaattcaaaaatcagttaatcatcgttacatgttgtaaaagttggatactgacagtctctaatagtttatcatccaattgcaagtaacctacaattttaggcataaaagttgatgtgtataaacatgaatacaaagataaggatggtcacagtgatttctcaaactacagctcacaccaagtattttttctttttctattaatatttaataaggacaatatggctataaactgaggatgttttcctctataagaactgaata

SEQ ID NO: 1880 - DNA, 202 bp, Homo sapiens
gtggggattgcaggcttgacccattgcacctggcctggaaccaacctttatggctatcaatactcccatcaatcaactgtctcaggtatcataatatcccttcttatatgtatcaaaactcatactgaacaatgagttctgggttgcaaaagaggatttattttttgcacctatctgtaagtctttgtccacgttaaacaaa

SEQ ID NO: 1881 - DNA, 385 bp, Homo sapiens
  SIMILAR (182)..(325): 911254mologous to Homo sapiens Human secreted protein, SEQ ID NO: 7352,accession number AAG03271,Smith-Waterman Score=242.
gaacgattgggctgagcagaggacgacatgttgcttttcgtggagatgacaaatccgagccccagaggttaaagtaactttacttagtaaaagtaaagtagtttaactgggatttagatccaggtcatgctgatgtcaaatcatggacggtatgttagcaattcaggcctggccgactccccagcaggtagcatctaatggaactggtttaaatcctaatgccaaagtatggcaagaaattgctcctggaaatactgatgccaccccagtaactcatggaactgaaagctcttggcatgaaatagcagctacatcaggtgctcatcctgagggtaatgcagagctctcagaagatatatgtaaagaatatgaagtaatgtattct

SEQ ID NO: 1882 - DNA, 3780 bp, Homo sapiens
  SIMILAR (3225)..(787): 231254mologous to Plasmodium falciparum liver stage antigen,accession number X56203,Smith-Waterman Score=284.
ctacaaataccgctcattatttagttcactgtttgcatagggtttcctatggctgctataccaaattaccacaagttgatggcttagaacaacagaacttcttctctcacagttctggaagctggaaagaagttgcagatcaaggtgttggcagggccagcctccctccagaggctccaggggagaacccgttccttgccgcttcagccctggtggctgctggcattccttgacttgcagctgcgtgactctagtctctgcctctgtggccaccttgccttcttttttgtcagtgtcacatctccctctgcttccctcccaatcttttcctttgtgccctgaatccagctggggggttgtgcttgccatgtgctgtgggaaaaagttaaggaggtggccaaatccccttgtaacctctgcaattaacttgtacaaaatatgggcagttttgacatagtggagagtacatgatcttcggcagactctaaatgcacactgaccatagggaagcctgctaagtccagagttcagctttgccacaaagaggaaacttttccgaaccaaaccaatgcttatcgtacatgtgttgattgatgtctcatgtctcccactttgcttggcactagtatcttctgaagccaaatgattatcatcagagttgttcctatctgcatgcctaatattttcttgatcatttcctgctaggtcttgtgtattaggaaaccagtctctgagctgccccatcttctgggtttttaaatcattttcaactgtgggcttacttatctgactgtctttaaagaaatccttcaaagtctcttcatgtttctgtatctgctgctgcaatgctgtttgtctctgtacaagcaatttttcctgggctttctggctataatgcagaacttctctttgtagatccaactgtttctgaagtcccaagttatcttgctgggatacaaatgaagaggagcaaacttgttcagatgatacccttttctccaattcacttaatctttgcaaaagcaattcttcttggacttcctgtatagatcgaatggctttcttctgtgtatctaactgctgttgaagtgcctgcaaatcaccatggtgagactggataaaatgctcagaagataccttttcctcaaatttacatggttttgacaaaaccaattctttctgggttttctcaatagaaggaaggaaatctgtctgtgcatgcaagtgttcttcaagtgcaatcaaattatcttgttgaggtaaaacaagatgtgataaacccaacagcccatcaggcaatgttggtatctctgagtgacctgaggatactatattatcactgttaattgaacatggttcttggtttctttcagattcattaagaggtaatgaggcgaatgaatgctgtggtactaggggtaaggaagaggtgtcaacctgctcgggagatattcttccctcccattcactctgatgtaaaagtaattcttcccgagcttcttgtctagctagaatgatggcttctctctgtgtagctaactgttcttgaagtgccttcaaattatcttgttgaggctggataagttgcgatatcctcaaaagcctatcctgcaattgtgggatctgaaggtggcttgaaaaaattttactttcactctctgtaaaaagaggttccaggattgtgccagactcagctgaagctaacgaagtaaatgaaagctgtaccaactggggtatgaatgaagatgaaccagtttgttcagaagatgtattttcttgggttttctggctgaaatgaaaggcttctttctcagtgtctagccatgcttggtgttcctccaaattatcttgtagaggtagcatatgttgtgaaactctcaaaagtctttcctgacatcttgggatcttaggatggcttaagggaatggtactgtcactcttgattgatatacattcctggaatctctcagattcatccacattctccttctcagataaataaagctcctgaattctcctaggctcagctttagcagaagcttgtgaagcaactgaatgctgaacaaccactggtgaggatgaagagctcaccagcccagacttactgtcccccaaatctctttgtctatgtaaaagtaattccacctgagcttcatgcctagcctgaagagtatccctctgtttagtcaactgttcttggagcaacttcaaactatcatgtagaggtaggaactgctgtaggaaactcaaagacccatcctgagatatggggatgtcagattggcatgaaacaagtcctttctcgctcttagatgaatgttgctcctgtatttttccagattttgtatcagcagatggtagtgaagtaaatgtatgctgagctacctgaaatgggaaagagggctcagcctgttcggaacatactcttctatccaattcactctgtttatgtacatacaatacttcctgggcttctcgcctagcctgaaggctatccttctgaatattcaactgctcttggagaaatttaaaattattttgctgtgataggataggctgtgaaagactcaaacgcttatcctgaagttgtgagatcacatgatggtctgaggaaactgcaatattattcttggttggtgaagattcctggattctccccaaatctgctttggcagaaggcaataaagcagatgaatctggagttaccaagggaaggaataccgagaggcccgtttgctgttccacttctttctgtttgcacaaaagcaactgttcctgagcttcctgagttgcctgaagaactttcttctgtaggtctaactgttcttggagggccttcatattaccttgctgggctgtgatattctctgacggcagcaaaggcctatcatgcatttggctgattatagaatggcttgtggaaactgtacttttgctcatggctgaaaagggttcttgaatttttcctgactcaactttaacaggcagagaactaaaagaatgcaaatgatttatgtagtgatgagattttctgcatcctaccccagtcggttgagttttttttcttttttcttcttccagctgagccctgaagcagtcagtttctaatcttaatttctgctgttcaatttgttcaagtaattccaattgcttttgcttctgctcttctatttccattatctgtttctgccttgctgacattctaatcctggctgctgcttcttgaggatgaagtagaactgaactctgagctacagttgtgataggcagagtctcatttatttcttgttcttttccagagtttgtaccacacgaaagtggtttatcttcactagcaagtggtccagactcaattgttagtgtatcactttcaacaactggttttaacttcatatcgctgacagaggcactgaagaggatagcaaagacagtcttgaaatgccaacaccacccttccctcatctccaggcagtggccacatggtgcggagagagaatctgtatgcttgggggaaggagagctcagccattctgggactttgcattggaactcagtgtggccagcaccaagtagaactctgccagtgcccttaggtgtttctcctaatgctatccctcccacgtcctcccaccccacgacaggccccagtttgtgatgttccccaccctgtgtccaagtgttctcattgttcagttcccacctatgagtgagaacatgtggtgtttggttttctgtccttgtgatagtttgctcagaatgatggtttccagcttcatccat

SEQ ID NO: 1883 - DNA, 659 bp, Homo sapiens
aactctactacaaactgcttggttattagcaacccacaagggttacaatataaaggcaaagcaaatttgcatgattcaagagatctaggagaattttcaaatctcactgattttaaagaaaaatcacatgtggttcacattttatttgtattgcatttctattacagttaatcaactgttcccaataagctgattgctagcaaagtagcagatagaaaacctactgggaaatttttttatggtcatgtccacagcaaatgagaaactgcattctaaaagccttggtaatgaccattacacccttgagcaaataacttatagttaagataaaaaccattacttgccataattactttggcttctgtcatctcgttttaatatggatatactgatgaagacttcaaaattcacctgtggaaaaatgtgtatttcaaatttatatttactattaagtacagaaatctatctttcaagaatgaggttgcttaggttccaaagtatcctgaaacccggcaccccaagtaaggtattgaaaattctatgcttaaaatagctatttaaactaataggtatttttaaaaatcaatgatcccatgcccattcatatccgaatttgctctatgcggacgcgtgggcgaacgcgtgggcggacgcgtggg

SEQ ID NO: 1884 - DNA, 5598 bp, Homo sapiens
  SIMILAR (1573)..(1776): 1001254mologous to Homo sapiens Human secreted protein, SEQ ID NO: 6754,accession number AAG02673,Smith-Waterman Score=359.
atgggatcccaggaaggcgccttgttgcgaacgcaggtacggctcgcgtttctcaggctccgcaggccgtgggccctgcccgcggtcgggctggcggctgtaaggagtgtccggaccagacccgaactgtcatacataaagtacacagaaatgaagagaaaagtcgtgaatactcacaagctgagattgagtcctaatgaggaagccttcattttgaaggaagattatgaaagaaggcgaaaactaagattgctacaggttcgagaacaagaaagagatatcgccttacagataagagaagacataaaacagaggagaaatcaacaatttacacgtttggcagaggagctaagggcagaatgggaagaatcacaaactcagaaaatacagaacttggaaaaactgtatttggcaagtttaagaagtatgggagagggacatcgacaggccaaagaaaataatcaggagaaactaatgaaagaactcaaacagctacagcaagaggacctggcacgtaggagacagactgtagcacaaatgccaccacaactagttgaacttccatacaaacgcagtgaaatgaaagaagactggcagagagaattggaatttgcctttgaagatatgtacaatgcagacaggaaggtgaaagggaatctgattctgcaccttgaaccagagcccttgcccactgtgactaatcagatccaagatgaagagctggacctttcaatggaacaagaaaatttgggtgcagctgaagaccttccagtgacagaagctgaaatatgttctagtgaaacagatgttcccttggtaatgaagacccaacagattccttcaaaagttctttttaaaaaattattaaataagatccgaagccaaaaatctctctggacaattaaatctatgtctgaggatgaaagtgaaatgattacgactgttagtgaaattgagagtaaagcaccaacggttgagtcaggaacaattgccagcaaagagagaacgttatcctctgggcaggaacaagttgttgaaagtgatacactaacaattgagtctggaccacttgctagtgaagataaaccactttcgtgtggtacaaactctggaaaagaacaagaaataaatgagactctgcctatcacaactgtagctcagagttcagttctacttcatcctcaagaagcagcagccaggattagaatgtcagcaaggcagaaacagtattttgttacctagataatggaaatagaagagcagaagccaaagcaattggaattacttgaacaaattgaacagcagaaattaagattagaaactgactgcttcagggctcagctggaagaagaaaaaagaaaaaaaactcaaccgactggggtaggatgcagaaaatctcatcactacataaatcatttggttggcattgctccagcatcatgccctgtaatttctgatgaagatagtcataggcagatgattcgtaactatcaacatcagcttttacaacaaaacaggttacacaggcagtctgttgaaacagccaggaaacaattacttgaatatcaaactatgttaaaaggaaggtgcccatcggtgtcagctccatcattgataactgattctgttatatcagtgccatcatggaaatctgagagaccgactgctatatcagagcattgggatcaaggtcagagactcaagttgagtcctaacaaataccaacccatacaacctatacagacctccaaattagaacaagatcattttcaggtagcgagacaaaatcactttccacaaagacaggtggaaacaacagaaacattacgcgcttcagatattttaaccaatcaagctttagaatcacaagaacatctaaggcaattctctcagactgaaacacaacagagagactataaattggtccccaaagattctgagacactttcaagggctttgtcacatgacaggcagctaatatcacaggatgctagaaaaatatctgaaacatttggggcaacaacttttcaaagtttagaatcccaacaattgttctcagagaatagtgaaaatatatcttaccatttaactgaaccttcttcatttgtaccactggtacctcagcattcttttagttctctgcctgttaaagttgagtcaggaaaaattcaagaacccttttcagccatgagcaaaagtacagtttccacaagccattctataatcagccaaatgcatgataggcctttgctgccgtcagagaatatcacagcccagcaaggtaatatgaaggccctccaagaacagttagacctacagaagaaagttcttcaggcaactcaggaagctcaggaacagttgcttttgtgcaaacagaaagaagtggaacagcaaacgggcctctcggtattccttcccttggtaactccagattcatctgctttattgccttctgccaaagcagatttggggagaatccaggaatcttcaccaaccaagaataatattgcagtttcctcagaccatcatgtgatctcacaacttcaggataagcgtttgagtctttcacagcctatcctatcacagcaaaataattttaaatttctccaagagcagttgaatattcagaaggatagccttcaggctaggcgagaagcccaggaagtattgtatgtacataaacagagtgaattggatagaagagtatgttccgaacaggctgagccctctttcccatttcaggtagctcagcatacatttacttcactaccatctgctgatacaaaatctggaaaaatacaggagcaacattcatctaagagcgagaaaggacttgtttcatgccaatctgacatccccatatctcaggatgggtctttgagtttcctacagcagttcctacctctacatgatagtttgaagttgctccaagaacagttgactaaacagagggatactcttcaggctaggcatgaagctcaggtggaattacttttacatagacaaagagatttgggggacagtaagtctgggctggtgagctcttcatcctcaccagtggttgttcagcattcagttgcttcacaagcttctgctaaagctgagcctaggagaattcaggagctttatttatctgagaaggagaatgtaggtccctcctgtcatttgataatcccaacatttcaggataagtctcttagttttccacagcatagcctggcacagcaagaaaatttgacaatactccaagaacagtcacaaatacaaagggtaatacttggtgctaaagaaggaactcaggaatttgtacacacagaaagtgaattggagaaaagaatttcttctgaacagactggcacctcctcatccctttcccaggtggatgaatctgagagattccaggaatgtatatcaatcaagagtgacagtaccattcccttaagccatcctaagatcccaagatgtcaggaaagacttttgagagtttcacaacatatgctacctctacaagataatttggaggaacaccaagcatggctagacactgagaaagaagcctttcatttcagccagaaaacccaagaaaatacatcttctgaacaaactggttcatcttcattcataccccagttggtacagctttcatttacttcgttagcttcagctgagtctggcacaatcctggaacctctttttacagagagtgaaagtaaaattttttcaagccaccttcagatcccacaattgcaggataggcttttgaggatatcgcaacttatccagcctcaacaagataatttgaaggcacttcaagaacagttagctacacagagagaagccatcattctagctagacaagaagctcgggaagaattacttttacatcagagtgaatgggagggaagaatatctcccgagcaggttgacacctcttccttacccctagtaccacagcattcattcgcctcattacctcttaatgaatctgaaagaaaccaagaaccatgttcaattaacagtgataatatagtatcctcaggtcactcagagataccaacattgcctgatgggctgttgggtttatcacatcttgttttacctcaacaagataatttgattgcacttgaagaacacttgcatgcacagacagatttccttccttctattgagaaaacccagaaagaattggttttgtcaaaaccatgtaaatttgaggaaaaggtatcttctgagcattttatccagtctcaccatggtgatttgcaggcacttcaacagcagttagatacacagaagaaagccattcgatctatacaggaagtccaagaagaattgcttttgcaaagattaagtgaattggagaaaagggtatcatctgaacaagtttgctcctcttcatttgtatcccaggtgcctgttgctgactctgaaagaacccagaagtctttcccaaccaaaagtaatgatactcttccctcaagtcatcgtgagattccaagattacaggatagacttttgagtttatcaaagcctattctgcctcagcaagataatatgacagcacaattggatgcacaaagggaagtgatgtattcttatgagaaaccccaggaagaactgtctttaaacaaacaaagaaagttgaacaaaagtgaatctgctgagcatactatcccctctttgtttctacccaaggaaacagagcattcgtttattccactaccttttgcagaagctaaacctaaaagcacttgtgaattgtattcatcccagaatgaacatgcagcccccccaagtaatcctgtgatcccagggtttcaagatagacttttgagtttttcacagtctgtcttaactcagcaagataacttgggacttcagaaacagttggatctacaaagagaagttctgcattatagccagaaagcccaggaaaaattgcttgtacagagacaaacagcattgcagcagcagatacagaaacatgaagagactttgaaggatttctttaaagacagtcagataagtaagcccacagttgaaaatgatttaaaaacccagaagatggggcagctcagagactggtttcctaatacacaagacctagcaggaaatgatcaagaaaatattaggcatgcagataggaacaactctgatgataatcatttggcttcagaagatactagtgccaagcaaagtggtgagcatctggagaaagatctggggagaagatcctcaaagccacctgtagcaaaagtcaaatgtggtttggacttaaaccagcatgaacttagtgctatacaagaagtagagtcaccagcaattggcagaacttctatactagaagagaacctgctgccttcaagggaaggacccagtcctggcaggattcatcacctgctgattaaagagcccttgggtcctagcagtggtagccaagtagtatatgccatgggccttagacagatccccagctttagtaaagtgtttggtataatcatccgagtggctactttgctagcagttaaaggcactagtgctacagtcgtgaacaaggcccttgcccacatgaagtgtacactccagagagaagggtag

SEQ ID NO: 1885 - DNA, 3724 bp, Homo sapiens
ataatggatgacaattaattttgagccaagaattaaaatttgctgaaatctctcgaattgggaaaacaacatcctctgttgcatactgaagttcataacaacagttagactttaaacttaaatcttaagtttaaatctttttcctttggttcatgtaaaggagctacttgatgttaccttttatttatcattcctctggctcctaagcacaacgtgattgtgaaattattgtttttgtgattaacgtagtaggaagtttctgcagttggcacatattgtaagagcatattgcagtttctgctcataatttctttcctatggagtgttagactttgttatttatgtgtataaatactagctggacacagtggtgcctgtggtccccagctactctggaggctaaggcaggagaaacacttgagtccagcggtttgaggctacagtgagatgtgatcctgccacatctcactgtagcatcgaacccctgggctcaagtgattcagcaagaatcacacgatttttaaaggacatggcagatcctgtgtctttaaaaaaaaatcaaaaccttgtaaatagtggttgaggtctatcccgatggggcttttcctgtagcctgcacatcgttggaaacgcctcatagagtaactctgtggttttactttactcacaggactattgttagatctgtgggaaggaattacaagacagttgctaaaagtttgaaaaagacggttgctaaacgttatgaaaaaccagataatctacttttttaccttaggtattggcatactccacacatctgtaccattcttgagtgatcgcttaggaatgaatgtgatttgaactcattcatgttgagagggtgtcaaattgagaaccaggtagatccccaccacctacagtaaaaaggaccctaaagtaaattggttgaagaaattagatcccaaagattcttggtgaattttgaagtcttcatcagtatatccatattaaaacgagatgacagaagccaaagtaattatgggctgacaggacaactggatcagtttcattaaaaaggtatgtatgcattagaaaagacatttgtatgggttcatttcaaagagggcttatgaggctgtgaaacccagagctcttaacgctgtgaccaaagatggaagttctctataggaagccctatagccctcctaatgtttgggtgctatgttttcctgaggagatataaaacgtaataatccatgattgttgccatgtgagagttttaaaggttaatcaaaatttctcttcttcagggcaaacttgaagataaatcttttgactccagctctttagaggatctaaagtgaccttgatggacagtggaagaaatcacaacatggaattcctcgaataacaatttattgactttaaataattttgtctaatgctacatatacacaattaaaaaacctttacactatttctagaaagtcagcatgtatttttggctcgaagtttctctagtgttttcttatggaatccttttgcccttgcctctgttttcgggcataagcttcttgttttgttttttcttccttttgttgtttcacttcagctagttgattgtataaccttagacccctttgggtgccttagagcctgtgtaggtctttctgtcttcagggaaaagatgctctgactttattcacggccctttaggacggactcacaggatggaacttatagatggtttctctttaactgttttgatttgagaattttcagagacatgaattttattccttatttctttctgcctctggtgggatctctccataaatgattttttcctctttataaatgcttcttgtaagctccctggtacaggtgtaagcctgcgaggggtttctgtagatgctgtccttggtttttctatggaaagttctgatacagctggataatctgaggcttctgttgctaatggcaagaaagttgcatgttttactctttttaaacgctttaagcgggtcttgctctgctgaaagaagcattttgcttcattctcgctcttctcttctagggttaaatttgcaaaatccatttcagcaatactggtatcagtggtgcttattaaagtaagttctggttcttccattataccatggccagtttctggtttcccagactggtatagagctctgtaatgaaaatgatccagaacttgcaaaaagctctgattctcctagttgagatagttttttggtgatttttggaatgtctgtttcagctgaattctcaaaatatttttcattttgagtagttaaggaatatggtgcctgaattgaagttcccatctccactgttcttacacataatcgagagtcagtttcctctacctgtggatttatgtctaaaaccgtacaggtttcatttttattatcttcaatgagtccgggactttgtaacattgtaacaacccctctttttgatagttcttcaaagcccatactttcctttctgctttctagttggtgttttgttgagcactcactagagttagaaccacatggagtgctatagagtacattcacatgatcgaagtaagtagcctcatcagatggtaagtagagtgatatgtaagtttcctatagaaagctggaaatgaacaatttttttcttgttttgtaatatttcagtatgttcttcagagggatagttctgatttttcatgccttgggaagaatctcttgcttcaatgctaaaaatacttggtagatcagcatgctggctctcctcctgtgaagaatattctggctgaagctgttcaaaacattgttcagatcccccaataatattttctgtagcaaaactgtgagctccaacatgagccaagttagtgtcaggttgttgattcggacttgtgttaagagaagaatgcatgctggtcctcctcagtgctgtgaaataaactgtacttttggataatccagtagcacagtggctttcagatgaagaatctgatctctggtaaaagtctctgttgtctggagaaatcccagaggatgatgatgataagtcaaaatctggatgtggttgtaagggtttaacacagctgatgatgcaaattaggaaaaatgtgttccaattcttgcaaatctgttttttcaggtatcaaatttgcttcattaatgtacttgtctatcatttgctgaaagtgtgtgtgaccacatgtagtttcatccactgcaggcaacagagatttatgaacgtctgaagagttctgccgctgataaatatcttgtgttgaaggaactatggaacttataatatttgtttcctcttctttactggtggtagattcttgcttgctatcatccatgtgctctgaaaatgactctggatctgtaaggctcaaatctgtgttttcataacttaaaaggctcccagtggaaacagttgctgaagataatggttcataagacagtgttttagccttatcatctggcttcacagttggacccaaatatgcatgttcttcctccacagcataacttaacactgcatgattttcaacaacagattccttcagcttaactgggcctggcggcttgatgacattagattgtgaagcccttagctctttaataaagctcgaattgtaatccccacatgttgagggagggacctgcaattcccatgtgtcgaaggagggacgtgactggatcatgggggtggtttttcccat

SEQ ID NO: 1886 - DNA, 3603 bp, Homo sapiens
  misc_feature (1)...(3603): n = a,t,c or g
ttattagttcaagaaaaggcatacacatttattcaacatgtatacctggggagaaccagtcattaccccgatgttcattattttgatcaccacgatagagctgactactctgctatgtagtgcattttgggactgcacttatgtatgtttttgtttaacttgtggacaaagacttacagataggtgcaaaaaataaatcctcttttgcaacccagaactcgattgttcgagtatgagcttttgatacatataagaagggatattatgatacctgagacagttgattgatgggagtattgatagccataaaggttggttccaggccaggtgcaatgggtcaagcctgcaatccccacaccaaggtgggagtattgcttgaaaccatgagttcaagaccagcctaggcaagaaagcttttatcttgagaaccatggtgtctggagttaaggatatctacttttttcccttaggtattggccatactccacacatctgtacccattcttgagtgatcgcttaggaatgaatgtgatttgaactcattcatgttgagagggtgtcaaaattgagaacccaggtagatcccccacccccctaccagtaaaaaggacccctaaagtaaattggttggaggaaattagatccccaaagattctttggtgaatttttgaagtcttcnatccagtatatcccatatttaaaacgaagattgaccagaagcccaaagtgatttaatgggctgacaggacaactggatcagtttcattaaaaagggcaaacttgaaggttaaatcttttgactccagctctttagaggatctaaagtgaccttgatggacagtggaagaaatcacaacgatggaattcctctgaataacaatttattgacttttaaataattttgtctaatgctacatatacacaattaaaaaacctttacactatttctagaaagtcagcatgtatttttggctcgaagtttctctagtgttttctgtggaaggaataaaaatttgagtttcagttgtgtacttcatgcttgaaaaattaagtccttccccctcagttatactcaccttatggaattcttttgcccttgctctgttttgggcataagcttcttgttttgttttttcttccttttgttgtttcacttcagctagttgattgtataaccttaagacccctttggtgccttagagcctgtgtagtcttttctgtcttcaggaaaagatgctctgactttattcacgccctttagacgactcacagatgaacttatagatggtttctctttaactgttttgatttgagaattttcagagacatgaattttattccttatttctttctgcctctggtgggatctctccataaatgattttttcctctttataaatgcttcttgtaagctccctggtacaggtgtaagcctgcgagggggtttctgtagatgctgtccttggtttttctatggaaagttctgatacagctggataatctgaggcttctgttgctgatacaagaggcagaaacacactcacctgaaagaagcattttgcttcattctcgctcttctcttctaggggttaaatttgcaaaatccatttcagcaatactggtatcagtggtgcttattaaagtaagttctggttcttccattataccatggccagtttctgtttcccagactggtatagagctctgtaatgaaaatgatccagaacttgcaaaaagctctgattctcctagttgagatagttttttggtgatttttggaatgtctgtttcagctgaattctcaaaatatttttcattttgagtagttaaggaatatggtgcctgaattgaagttcccatctccactgttcttacacataatcgagagtcagtttcctctacctgtggatttatgtctaaaaccctacaggtttcatttttattatcttcaatgagtccttgactttgtaacattgtaacaacccctctttttgatagttcttcaaagcccatactttcctttctgctttctagttggtgttttgttgagcactcactagagttagaaccacatggagtgctatgctgtacatttaactgatcaaatacattagcttcatcagatgaactgtagactgaacttaagtttcctatagaaagctggaaatgaacaatttttttcttgttttgtaatatttcagtatgttcttcagagggatagttctgatttttcatgccttgggaagaatctcttgcttcaatgctaaaaatacttggtagatcagcatgctggctctcctcctggtaaaagtctctgttgtctggagaaatcccagaggatgatgatgataagtcaaaatctggatgtggttctaagggtttaaacagctgatgatgcaaattaggaaaaatgtgttccaattcttgcaaatctgttttttcaggtatcaaatttgcttcattaatgtacttgtctatcatttgctgaaagtgtgtgtgaccacatgtagtttcatccactgcaggcaacagagatttatgaacgtctgaagagttctgccgctgataaatatcttgtgttgaaggaactatggaacttataatatttgtttcctcttctttactggtggtagattcttgcttgctatcatccatgtgctctgaaaatgactctggatctgtaaggctcaaatctgtgttttcataacttaaaaggctcccagtggaaacagttgctgaagataatggttcataagacagtgttttagccttatcatctggcttcacagttggacccaaatatgcatgttcttcctccacagcataacttaacactgcatgattttcaacacagattccttcagctgtacctcggttggtcacaatggcaatggaaacaagaactgcgatttgtccagtctgggtcacatgcctaccccggtagcctagaggtctgggtctctctccattctcattgctattatctttcactttctgtagtagtatacggccttctgtcttcactctctctgaccttttccccactgtgcagccagatctgatcgtgtcagcaacttcccatccccaccccccatttttaatcctttgattcctgatgtttaacccccatgacccagactgcaaaatcaggctggcttgctctgagctgcggttactgtgtccaggccccgggttctcaggtgagtcagggatgcactggcttcccagtcgccccgtaggagcatgactccccgaggcccaagagctgggattgtattccggaggaatgggatcccaggaaggcgccttgttgcgaacgcaggtacggctcgcgtttctcaggctccgcaggccgtgggccctgcccgcggtcgggctggcggatatcttaatctcctgcattctgaaatctccatttgcactgaggccatgcttcccatgggctgctcctagccactgacagtggcaggcctgttcctgagaatctccccacgggttcttgctgaacatttcttatactgcatggctgtctaagaggggtctacccattggtacttccctccattcagtgttagacttacactgaagtctgaggcgcttgtt

SEQ ID NO: 1887 - DNA, 1106 bp, Homo sapiens
  SIMILAR (146)..(682): 411254mologous to Mus musculus putative,accession number AK002885,Smith-Waterman Score=179.
tgaaaaatcgatgaccctagtccagtttggaggacttccggcgccgccactgtccggccacagcctaacgctcttcgctgtcgtttgtggtctcgcgcagggcggccccggttctggtgtttggcgtcggaattaaacaaccaccatgtcgagcaaaaaggcaaagaccaagaccaccaagaagcggccctcagcgtgcaacatccaatgtgtttgccatgtttgaccaggtcacagattcagggagttcaaagagggcctttcaacatgattgatcaggaacagagatgggtttcattcggacaagggaaggttttgcatgatatgcttgccttctctagggaagaatccccactgatggcattaccttgatgccatggatgaatgaggccccagggcccattcaattttcaccatgtttcctggaccctgtttgggtgaggaagtttaaatgggcaccagatcccctgaaggtgttcattcaggaaacgccttgcttttgctttggatgaaggaggcaaccgggcacccattccgggaagattacctaaggaggagctgctgaccaacccatggggggatcgggtttaccagattgaggaagttggatgaacctgtacaggagaagcacctatttgacaaaaaggggggaattccaattaccatcggagtttcacacggcatcctaactggaaggcccccaaagcacaaagatgactgaaagaactttagcctaaaatccttcccagttacaattgtcttactctcttttacttctcagacactttcccccaccctcatagaaccgtgttgcatggcactttagtttcacaggcttttgccctcttccttttttgatgtatttattccagacctttctgccactttagcacttggtataatcagactgggaaatgggggatgagggtggtaaattgtattgaaaaagatcgcgaataaaaaatccacaaatgtgaaagcccagaaaaatatattcgtatttcctgggttttgctgggatttttacatttttatataataaaaatgttattttgaaataaagattatgctgactcaaatgcaatgtaaaaaaaaaaaaaaagggc

SEQ ID NO: 1888 - DNA, 588 bp, Homo sapiens
  SIMILAR (138)..(434): 941254mologous to Rattus norvegicus brain alpha-tropomyosin (TMBr-2),accession number M34134,Smith-Waterman Score=470.
gctggtcatcattgagagcgacctggaacgtgcagaggagcgggctgagctctcagaaggccaagtccgacagctggaagaacaattaagaataatggatcagaccttgaaagcattaatggctgcagaggataagcaaatgtgccgagcttgaagaagaattgaaaactgtgacgaacaacttgaagtcactggaggctcaggctgagaagtactcgcagaaggaagacagatatgaggaagagatcaaggtcctttccgacaagctgaaggaggctgagactcgggctgagtttgcggagaggtcagtaactaaattggagaaaagcattgatgacttagaagataagtttctttgcttcacttctcccaagactccctcgtcgagctggatgtcccacctctctgagctctgcatttgtctattctccagctgaccctggttctctctcttagcatcctgccttagagccaggcacacactgtgctttctgttggacagaagctcttcgtttcagtgtcaaatcccccctgtgtaagctttctgaaaaactataagaaaaaaaaacctcgggggggggccggggc

SEQ ID NO: 1889 - DNA, 1330 bp, Homo sapiens
  SIMILAR (73)..(540): 591254mologous to Rattus norvegicus alpha-tropomyosin 5b,accession number M60669,Smith-Waterman Score=355.
ggcagccgggtccgcagggcagcagccggcctctcccactgcagccctcccgcccgcctaccgtccggcgcgatggcggggagtagctcgctggaggcggcgcgcaggaagatccggagcctgcaggagcaggcggacgccgctgaggagcgcgcgggcaccctgcagcgcgagctggaccacgagaggaagctgagggagaccgctgaagccagacgtagcttctctgaacaagacgcatccaagcttggtttgaggaagaatttggattcgtgcccaaggagcgtctggcaacagctttttcagaagcttggaggaagctgagaaggcagcagatgagagtgagagaggcatgaaagtcattgagagttcgagcccaaaaagatgaagaaaaaatggaaattcaggagatccaactgaaagaggcaaagcacattgcttgaagatgccgaccgcaaatatgaagaggtggcccgtaagctggtcatcattgagagcgacctggaacgtgcagaggagcgggctgagctctcagaaggcccaagtccgacagctggaagaacaattaagaataatggattcagaccttgaaagcattaatggctgcagaggataagtactcgcagaaggaagacagatatgaggaagagatcaaggtcctttccgacaagctgaaggaggctgagactcgggctgagtttgcggagaggtcagtaactaaattggagaaaagcattgatgacttagaagagaaagtggctcatgccaaagaagaaaaccttagtatgcatcagatgctggatcagactttactggagttaaacaacatgtgaaaaccttcttagctgcgaccacattctttcattttgttttgttttgttttgttttgtttttaaacacctgcttaccccttaaatgcaatttatttacttttaccactgtcacagaaacatccacaagataccagctaggtcagggggtggggaaaacacatacaaaaaggcaagcccatgtcagggcgatcctggttcaaatgtgccatttcccgggttgatgctgccacactttgtagagagtttagcaacacagtgtgcttagtcagcgtaggaatcctcactaaagcaggagaagttccattcaaagtgccaatgatagagtcaacaggaaggttaatgttggaaacacaatcaggtgtggattggtgctactttgaacaaaaggtccccctgtggtcttttgttcaacattgtacaatgtagaactctgtccaacactaatttattttgtcttgagttttactacaagatgagactatggatcccgcatgcct

SEQ ID NO: 1890 - DNA, 1289 bp, Homo sapiens
  SIMILAR (90)..(953): 431254mologous to Mus musculus putative,accession number AK003175,Smith-Waterman Score=399.
  misc_feature (1)...(1289): n = a,t,c or g
cggaattnccggatcgagccacgcgtccgcgaccgcgcgctcgccccgccgatcctgctttagttttagggcccctcgccgccgtcaccatgggcgccggcaagaagaagatgcggatgctgaagctcgacaaggagaacgccttggatcgagctgagcaggcggaggccgacaagaaggcggcggaagacaggagcaagcagctggaagatgagctggtgtcactgcaaaagaaactcaagggcaccgatagatgaactggacaaatactctgaaggctctcaaagatgcccaaggaagaaacctggaactggcaagagaaaaaggccaccgatgctgaagccgaccgtagcttctctgaacagaccgcatccagctggttgaggaagagttggatcgtgcccaggagcgtctggcaacagctttgcacgaagctggaggaagctgagaaggcagcagatgagaagtgagagaggcatgaaagtcattgagagtcagagcccaaaaagatgaagaaaaaatggaaattcaggagattccaacttgaaagagggccaagcacattgctgaagatgccgaccgcaaattatgaagaggtggcccgtaagctggtcatcattgagagcgaccctggaaccgtgcagaggaagcggggctgagctctcagaaggcaaatgtgccgaagcttgaaaggaagaatttgaaaacttgtgaccgaacaactttgaagttcacttggagggctccaggctgagaaagtactcgcagaaggaaagaccagatatggaggaagagatcaagggtccttttcccgacaaagcttgaaggaggctggagactcgggcttggagttttgcgggagaggtcagtaacctaaaatttggagaaaagcattgatgactttagaagaccgagctgttacgcttcaggaaactgaggtacaaagccatcagcgaaggagctgggaccacgctctcaacggatatgacttccatataagtttctttgcttcacttctcccaagactccctcgtcggagctggatgtcccacctctctgagctctttcatttgtcttattctccagctgaccctggttctctctcttaagcatcctgccttaagagccaggcacacactgtgcttttctattgttacagaaactccttcgtttccagtgttcaaataaacactgtgtaagctatttctgtttgctattctttttacttcttatttattgacattttagtttcaacattgaataaaactacaaagctgcttcacacaaat

SEQ ID NO: 1891 - DNA, 572 bp, Homo sapiens
agtctggcaggtgctgtgagtgccgaattgggaccgtgatctccaagtctggaattggaggaaagagggataagctgtcaagataccagactgtcacctgccaagctgctcagcagcttccctccacctgcctctctcacaggagcctgcatgggaaggggaaggggaagggaaaagacgatgggagagggaggggccctgggttggtggccccctccccttcagcactgaaactactgaatcctgtgtggctgtcactgagagactgaagagaggaatagaataatgtgagaaagggacagagaagcgcttctgcatcagggagtggaaagaacaaaccataagagaaaggtttgggctctcagccctgccacttagcatctgtggaactccagcaagacagttctcctctctgaatcactccccttatctgaggaggggtatctccatccttgactgtaataacaggctgccctatgcaccaagcagagttctgagagctatggtatttttcattcatttaacccccacaacacccaagaaataaatattattatcatcaatgccagcag

SEQ ID NO: 1892 - DNA, 1325 bp, Homo sapiens
  SIMILAR (458)..(874): 461254mologous to Caenorhabditis elegans contains similarity to lupus LA protein homologs,accession number AF039718,Smith- Waterman Score=303.
  misc_feature (1)...(1325): n = a,t,c or g
tttcgtggaggggcaaggcgagtgtgtgtccttatcctatcaattggggcgcgggcctgtgagccagttggagttgcggcggcgggaacgattgggctgagcagaggacgacatgttgcttttcgtggagcaggtagcatctaaaggaactggtttaaatcctaatgccaaagtatggcaagaaattgctcctggaaatactgatgccaccccagtaacttcaattggaactgaaagcttcttggcatgaaatagctagctcatcaggtgctcatctctgagggtaatggcagagctctcataagatatatgtaaagaatatgaagtaatgtattcttcatcttgtgaaaccacaagaaatactacaggcattgaagaatcaactgatgggatgattttacgaccagaagatctgagttaccaaatatatgatgtttccggagaaagcaattcagcagtttctacagaagacctaaaagaatgtctgaagaaacaattagaattctgtttttcacgagaaaagttgtcaaaggatctttacttgatatctcaaagggatagtgatcagttcatcccaatttggacagctgccaacatggaagaaataaaaaagttgactacagaccctgatctaattcttgaagcgttaagatcttctcccatggtacaagttgatgagaagggtgagaaagtgagaccaactcataagcgttgtattgtaattcttagagagattcctgaaacaacaccaatagaggaagtgaaaggtttgttcaaaagtgaatactgccccaaagtgatcagctgtgagtttgcacacaatagcgactggtatatcactttccagtcagacacagatgcacaacaggcttttaaatacttaagaaaagaaagttaaacaatttaaggccaggccaatattggcagggataaaagccatcaatacatttttttgctaagaatggtcatcgaataatgggattttagaatctatagtccaccccatttaaactcaagcacagtatgcctccccagtctttatgcagcctgtatataatcctcaccaacagtactcggtctatagtattgtgcctcagtcttgggtctccaaatcctacaccttactttgaaacaccactgggtaagtgaggatccttacaataaaatataataatatttttaatttgaggctggaaatttggaggaaatcagttgggagtggggagctcatttatgttgacattgatggactttttgggcctttattttattttatttttngtatttttcgtggaggtggnattttgccaggttgcccggggtgg

SEQ ID NO: 1893 - DNA, 1143 bp, Homo sapiens
  SIMILAR (22)..(1122): 851254mologous to Mus musculus B cell phosphoinositide 3- kinase adaptor,accession number AF293806,Smith-Waterman Score=1648.
atgaccggcttcccgtttcaggcagaaaccactgtctatgttattgtgagatgtaagctggatgacagggtggcgacagaagcagagttttctcctgaggattctccctctgtaaggatggaagccaaggtggagaatgagtacaccatttcagtgaaggctcccaacctttcatctgggaacgtttctctgaagatatattctggagacttagtggtgtgtgaaaccgttatcagctattatactgacatggaagaaattgggaatttattgtccaatgccgcgaatcctgtggaattcatgtgtcaggcctttaaaattgtgccctacaacacagagacccttgataaactgctaaccgaatccctgaagaacaatatccctgcaagcggactgcacctctttggaatcaaccagctggaagaagaagatatgatgacaaatcagagggatgaagagctgcccaccctgttgcattttgctgcgaagtatggactgaagaacctcactgccttgttgctcacctgcccaggagccctgcaggcgtacagcgtggccaacaagcatggccactaccccaacaccatcgctgagaaacacggcttcagggacctgcggcagttcatcgacgagtatgtggaaacggtggacatgctcaagagtcacattaaagaggaactgatgcacggggaggaggctgatgctgtgtacgagtccatggcccacctttccacagacctgcttatgaaatgctcgctcaaccccggctgtgacgaggatctctatgagtccatggctgcctttgtcccagctgccactgaagacctctatgttgaaatgcttcaggccagtacatctaacccaatccctggagatggtttctctcgggccactaaggactctatgatccgcaagtttttagaaggcaacagcatgggaatgaccaatctggagagagatcagtgccatcttggtcaggaagaagatgtttatcacacggtggatgacgatgaggccttttctgtggacctggccagcaggccccctgtcccagtgcccagaccagagaccactgctcctggtgctcaccagctgcctgacaacgaaccatacatttttaaaggcaagtatggcagggaatga

SEQ ID NO: 1894 - DNA, 3209 bp, Homo sapiens
  SIMILAR (545)..(574): 601254mologous to Mus musculus B cell phosphoinositide 3- kinase adaptor,accession number AF293806,Smith-Waterman Score=42.
atggcatcatcagctattcctgttctagaaagggcactctggctgcaatgtggaggagggagtgactggaggaagggagccactggtccctggatcaagctagacacatgtcccaaattgggccaacttggaatggggcctcaacctaaagcagcaacttactccctgctcggaggcctagtggactcaggggactgtggagaagcagaaggcagaggcaggtgctgtgagtgccgaattgggaccgtgatctccaagtctggaattggaggaaagagggataagctgtcaagataccagactgtcacctgccaagctgctcagcagcttccctccacctgcctctctcacaggagcctgcatgggaaggggaaggggaagggaaaagacgatgggagagttacatggcaaaggagaattaagattacagatggaatcaaggttgctaatcagctgacttcaagatatggagaaaatcctggatcaccttgccgtgcctcggatcgtctggctttaggctctgtcctgaaggttggcctctcgctatggtcctggtggcacggagtggtgccagcaggggtgaaagagctgttggaattgccccttggtgttcacttttgggccaccaataaagagtgtgataggtgtcagggaagtgacatgaggtttttcaccagcgtggcctgctatggatcttgtctctttgcatctgagttgctgatcagatgcaaggactggctcaaaggaagaccagctctcttcactgccctgctagcttgtgtcctttatctttgggtgtctgacccgagcatgtcttcccttggggatgttgaaatgcttcaggccagtacatctaacccaatccctggagatggtttctctcgggccactaaggactctatgatccgcaagtttttagaaggcaacagcatgggaatgaccaatctggagagagatcagtgccatcttggtcaggaagaagatgtttatcacacggtggatgacgatgaggccttttctgtggacctggccagcaggccccctgtcccagtgcccagaccagagaccactgctcctggtgctcaccagctgcctgacaacgaaccatacatttttaaaggcaacctgagggcttcctctggcacctggcaccttctctgccctcttataggacaggttgaaagcactggggaattaacacacggagttgctgccctcaaccagtgcctgacaggaggtatggatgagtgccccagcttacttgcatcctccgggaggtgtttggacaggggcacaggtgattcctcaagagccctgatggacttgctaggaaactgtggagaagcgaaggaaaggagagaggcaggagatgacaaaaggggcaatggcttggatgccagaacacctgggttcatctctcagctcttgcattttccagctgttcagcataggatattggtttttgcagaaaaaagtcaagagcggcctgggaatttctacgtttcctcagagagcatcaggaaaggacacacccacacagtaaggaattacctggcccaaaatgtcaatagtgccaaggttgagaaatacttgtctaaaggcgtctcaataattaaggcttggctgcttcttcaagaaaacaccaaatggtggatgatgctgatgcagtgggagggcctgggggtcctggaatggcaggctgcgatggcctccctggaggctttggcagtgacatcaggccaaggttgtggctgtggctggggccaaggctctggagctcatagaggggcactaagcatcatcttggcctctgtgcccaagaagctgctgctgatggctgctacgccttggccagggaccgcactgccaccctgggccacctttgatgccatctctaagactgctagcaactggatccctgacctctggaaagagactgtattcaccaagtttccctaccaggaattcactgaccatctctcaagacccacaccagagtctctaagcagaagacgcaggttccagctgtggctacaacggccgcccgtcagaccatggagggacaggccccagtcgagtatatatgacccttttgcgggaatgaaaacgccaggccagcggcagcttatcaccctccaggagcaggtgaagctgggcattgtcaacgtggatgaggctgtgctccacttcaaagagtggcagctcaaccagaagaaacgatcggagtcctttcgtttccagcaggctgcttccttcaaagtactagccaggcccgaccctgcttaccctcagagatcagatgggattgggcgcgttcagggtgttatggctatagaccctggtgacttggagatcacggtcccaattcggcactcacagcacctgcctgcaaaagtggagtttggagtctatgagagtggccccaggaaaagtgtcattccccctaggacggagctgagacgaggagactggaaaacagacagcacctccagcacagcaagtagcacaagtaaccgctccagcacccggagcctcctcagtgtgagcagcgggatggaaggggacaacgaggataatgaagtccctgaggttaccagaagtcgcagtccaggccccccacaagtggatgggacacccaccatgtccctcgagagaccccccagggtgcctccgagagctgcctcacagaggcctccgaccagggagaccttccatcctcctccacctgttccacccagaggacgctgattccacctcctaaaacctgcctacttcaggactttaagactcacagtcttcagcctgttaatgatgtcttcatgttgagttttatagcatgactgttgaccttaagatccattctcattgctgataatgctgcagccctgctggtttgggcttgcctcgaagattttattaaggcacgaagaagtgaaaaactaagggcttcattcaccatcaccaagtatatcgaaccatatacttgtttgccaaaaggatgaagacttaatcgaaatacttacctctaatttgccatatcagaagcctaaaaagaatgatcataaatgtacttcaccagtgattttactgaaatgcacttatattagtctttatgtatttgctagttcagcctgatttctagaagaggttatagtgtgagacttgtagtattcaagtaagataagtgacctaattttaaaataattctt

SEQ ID NO: 1895 - DNA, 691 bp, Homo sapiens
  SIMILAR (690)..(58): 1001254mologous to Homo sapiens Protein regulating gene expression PRGE-9,accession number AAY58616,Smith-Waterman Score= 1092.
tcaaaaagcacttcccttctttccatggcgctcaggggcatccagtcctcctgagccatggcagaagatcatggcttgagcaatggtgatggccccgtagaggttacacaaggcctggaacttctcgtctctgctgctgcacaggacatagtactgcttgatggtatccagggtctcttcctcacgcttcagtttgataacatttgggtctgggaccactttctgggcaaacttccacacagagtcttcaaaggtggcggagaaaagcagcatctggcagttcctgggcagcatcctctggatgcggatgctctgatcttggtggccctgagtggctatcatgacatcagcctcatccagaacaaacaccttgattttcttgggatcaatgaacttgagcttggagcaccagtccagcacggtcccaggggtgccaatgacaatctgctcactgatcttctggcctctttccaatttattgcctcgaacggcataggcaagcttcagttctgggtaaaatttgcccatctgctcaatcacttttcctgtttgaagcgccagctcatatgttggggagaggcacagacactgggggtatctgtctgatggctccactcggctgagcatggctaagacaaaggcagctgttttaccagtgccagactgagactgggcaatcagattctgtggg

SEQ ID NO: 1896 - DNA, 563 bp, Homo sapiens
  SIMILAR (1)..(252): 831254mologous to Homo sapiens DEAD Box Protein 5,accession number AJ237946,Smith-Waterman Score=351.
gtctgtgcagcagcagagcgagaagttcaaggccttgtgtaacttaccgggcccatcaccatggctcaagccatgatcttctgccatactcgcaaaacagctagttggctggcagcagagctctcaaaagaaggccaccaggtggctctgctgagtggggagatgatggtggagcagagggctgcggtgattgagcgcttccgagagggcaaagagaaggttttggtgaccaccaacgtgtgtgcccgcggtgagcagaggacgtgtcccacctggtctgccaggctcggggtcccaggcccaattagagccagaaatccttgtatacagggaagtcggatggtctcagggagatgggtggggttggtgacactattcctttctaggagagactgtttggatttccctgaggtggtaagaactcacacatgccaggtgcggtggctcatgcctgcaatcccaaggcaggaaaattgcttgaaccctggagacagaggttgcagtgagccgagaatgtgctatagcactccatcctgggtgacagagtgagactctgtctccaa

SEQ ID NO: 1897 - DNA, 879 bp, Homo sapiens
  SIMILAR (592)..(876): 931254mologous to Mus musculus RNA helicase,accession number L25125,Smith-Waterman Score=452.
atgctgaagaatgaagagccccgacgaagacccatcatgagcaaccacacagctacgcacattctgaacttcgccctgcgctcagtgcttggggaagctgaccagaaaggctcattggttgctcctgaccgcctcagatttgactttactgccaagggagccatgtccacccaacagatcaagaaggctgaagagattgctaatgagatgattgaggcagccaaggtcacaggaagctgggagcgggaccctgaaagaactcgagttctgtccttagatgttgggcatgcagcaggcaaagggagaatgagaggagacaaggacctggcttcccatctacagactgttcagccaaggccatgctcagagtgggatctgctaaatgggcacagcagaacattggaagaagcacctttgagccagtgctgctggggtctccgtggattagagccaggagccctgatgaggcctgtggggggggcttcactttcgaccctgagaagccaactccacatctccttccctctcacccttgagccgtgggtagttcagggaggccacagccttgctttctgtgccatggcctatcccaaagtcacctccactcacaacgtcgtgactttaggcattgatgttgaacaagtgtctgtcgtcatcaactttgatcttcccgtggacaaggacgggaatcctgacaatgagacctacctgcaccggatcgggcgcacgggccgctttggcaagaggggcctggcagtgaacatggtggacagcaagcacagcatgaacatcctgaacagaatccaggagcattttaataagaagatagaaagattggacacagatgatttggacgagattgagaaaatagccaactga

SEQ ID NO: 1898 - DNA, 482 bp, Homo sapiens
  SIMILAR (267)..(482): 981254mologous to Homo sapiens unnamed protein product,accession number AK026435,Smith-Waterman Score=353.
  misc_feature (1)...(482): n = a,t,c or g
gaaaagaagacacatctcccaaccttttatttacgtctggcagaattttacggagtgaatgatttacgcgaagcaggtaaatggaaaatgtgattgacagctatctctgattctaattgggccagcagagctaggagggccatctggcagagcttttccttatgggcccagtggggagggggaatttgggactctctttgccctgtagctcttgagtctaaggtaatccattgtcgtcctattccttctgctccatgtgtctcacagaactggaccccatcctgactgaggtcaccctgatgaatgcccgcagcgagctatacttacgcttcctcaagaagaggattagctctgattttgaggtgggagactccatggcctcagaggaagtaaagcaagagcaccagaagtntctggacaaactcctcaataactgccttttgagctgtaccatgcaggagctaattggcttatatgttacc

SEQ ID NO: 1899 - DNA, 471 bp, Homo sapiens
tgtctctatttcaattaaaaacaaccaaaacacaatctagggtgatgggtgcaatctatgattcttcctggttccaggaagacagacaggcagctgagcgctttaccgataggagcactcacctgcgcttacgtaacgcggaggcggctgcgtaaacaaagccagctcagggtccaggctccatccctatcctccccgccaccccatccagcctttaatcaacctgggaaacattctttcccagggaccaagtctccgaccagaactagtcccctgacccttttagggctgaagccaactcaccgactcagccgcagcttcctgctcgtccaccgccagggcccatgagtcagtggccatggtcccaggcgcgggtgggacgctcgtgctggtgcattcgagggatggcacgaggaatcgtgggctccagaggttcgcggcaggctctgcagaaatcgggaccgggaacca

SEQ ID NO: 1900 - DNA, 701 bp, Homo sapiens
  SIMILAR (44)..(223): 751254mologous to Homo sapiens DEAD Box Protein 5,accession number AJ237946,Smith-Waterman Score=220.
ttcaagtgctaataacatcagcatactgggtgccttcaggtctgttaccaaatggctctcctaaactcatcctttatgatttttctgtcagtgtctgtgcctctccccaacatatgagctggcgcttcaaacaggaaaagtgattgagcagatgggcaaattttacccagaactgaagcttgcctatgccgttcgaggcaataaatgtgagtacggcaggcgacaactgaacagtgagcagggtagggggttgggcgtttgaattttgaagatgcgatgaccgtattcaactttctaattcagtctgaccctggagcctaactgtgttgctctatttgaatctatttgaatacctgctaatttgttaacagtctttttcagtcttaaaataagattttcgggttgattaaaaaaaaaaatccccgcatgtctcacagagttcttaatatctagagttcttcgctcagaaggtagagttttgaatttagcgtccagagttctgggacctgctaccaaagagggattaacaggactgaggatggaaggttggggtcagctccctttctttaaaagtaagcaaaaccaggtacagtggctcacacctgcaatcccagccctttgggaggccagggtgggaggactgcttgagcacatggttcgagaccagcctgggcaacatagtaagacaaaaaaaaaaaaaa

SEQ ID NO: 1901 - DNA, 5758 bp, Homo sapiens
  SIMILAR (2262)..(2876): 791254mologous to Homo sapiens DEAD Box Protein 5,accession number AJ237946,Smith-Waterman Score=765.
  misc_feature (1)...(5758): n = a,t,c or g
ccttccaaaggttgtgtaaataattttttttctaccatcccccatcatttgcatacatttttgtcaagtccaaacataaatttgaagtgaggtaaggtagtttctctctacttgtgccgttgtccttggggtgatgtcggggcctgtgccctgaacggcacttgtctcctgtgcaggggcagtgccagggctggcatcaagtggctggtggagcttctcaagttggctaattttctcaatctcgtccaaatcatctgtgtccaaatctttctatcttcttattaaaaatgctcctggattctgttcaaggatgttcatgctgtgcttgctgtccaccatgttcactgccaggccccttcttgccaaagcggcccgtgcgcccgatccgggtgcaggtaaggtctcaatgtcaggaattcccgtcccttgtccacgggaagatcaaagttgatgacgacagacacttgttcaacatcaatgccgcgggcacnacaagttgggtgggtcaccaaaaccttctctttgccctctcggaagcgctcaatcactgcagccctctgttccaccatcatctccccactcagcatgaccacctggtggccttcttttgacgagctctgctgccagccaactagctgttttgcgagtatggcaaaaagatcatgccttgacccatgtgattggccccgtagaggttacacaaggcctggaacttctcgtctctgctgctgcacaggacatagtactgcttgatggtgtccagggtctcttcctcacgcttcagtttgataacgtttgggtctgggaccactttctgggcaaacttccacacagagtcttcaaaggtggcggagaaaagcagcatctggcagttcctgggcagcatcctctggatgcggatgctctgatcttggtggccctgagtggctatcatgacatcagcctcatccagaacaaacaccttgattttcttgggatcaatgaacttgagcttggagcaccagtccagcacagtcccaggggtgccaatgacaatctgctcactgatcttctggcctctttccaatttattgcctcgaacagcataagctagcttcagttcagggtaaaatttgcccatttgttcaatcacttttcctgtttggagggcgagctcatacgttggggagagacatagacactgggggtatttgtttgcaggttctacttggctaagcatggccagcacgaaggcagctgttttaccagtaccagactgagattgggcaattaagttctgtgggggctcagcaagcatcagtggcaatgcgttctcttgtatcttggatggacgattgaaacccatggcatagactccttggagaagctgtggtttcaagccaaagctcttcaaaagctatcaccgagtccagaggggagtttggatccagctgcaggaattccacttggtttgtgttatcaacaaggttgcttctgatcagcttgttgagtaaggactgggcagctcagtcctctttctcttcttcatcagtcttctatgcatgggcattggtcttgacaacaggcaccattggtatctggtttgattttctcttccttaagatgcaagttgctcaacgactcagccgcagcttcctgctcgtccaccgccatgggcccatgagtcagtggccatagtcccggacaagggagacccacttgtgaaaatatgcgctgcaccacgtcgcaacgcgggccctaacctcgccaccggcgcgagaatgcacctcacgcggaccggaagcggcggtgagcacagcacctacgccccagtgaagtccttccttcgagtggataaagaaaaggtccagatctacaacccagccttcttcaagtatatccacgacaggtggacagagcatcacgggcgggataagttcttccagaaagatggtataagccctgaacttcagagactggtgaagaagcccacgttttaccacatcaacctgtggctgttagatctggcaggcctttcccctctgcaggtggtgtcactcgtggtgtttaaacccattttcctgaacacaattgacccatctcaccccatggcaaagctgagcagagctgccaatacccagaagtgcatccgggctgggggcaaacataatgacctggacgatgtgggcaaggatgtctatcatcacaccttcttcgagatgctgggctcttggtcttttggagattactttaagggctggacgctgctgcacgcctgtaatcccagcactttgggaggccaaggtattatcaaaaccagtaccactgccgagaaaacagatgaagaggagaaaggtaactacttttggatgcccttggcaagagacgaggacagagctgcccagtccttactcaacaagctgatcagaagcaaccttgttgataacacaaaccaagtggaagtcctgcaacgggatccaaactcccctctgtactcggtgaagtcgtttgaagagcttcggctgaaaccacagcttctccagggagtctatgccatgggcttcaatcgaccctccaagatacaagagaacgcattacccatgatgcttgctgaacccccacagaatctgattgcccagtctcagtctggcactggtaaaaccagcctgcctttggtcttagcccatgctcagccggagttgagcccatcagaccagataccccccagtgtctgtgcctctcccccaacatatgagctggcgcttcaaacaggaaaagtgattgagcagatgggcaaattttacccagaactgaagcttgcctatgccgttcgaggcaataaattggaaagaggccagaagatcagtgagcagattgtcattggcacccctgggacccgtgctggactggtgctccaagctcaagttcattgatcccaagaaaatcaaggtgtttgttctggatgaggctgatgtcatgatagccactcagggccaccaagatcagagcatccgcatccagaggatgctgcccaggaactgccagatgctgcttttctccgccacctttgaagactctgtgtggaagtttgcccagaaagtggtcccagacccaaatgttatcaaactgaagcgtgaggaagagaccctggataccatcaagcagtactatgtcctgtgcagcagcagagacgagaagttccaggccttgtgtaacttctacggggccatcaccattgcccaagccatgattttctgccatactcgcaaaacagatagttggctggcagcagagctctcaaaagaaggccaccaggtggctctgctgagtggggagacgacggtggagcagagggctgcggtgattgagcgcttccgagagggcaaagagaaggttttggtgaccaccaacgtgtgtgcccgcgttattgatggtgaaacaagagtctgtcgccatcatctttgatcttcccgtggacaaggaccgggaatcctgacaatgagacctacctgcaccggatcgggcgcacgggccgctttggcaagaggggcctggcagtgatacatggtggacagcaagcacagcatgaacatcctgaacagaatccagggagcattttagcccctggtactcagtcacggcagccaggagaccccaggtggccagtaaagctgaggagaatctgctcatggtgctggggacagacatgagtgatcggagagctgcagtcatctttgcagatacacttactcttctgtttgaagggattgcccgcattgtggagacccaccagccaatagtggagacctattatgggccagggagactctataccctgatcaaatatctgcaggtggaatgtgacagacaggtggagaaggtggtagacaagttcatcaagcaaagggactaccaccagcagttccggcatgttcagaacaacctgatgagaaattctacaacagaaaaaatcgaaccaagagaactggaccccatcctgactgaggtcaccctgatgaatgcccgcagtgagctatacttacgcttcctcaagaagaggattagctctgattttgaggtgggaggactccatggtctcttaggaagtaaagcaagagcaccagaagtgtctggacaaactcctcaattaacttgcctttttgagctgttaccatggcagggagctaattggcttatatgttaccatggaggagtacttcatgagggagactgtcaataaggctgtggctctggacacctatgagaagggccagctgacatccagcatggtggatgatgtcttctacattgttaagaagtgcattgggcgggctctgtccagctccagcattgactgtctctgtgccatgatcaacctcgccaccacagagctggagtctgacttcagggatgttctgtgtaataagctgcggatgggctttcctgccaccaccttccaggacatccagcgcggggtgacaagtgccgtgaacatcatgcacagcagcctccagcaaggcaaatttgacacaaaaggcatcgagagtactgacgaggcgaagatgtccttcctggtgactctgaacaacgtggaagtctgcagtgaaaacatctccactctgaagaagacactggagagtgactgcaccaagctcttcagccagggcattggaggggaagcaagcccaagccaagtttgacagctgcctttctgacttggccgccgtgtccaacaaattccgagacctcttgcaggaagggctgacggagctcaacagcacagccatcaagccacaggtgcaggcttggatcaacagctttttctccgtcttccacaacatcgaggaggaagaattcaatgactatgaggccaacgacccttgggtacaacagttcatccttaacctggagcagcaaatggcagagttcaaggccagcctgtccccggtcatctacgacagcctaaccggcctcatgactagccttgttgccagtcgagttggagaaagtggtgctgaaatccaccatttaaccggctgggtggtctgcagtttgacaaggagctgaggtcacttcattgcctaccttaccacggtgaccacctgggaccatccgagacaagtttgcccggctctcccagatgggccaccatcctgcaatctggagcgggtgaccgagatcctcgattactggggacccaattccgggcccattgacgtggcgcctcacccctgctgaagtgcgccaggtgctggccctgcggatagacttccgcagtgaagatatcaagaaggctgcgctggtaagctagcctggatgagcacacctgggctcatcacactttgcagggcctgtttccctaaaggggccccagccaaggaagctgagcgaggctgtcgggccttgggggaagatctgaacagccccagaccttttctacggctggcagcagagaaacaaagtctggacccactcccatgctctgccctcagacctggccaaggtaatgctttgggggcagcatctcccccccgaaagaagcgggctcctaattagggtgggaaagccccggcaggcagcgagcagcccaggccagctttttgcatggatggtcagtctcttgccctcaaacactacagcaaacaagctacccctgccagtcctagacaacttgggtacatctggggacctagcagttaggcttgactttgaggagaggctgtgatgtttatgatccctgaataaagctactccttggagagaaaaaaaaaaaaaaaaa

SEQ ID NO: 1902 - DNA, 1029 bp, Homo sapiens
  misc_feature (1)...(1029): n = a,t,c or g
cccccccccacgganaagggntaaaaagatacaaaaagaagaaanggccaaacaaaataacggggacccttggaattccaaantgcggcccaaaagtnaggtttgaaccganttganctgtttantacggtctgctgtgcctgaaagatacngttccaatgtctccctgcccncagtgttaactaatgaaaaaaacctggctgttagtcctgagccctccttaagtttgtaggtagtaacccttacaggtagtaatctatatttttactgttctctctttatcttcagtgtgttgccagatcaggatgtgtccctagtgtagatttgttatttatccctgcccctagacatagtgtgcttctgtaatgtgaagattcagttttttttcttcaagtctggaaagttattattaatttttaaccatcttcccccattgtttctattttcttctaaaaactccttttaaacatagggagctttttattcttgtcttcggtctcttaaaaatctttcaatttgctaattcttttacttaatcctcctactgagattttatttcatcaacttttgttttcttttggatttgtttctattttggatttttatttggtattttgtcattttcgcgtgttcttggtttattggtgtttctttaaagttcttgttagttccattagctcctttttcctgcggtgtcggcattctcccttattttagggagcaagttgaacagacttgtatattttgggctgcataccttttccctaagtgtgtcttttgtgggagttctgtggaggtttatagagacttccctgtaggatagtttgacatttgcattttcctggcttcccattctgtgcaaggagcatagttcaaactccctgccttccatacctgggttctgaagcctcagcttccagtactgttgactgttgaaaatccttgccctaaaatcccacatacagtttttatgactgttggatatctttatatgaatttcattatagtttctttcacttatgaggtttt

SEQ ID NO: 1903 - DNA, 1403 bp, Homo sapiens
  SIMILAR (1268)..(1167): 521254mologous to Homo sapiens Human secreted protein, SEQ ID NO: 8153,accession number AAG04072,Smith-Waterman Score=79.
  misc_feature (1)...(1403): n = a,t,c or g
ggaaaaatttttctaaaaccaaccccaggaagcaaaacttccaacccccaagcatatgcgagttgttttaccccctttaccctttaaaattttttattttccctaaagcctttaaattctggagggaggttgtcccaatatttcccccccccaaaaaaaaggttccttcccaaaaattcccaagtaggttttaatacgcccccccataaggaaaaaaatttttccttgccagcccccgttaaatttggcccccccaaggattctttaaaacggcccccccnnnnnnnnnnnnnngaaaaaggagtttaaaaggtcctgctctatcgttctgtgtctggctctgcaaactgctggtatgtaaaagaccctctttccagacaggccacgaactccccgaaggccgggctggcctcttctctgcctctgtcccaacctccctgacacaccctccatccacgttaataaaacagggaacacaccagagggctcagtagagaaaaacacatcataatgactgatttataatttttatagctttaaaataataaatttatttttttccattaaagtattataacacgattacaaaaagcctatgaaaaacagaggagggaaaatatctgagctgctgccaccccacccaaacaatcctagtgaagcctgttgagctttctcttcatctcttccaggcatatagttgcaatgaaagtaaacaaaccagcagtttcaagagggatgagtgctggagctagatgcccaactcctgccttctaaggcagaaacacggacccaagagctgcttctctcctggcacagctgatggagcactttcccttgggacagccgtctgtgcctgcctcacctgtccttgcactcacagtgttccccacttccttccctcagcagcactgccatccccaggcaaggattgaagccagaggcttggcaaaaagagcaaccctctgatactccaagttcaaactgcttcctagctgatagtgagaggccacgtctattctgattttatcaagacaaagacccaaaatacctagaccttcacacaagacagtgcaggctctcttgttgttcattcaccaatgactagcatctggaagacagctgagtctgtggaccaagggcatttccctattattattttgattttatttgtttatttgctttttgagacagggtctcactctgtcactcacgctacaatgcagtggtgtgatcacagctcactgcaacctcaaactccctgggctcaggtgatcctcccaccttagcctgctgagtacctgggattataggcatgtgccaccacacctggctgatttttacaccttttgcagaaacagggtctcaccatgttccgaggctggtctcaaattcccctcttgccg

SEQ ID NO: 1904 - DNA, 494 bp, Homo sapiens
  SIMILAR (185)..(493): 991254mologous to Mus musculus putative,accession number AK006924,Smith-Waterman Score=534.
ttggcccctgacttaattcgtagcaaggcaggctgccgtcttttggctttgaagggtccgtttgctgtacctccagggtgaattctgtggtcagctcacaccatgtcactcggcttttttcgcatggcggtgaccagtagtgctgtctacctggctgacaaatgattagctgtgttctctcacaggtcagagtggtgctgggaacaactgggccaaggggcactacacagaaggcgcggagctggtggactcggtgctggatgttgtgagaaaggaggctgagagctgtgactgcctgcagggtttccagctgacccactccctgggtggggggactgggtctgggatgggtaccctcctcatcagcaagatccgggaggagtacccagacaggatcatgaacacgtttagtgtggtgccttcgcccaaagtgtcagacacagtggtggagccctacaacgccaccctctcagtccaccagctcgtaaaaaaca

SEQ ID NO: 1905 - DNA, 1633 bp, Homo sapiens
  SIMILAR (587)..(1195): 471254mologous to Mus musculus tubulin, beta, 2,accession number BC005547,Smith-Waterman Score=326.
cgcgcccgctcttctgctgctgtttgtctacttcctcctgctttaccgacgtcggcggcgggattatgaagggaatcgggcacttggcagcccggcaaggccggaacccaaacgggggccaagttttgggaggtgatcagcgatgagcacggcatcgaccccacgggcacctaccacggggacagcgacctgcagctggaacgcatcaacgtgtactacaatgaggccaccggcggcaagtacgtgccccgcgccgtgctcgtggatctggagcccggcaccatggactccgtgcgctcggggcccttcgggcagatcttccggccggacaacttcgttttcggtcagagtggtgctgggaacaactgggccaaggggcactacacagaaggcgcggagctggtggacttcgtgcttgaatgtttgaagaaaagaagcttgaaagctgagactgcctggcagggtttccagctgacccactccctgggtggggggactgggtctgggatgggtaccctcctcatcagtaagatccgggaggagtacccagacaggatcatgaacacgtttagtgtggtgccttctcccaaagtgtcagacacagtggtggagccctacaacgccatcctctcaggccactcagctcgtagaaaacacagacgagacctactgcattgataacgaagctctctacgacatttgcttcaaaacccttaagcttgaccaccccccccttttggggacttgaaccacctggtgtctgctaccatgagtggggtcaccacctgcctggcgcttcccaggccagctcaatgctgacttgcggaaagtggctgtgaacatgggtcccgtttcccccggctgcacttcttcatggtgcggctttgcccccactgaccaagccggggcaagccaagcaagtacccgggcgctgaccgtgccccgaagctcacccaagcaagatgtttgatgcccaagaacatgatgggctgcctgcgacccccgcgcatgggccgcttaccttgacggtttgccgccgtgtttcaggggcccgcatgttccattgaaggaggtggatgagccaaatgcttaaatgtccaaaaacaaaaacagccagctatttttgttgagtaggatcccccaacaatgtgaaaaacgggctgtctgtgacattccccaccttcgggggctaaaaaatgtccgcccaccttcatttggcaaacaagcacggcccatcccaggagctttttcaaagccgcatctcccgaagcagtttcacggcccatgtttccgccgcaaggcccttccctcatttataaccgggggcgagggcatggacgagatgggagtttcacccgaggcccgaaagcaacaagaatgaccctggtgtccgagtaccagccagtacccaggatgccacagccgaggaaggagggcgagttcgaaggaagaagcttaggaaggaaggtggcctagagcctttcagtcactggggaaagcagggaagcagtgtgaactctttattcactcccagcctgtcctgtggcctgtcccactgtgtgcacttgctgttttccctgtccacatccatgctgtacagacaccaccattaaagcattttcatagtgtgaaa

SEQ ID NO: 1906 - DNA, 388 bp, Homo sapiens
cttaggctgtggttgctattgaaggctatggtggggctttgttggggacaggagaaccaggcaggctggtccatggacaccagtggtagggacagctggctaaacatcaggttcgtgaaccccctggcagcctacatgggcactagtagtagcaggtctgggtagaccaattcttgggcctccaggtggcttgcttgagtgctggcagcggcagcagtgggccagatgggtgtcaggtccgcaggccccttggcagcattcattgcataagcagtggcagtagcagcaggaggccaacccttcagcccccttgcagcacgtgagtaccagcaattgcagtggtgggctgaattggccaatcctcaggcctccaggtggcacacagatg

SEQ ID NO: 1907 - DNA, 556 bp, Homo sapiens
  SIMILAR (352)..(528): 771254mologous to Homo sapiens PNAS-125,accession number AF277183,Smith-Waterman Score=218.
tgactgtagttaaatagttgctatttatcataattttattaaagttcagactgaatgtgattagcttatttaatgaaagagtcctattttccagcacatttcatttaatggctgagcattggctagaatactaatgacttttatgtctgctttatatagttgctcaggagaattagaaggcttaggatcaatatggtaaagattttttttaaataattatgtaattcttaaattctcttactattctaaattaggtatatttaatcttgcttttaactggattcaaatctgtagtattataaaagaataccagaggctaaaaggttgactaacactgtgtttaatttttcaatttttagtcatagcacacatcggacatttggaaaacagcagtggcaacaactgtatgacacacttaatgcctggaaacaaaatctgaacaaagtgaaaaacagccttttgagtctttctgatacctgagtttttatgcttataatttttgttctttgaaaaaaaagccctaaatcatagtaaaacattataaactaaaaaaaaa

SEQ ID NO: 1908 - DNA, 1170 bp, Homo sapiens
  SIMILAR (193)..(801): 981254mologous to Bacillus amyloliquefaciens precursor (AA - 29 to 443),accession number X52988,Smith-Waterman Score=1084.
atggtggaattgctcggaagttacacagaggacaatgcttcccaggctcgagttgatgcccacagttgcgccagcagcgtcgcgcggcccagttcccttttccggtcggcgtggtcttgcgagtggagtgtccgctgtgcccgggcctgcaccatgagcgtcccggccttcatcgacatcagtgaagaagatcagcagcaaaacgaaaaataccgagtgcctcaattcgatcaatcaacgattaaaaatattgagtctgcaaaaggacttgatgtgtgggacagctggccgctgcaaaacgctgacggaacagtagctgaatacagcggctatcacgttgtgtttgctcttgcgggaagcccgaaagacgctgatgacacatcaatctacatgttttatcaaaaggtcggcgacaactcaatcgacagctggaaaaacgcgggccgtgtctttaaagacagcgataagttcgacgccaacgatccgatcatgaaagatcagacgcaagaatggtccggttctgcaacctttacatctgacggaaaaatccgtttattctacactgactattccggtaaacattacggcaaacaaagcctgacaacagcgcaggtaaatgtgtcaaaatctgatgacacactcaaaatcaacggagtggaagatcacaaaacgatttttgacggagacggaaaaacatatcagaacgttcagcagtttatcgatgaaggcaattatacatccggcgacaaccatacgatgagagaccctcactacgttgaagacaaaggccataaataccttccgaaccgcgggcatgcaagatccagtcgcagaagacaagaaatatctaagatcagagaagaactgaaggagatagagatacaaaaaccccttcaaaaaattaatgaatccaggagctggttttttgaaaagatcaacagagtagatagactgctagcaagactaatgaagaaaagagagaagaatcaaatagtcgcaataaaaaatgataaaggggatatgacgactgatcccacagaaatacaaactactgtcagagaatactataaacacctatacgcatataaactagaaaatctagaagaaatgggtaaattcctggacacatacacccttccaagactaaaccaggaagaagttgatctctga

SEQ ID NO: 1909 - DNA, 1403 bp, Homo sapiens
  SIMILAR (293)..(1213): 361254mologous to Homo sapiens Human secreted protein encoded by Gene No. 2,accession number AAW73434,Smith-Waterman Score=177.
ggtccggaattctggggacgacgactccgtcttttccggtcggcgtggtcttgcgagtggagtgtccgctgtgcccgggccctgcaccaatgagcgtcccggccttcatcgacatcagtgaagaagatcaggctgctgagcttcgtgcttatctgaaatctaaaggagcctgagatttcagaagagaactcggaaggtggacttcatgttgatttagctcaaattattgaagcctgtgatgtgtgtctgaaggaggatgataaagatgttgaaagtgtgatgaacagtgtgggtatccctactcttgatcctgggaaccagacaagcaaggaagcttttgattgaaagcctatgttgaaaagctgggtccaaatttccgcgaaggtgaaccgccccgtctcttgagactgcagtttgttaaggcaaccttttccacgggaatggattaggaaatactccctgtaaagatacacagtgttatttgcagcctttattaaagtgggcagcatcttgtgggggccatccagtaccatccccaactggagcctgggatcaagtttagaaaatgggatttcctgaactggaatcctaaccactggaaaaaaaagcacaccccttttaaagactacctttatgaaggcacttgtggattgtaagaagagtgatgctgcttcaaaaggcatgggtggaattgctcggaagttacccaggagggcaatgcttcccaagggctcgagttgatgcccacagggtgtattgtaccgagcattgaaagatccaaattgcatttccttttgacccaccttcttactttaaaaccacgtcaagttttttggaaaggcgagcttattccattgttcctttttaaccaaattttgtgagtgcctaaatgggccatcatatgtccaggttttatccggattaattaaggaccttccattgaattccacttggccctgttaccatggacccaggaatatggccaaaaatgaggcttcttttccttttatggggaatgggccagtaggaaaataggggaaatttccttttggaccacaatgccagcaaggaacttcaggattggagcctgatgatggttgaagcatttgttattgacgccggtaaggaactaaaaatggtctactgccaaaattggtccagaccccagagaaaagtagttgtcagtcatagcacacatcgggacatttggaaaacgagcagtggcaacaaactgtattgacacacttaatgcctggaaacaaaatctgaacaaaggtgaaaaacagccttttgagtccttctggatacctgaagtttttatgcttataatttttggttctttgaaaaaaaaggccctaaatcataggtaaaacattataaactaaaaaaatttgaaaaaaaaa

SEQ ID NO: 1910 - DNA, 2656 bp, Homo sapiens
  SIMILAR (834)..(914): 441254mologous to Homo sapiens putative p150,accession number U93569,Smith-Waterman Score=51.
gcgatctcggctcactgcaagctccgcctcctgggttcacgccattctcctgcctcagcctcccaagtagctgggactacaggcacccgccaccacgcccggctaaattttttgtatttttcagtagagacggggtttcaccatgttagccaggatgtccacttttttcttaaatgaacatattgtcttataaccagcaaatgaagttttacttttttgatcagcaaagaatttggtcatagagctatatttttatatttttaaaattgatacagttagataccttcagattacctaagttaagtttttgccaaaatgctattttatgccctttttgtaaagttatgatttattttgtaaatatagttccttatagttttctcttgagtgtttgggacatgagaatagataagattaaattacaatttacaagatcacttcattaggcacaggaaaagtatttaacaaaattcaacaccctttcacaataaaaaataaaaaataaaaaaccctcaacaaactaggaatagaaggaaacttcctcaacctgataaagggcatctatgaagaacccatggttagcatcatacttaatggtgaaggactggattatttccccctgagatcagaaacaagacaaggatgtctgctttggccatttctattcaacttgtactggacagtcaagaaagggcaattaggcaagaaaataaaataaaagtcatctaggttggaaaggaagaagtataactaaatagagatgggagacgatatggtggttttgtgcatagtaatccaagggaaaactatagaaaatccaaaggcatgatttattaataaataaattcagcaaagttacaggatacaggattaaatatgcaggaaattggttatctttcacatatagtatcaactgaataaatcacaaaatgatgttaagaaaacaatttaattttcaacaatggtcaagcttggtggcttgtgcctgtaatcccaacactttgggagtctgaggcagaaagactgctagaggccaggagaccagcctgggaaacagtgagatcccatctctacaaaaacaaacaaacaaaaaacaacaagcaaacaaaaaacagctggatgtgatgacactcatctgtcgtctcagctactcagaggctgaggtgtaaggatggcttgagccccaaagttcgaagctgcaatgagctataactgggtcactgcaatccagcctggatcgacagagttagaccttgactcaaaaaaaaacaaaaaagaaaagaaaaaaattgacagcatcagaaagagtaaaataccaatataattgagggtccagaaatattgatcacatttatcatccaactgacttttggaaaatagtgcttaaggacaattccaatgggggggcaaaatagtctttttcattaaatgatgcttggaaacatggatatccacatggcaaaataatggaaattgggactcctacctcatattgcatataaaaattaactcagagttgacctaagatctaaatgtaagagctaatattgtaagtatcttcaaagaaaacatggcgtaaatctttctgactttgaattaggcaatgatttcttaaataaatgacactaaaaacacaagcaacaaaagaagaaaataggtaaattaaaattaaaaccatttgtgtttccaaggacaatatcaagaaagcaaaaatacaacccacagaatgagataattttttttaaaatcatgtattagttaagggaggaatttgtatttagaatatgtaaagaactgttacaataataattaaaaggcacataattcaatttttaaaaattcaacaaggggtctggaattaacagttctccaaaggaggatacacaaaagggccattaaggcacatggaaaaggtttctcaaccttcactagccatcagggaaatgcaaatgagatctacaatgagatatcacttaacactcactggaatagatatataatcaaagtgataatatcaagtgttggtgaggatgcagagaaattggaaccctcatgcactgttggtggatacccacgtgatataaaaacaaatgtctacacaaaaacttgtgcacagatgttcttgccggcattatttatataggcccaaaaatgaaacggcccctaatttctatcaactaacaagtgcattaaccaaaacgtggcatatccatacaaggaatattattccagccaataaaaaaaagagatgaaagtactgatatggccccccacaaccatggaaaaacccctggaaaaaccatatccaagtgaagaatgccccagacatgaaaggcccacatattatatgatttccatttatatgaaatgtcccagaacaggcgaatatatatagagagaaggcagattagtgggtgccttaggctgaagggttggggaggacaaaggggtgactgctaattagtatggggtttcttttttggggtgatgtaaacgttgtaaagttgattgtggtaatggtggcacaactctgaatatactaaaaaccactgaattgtatactttgaatgtttgaactgtgtggtatgtagattttatctcaagttgttataaaaaattaaattacaaatgcaaaaaaaaaaaaaaaaaaaaaatt

SEQ ID NO: 1911 - DNA, 445 bp, Homo sapiens
  SIMILAR (26)..(349): 881254mologous to Homo sapiens c-fos protein,accession number K00650,Smith-Waterman Score=482.
gcggggaattcgcagactccttctcagcatgggctcgcctgtcaacgcgcaggacttctgcacggacctggccgtctccagtgccaacttcattcccacggtcactgccatctcgaccagtccggacctgcagtggctggtgcagcccgccctcgtctcctctgtggccccatcgcagaccagagcccctcaccctttcggagtccccgccccctcctctggggcttactccagggctggcgttgtgaagaccatgacaggaggccgagcgcagagcattggcaggaggggcaaggtggaacaggagacagaccaactagaagatgagaagtctgctttgcagaccgagattgccaacctgctgaaggagaaggaaaaactagagttcatcctggcagctcaccgacctgcctgcaagaatcctgatgacctgggcttcccagaa

SEQ ID NO: 1912 - DNA, 1622 bp, Homo sapiens
  SIMILAR (1107)..(1214): 1001254mologous to Homo sapiens c-fos protein,accession number K00650,Smith-Waterman Score=180.
caatcccccctcccccggcagcttggagcacggaggagggatgagggaggagggtgcagcgggcgggtgtgtaaggcagtttcattgataaaaagcgagttcattctggagactccggagcggcgcctgcgtcagcgcagacgtcagggatatttataacaaaccccctttcaagcaagtgatgctgaagggataacgggaacgcagcggcaggatggaagagacaagcactgcactgcggaatgcctgggaggaaaagggggagacctttcatccaggatgagggacatttaagatgaaatgtccgtggcaggatcgtttctcttcactgctgcatgcggcactgggaactcgccccacctgtgtccggaacatgctcgctcacgtcggctttccccttctgttttgttctaggacttctgcacggacctggccgtctccagtgccaacttcattcccacggtcactgccatctcgaccagtccggacctgcagtggctggtgcagcccgccctcgtctcctctgtggccccatcgcagaccagagcccctcaccctttcggagtccccgccccctccgctggggcttactccagggctggcgttgtgaagaccatggacaggaggccgagcggcagagcatttggcaggagggggcaaggtgggaacaggtgaggaacttctagcgtactcttcctgggaatgtgggggctgggtgggaagcagccccggagatgcaggagcccagtacagaggatgaagccacttgatggggcttgcttgcacatccgtaactgggagccctggctccaagcccattccatcccaactcagactctgagttctcaccataagaagtactctcatagtttcttccctaagtttcttaccgcatgctttcagactgggctcttctttgttctcttgctgaggatcttattttaaatgcaagtcacacctagtctgcaactgcaggtcagaaatggtttcacagtggggtgccaggaagcagggaagctgcaggagccagttctactggggtgggtgaatggaggtgatggcagacacttttactgaatgtcggtctttttttgtgattattctagttatctccagaagaagaagagaaaaggagaatccgaagggaaaggaataagatggctgcagccaaatgccgcaaccggaggagggagctgactgatacactccaagccggtaggtactctgtgggttgctcctttttaaaacttaaagggaaagttgggagattggagcataagggcccttgagtaagactgtgtctttatgctttccctttatccctctgtatacagggagacagaccaactagaagatgagaagtctgctttgcagaccgagattgccaacctgctgaaggagaaggaaaaactagagttcatcctgggcagctcaccgaccttgcctggcaagattcccttgatggacctggggctttcccagaagagatgtctgtggcttcccttgatctgactgggggcctgccagaggttgccacccggagtctgaggaggccttcacctgcctctcctcaatgaccctgagcccaagccctcagtggaacctgtcaaagcatcagcagc

SEQ ID NO: 1913 - DNA, 2153 bp, Homo sapiens
  SIMILAR (1334)..(1462): 761254mologous to Murine sarcoma virus reading frame v-fos (p55),accession number V01184,Smith-Waterman Score=181.
  misc_feature (1)...(2153): n = a,t,c or g
aaccgcatctgcagcgagcaactgagaagccaagactgagccggcggccgcggcgcagcgaacgagcagtgaccgtgctcctacccagctctgcttcacagcgcccacctgtctccgcccctcggcccctcgcccggctttgcctaaccgccacgatgatgttctcgggcttcaacgcagactacgaggcgtcatcctcccgctgcagcagcgcgtcccccgcccgggatcagcctctcttactaccactcaccccgcagacctcctttttcagcatgggctcgcctgtcaacgcgcaggacttctgcacggacctgggccgtctccagtgccaacttcattcccacggtcactgccatctcgaccaagtccggacctggcagtgggctggtgcagcccgccctggtctccctctgtgggccccatcgcagaccagagccccttcaaccttttcggagtccccaccccctaccgctggggcttagctccagggctggcgttgtgaagaccatgacaggaggccgagcgcagagcattgggcagcaggggcaaggtggaacagttatcttccagaagaagaagagaaaaggagaatccgaagaggaaaggaatatagatggctgcagccaaatgcccgcaaccgggaggaggggagctgactgatacactccaagcgggagacagaccaactagaagatgagaaagtctgctttgcagaccgagattgccaacctgctgaaggagaaggaaaaactagagttccatccctggcagctcaccgcacctgcctggcaagattcccttgattgacctggggcttcccaggaaggagaatgtctgtgggttccccttgatctgactgggggcctgccagaaggttcccaccccggagttctgaggaggccttcacccttgcctctcctcaatgaccctgaggcccaaggccctcagtgggaacctgttcaaggaggcatcagcaggcatgggagctgaaaggaccgaggcccttttgatgatttcctgtttcccagcattcatccagggcccagtggcttcttgaggacagcccgttccgtggccagacatgggacctatcttgggtcctttttatggcaggcagattnggggagccttttngcacagtggctccctggggatgggggcccatggccacagaggctgggagcccctgtgcactccggtggtcacctgtactcccagctgcaactgcttacacgtcttccctcgttttcacctaccccgaggctgactccttccccagctgtgcagctgcccaccgcaagggcagcagcagcaatgagccttcctctgactcgctcagctcacccacgctgctggccctgtgagggggcagggaaggggaggcagccggcacccacaagtgccactgcccgagctggtgcattacagagaggagaaacacatcttccctagagggttcctgtagacctagggaggaccttatctgtgcgtgaaacacaccaggctgtgggcctcaaggacttgaaagcatccatgtgtggactcaagtccttacctcttccggagatgtagcaaaacgcatggagtgtgtattgttcccagtgacacttcagagagctggtagttagtagcatgttgagccaggcctgggtctgtgtctcttttctctttctccttagtcttctcatagcattaactaatctattgggttcattattggaattaacctggtgctggatattttcaaattgtatctagtgcagctgattttaacaataactactgtgttcctggcaatagtgtgttctgattagaaatgaccaatattatactaagaaaagatacgactttattttctggtagatagaaataaatagctatatccatgtactgtagtttttcttcaacatcaatgttcattgtaatgttactgatcatgcattgttgaggtggtctgaatgttctgacattaacagttttccatgaaaacgttttattgtgtttttaatttatttattaagatggattctcagatatttatatttttattttatttttttctaccttgaggtcttttgacatgtggaaagtgaatttgaatgaaaaatttaagcattgtttgcttattgttccaagacattgtcaataaa

SEQ ID NO: 1914 - DNA, 506 bp, Homo sapiens
  SIMILAR (1)..(264): 971254mologous to Homo sapiens Similar to selective hybridizing clone,accession number BC001306,Smith-Waterman Score= 470.
  misc_feature (1)...(506): n = a,t,c or g
aggatcaccctgcacgtcttctgggagctcaactatgacttcctgcccaactactgctacaacggctctaccaaccggtttgttcggacagtgttaccattttctcaggaatttcaaagagataagcagcctaatgcacagcctcagtatctgcatggatccaaggctttgaacttggcctactccagcatttacggcagctaccggaacttcgtgggacctccacactttcaagtcatctgccggcttctcggctaaccagggtatcgccgtggtcatggaggagctgctgaaggtcgtcaagagcctgctgcaaggcacaatcctgcagtacgtgaagacgctgatggaggtgatgcccaagatctgccgcctgccccggcacgagtacggctnctcctgggacttgaggctcagagacaggcccaccgagatggtgcaaggcctgcccctgcccccaggccgtcccatccatctgcaggtccagctgcagggccctcaggcag

SEQ ID NO: 1915 - DNA, 541 bp, Homo sapiens
  SIMILAR (1)..(267): 971254mologous to Homo sapiens cysteine protease,accession number U28014,Smith-Waterman Score=449.
  misc_feature (1)...(541): n = a,t,c or g
atggcagaaggcaaccacagaaaaaagccacttaaggtgttggaatccctgggcaaagatttcctcactggtgttttggataacttggtggaacaaaatgtactgaactggaaggaagaggaaaaaaagaaatattacgatgctaaaactgaagacaaagttcgggtcatggcagactctatgcaagagaagcaacgtatggcaggacaaatgcttcttcaaaccttttttaacatagaccaaatatcccccaataaaaaaggatatggagtcagcgctgagggcatttgctaccagaccagagcacaagtcctctgacagcacattcttggtactcatgtctcatggcatcctggagggaatctgcggaactgtgcatgatgagaaaaaaccagatgtgctgcttatgacaccatcttccagatattcaacaaccgcnactgctcagtctgaangaccaaccccaggtctcattgtccaggctgcagaagtgcaaacnttgggaactgttggtcagagatctcagcatccttgaaattgc

SEQ ID NO: 1916 - DNA, 1245 bp, Homo sapiens
  SIMILAR (13)..(930): 1001254mologous to Homo sapiens cysteine protease,accession number U28014,Smith-Waterman Score=1597.
atggggtctctggaaggcaaccacagaaaaaagccacttaaggtgttggaatccctgggcaaagatttcctcactggtgttttggataacttggtggaacaaaatgtactgaactggaaggaagaggaaaaaaagaaatattacgatgctaaaactgaagacaaagttcgggtcatggcagactctatgcaagagaagcaacgtatggcaggacaaatgcttcttcaaaccttttttaacatagaccaaatatcccccaataaaaaagctcatccgaatatggaggctggaccacctgagtcaggagaatctacagatgccctcaagctttgtcctcatgaagaattcctgagactatgtaaagaaagagctgaagagatctatccaataaaggagagaaacaaccgcacacgcctggctctcatcatatgcaatacagagtttgaccatctgcctccgaggaatggagctgactttgacatcacagggatgaaggagctacttgagggtctggactatagtgtagatgtagaagagaatctgacagccagggatatggagtcagcgctgagggcatttgctaccagaccagagcacaagtcctctgacagcacattcttggtactcatgtctcatggcatcctggagggaatctgcggaactgtgcatgatgagaaaaaaccagatgtgctgctttatgacaccatcttccagatattcaacaaccgcaactgcctcagtctgaaggacaaacccaaggtcatcattgtccaggcctgcagaggtgcaaaccgtggggaactgtgggtcagagactctccagcatccttggaagtggcctcttcacagtcatctgagaacctggaggaagatgctgtttacaagacccacgtggagaaggacttcattgctttctgctcttcaacgccacaaatattcttggtgctgccacctagaggaagtatttcggaagcactgttcacaatagcaaagacgtggaatcaacctaaatgcccatcagtgatagataggaataagaaagggtggtatgtatacatcatggaatactgtgcagctacatcatggaacatcatgctggaatactatgcagccataaaaagaaatcagatcatgtccttcccaagaacatggatggaggtggaagccattatcctcaacaaactaatgcaggaacagaaaagcaaacacctcatgttctcacttaaagtgggaactgaacaatga

SEQ ID NO: 1917 - DNA, 5365 bp, Homo sapiens
  SIMILAR (1779)..(1952): 871254mologous to Homo sapiens cysteine protease,accession number U28014,Smith-Waterman Score=247.
tttgactctgaggctctttccaacgctgtaaaaaaggacagaggctgttccctatggcagaaggcaaccacagaaaaaagccacttaaggtgttggaatccctgggcaaagatttcctcactggtgttttggataacttggtggaacaaaatgtactgaactggaaggaagaggaaaaaaagaaatattaccgatgctaaaactgaagacaaagttcgggtcatggcagactctatgcaagagaagcaacgtatggcaggacaaatgcttcttcaaaccttttttaacatagaccaaatatcccccaataaaaaaaggtgataaattggggtcacagaggcagaaatcacaatttatgttctgcaatatcctgcagctcatccgaatatgggaggcttggaccacctgagtccgggagaatcctaccagattgcctcaagcctttgtcctcatggaagaattcctgagactatgtaaagaaagagctgaagagatctatccaataaaggagagaaacaaccgcacacgcctggctctcatcatatgcaatacagagtttgaccatctgcctccgaggaatgggagctgactttgacatcacaggggatgaaggagctacttgaggggtctggactatagtgtagatgtagaagagaatctgacagccagggatatggagtcagcgctgagggcatttgctaccagaccagagcacaagtcctctgacagcacattcttggtactcatgtctcatggcatcctggagggaatctgcggaactgtgcatgatgagaaaaaaccagatgtgctgctttatgacaccatcttccagatattcaacaaccgcaactgcctcagtctgaaggacaaacccaaggtcatcattgtccaggcctgcagaggtggtgagtgctgagactgaacatctaacagttatgaaggtgtatgcagaggattgtgatgtttggtttatatttaggggcaacattcttaaacctcatccagtgtaaagaaagtacattgaattctaaagaaactctacctaagggtctggtataacaagaaattgtctcatcaaaattagtggagaaatttctgttcaattttatccacagtaagtggtgaaggagatcatcagaatccctaaatcaaagttaaacagaaatactcaaactttggaatggaatcattttcatgatagcttgatttgtaaatgttttacagaaattttgacattgtgtggtttgagaagaatttcatttgaaactggggccattatgtaaaacagcatccctttttcttataattattgagggggaaattagtaaagagatcaggggactgtagaatgttgcagtgccactttgctccaaagattcaattgcctcatggctggctgaggatggtggctcatgcctataatcccaacactttgggaggccaagacaggaggatggcttgaggccaggaatttgagaccaattgtctgatagctcttgggagctatttttcaaaagaaaacagattttttttctagaaaatggtaaattcaagatgatttcactatcagtaggcacattgttgaatgacactggagagaaagaaaagtggtgtgtgtgtgtgtgtgtgtgtgtctgtttctctgtgtgtgtttgtatgtgtgtgggtctgtatgtatgaaactagtaagaatgaacattcaaaaagaacaaggtgggcaactgtgacagccattctgtgggaggcacagcagtgtgcagaaagttaatgtctccatagcaaaccgtggggaactgtgggtcagagactctccagcatccttggaagtggcctcttcacagtcatctgagaacctggaggaagatgctgtttacaagacccacgtggagaaggacttcattgctttctgctcttcaacgccacgtatgtatctttcagtggcagtaagggatttgtgggcctgaggccatctttgaatgaatctagaaaatcaagaatccctatgaaacaatgatctgatagaatgttgtgtgctctccacatattttacatgatcttatgtgtgccgtgagaacagattcctaaagcaacccgatacatggaaacccattcaccactcaccatttaaacagatgatgaattctgttttttttattaagcccatttaacattttacatagtgtttttatggattccaggaatggcttctctttctcaaatgatcaacttcaagtcttctttccatatttcacatctgattatacaatgagcagtgccattgcatgccctgctagaactgtggataccctttaaaacaagtagaaaatgatagggtggggctgattaggtctaatctcagggaacactggttagtatttcatgtctaggtaattatcttaaggagcgtacatttaactgtttttgatttgtatatttttaaatcttattttttaaaaccactttattgaggtatgattgacatacataatgttacatatttaatgtatacaacttaatgagtttggagatttctatgtactcctgaaatcatcaccactatctatgccataaacatatctctcttctccaaaagattcttacacttctctgtttattattatcatcattccgtgactgcgtgtgagaagtatacttagcataaaatctactctcttaacaaatttcaagtacataacacaatgttggttactactggcaccatcctgtacaatagatttttatcacttttttcagcttctatcactgaaacttgtcatgtgttcatctatttctattatacggtgaaagacagtgtggcataatctgcaaacaactttggagcctggtggcaattttttgttgcttactcactgtgtgaacatggggaagttccttcatctttctgtgcttctatttcttcctctgtaaagtgggataattctagttatttctcaagcccctataaaagctgagagaatgaacatgagttttgtagtagaaagccaatcccaagaatcaaaatttcttcaatacacaatctcttgcaatgcttaccaactgcaacttttgatcaccttttgctaggttttctgtttacgttctgtggaaagtaggtaaatgtcaggttgtaagtgcttcctacaaatctgtaaagataattcccaagctatgcttttctttttaaaaacattctcaaaacaaaaatatgaacaaaaacatagtgaaagtcatagcccaaggcatacccatctgtatcattatagacaacgtgtcctggagagacagcacaatgggctctatcttcatcacacaactcatcacatgcttccagaaatattcttggtgctgccacctagaggaagtatttcggaaggtacagcaatcatttgaaactccaagggccaaagctcaaatgcccaccatagaacgactgtccatgacaagatatttctacctctttcctggcaattgaaaatggttaagtattgagagttgttggtggtatgtgaaataaataagagagtgatattggtggttaagttcaatgacaaatgacagctgagtacttggatggtcaaattggtgtttttgttgatatagtctggtgattatctgctacttctttccgacttacatgtatttggattcctccaactctacaattaatcaggcaatcaatcaatcaatcaaggaggtaaggaaaaccgcagcagaatgtgatgatgaaaaaccaaggatagtaattattaaaatagaaacatgctcatgcttccattactatttatattcatttatctctcatagtctttctcttttattcccctttcttacacacacacacacacacacacagagagagagagagagagagagagacactaagtagccaaacattgcatcaaaccctaaacaaaacagagtaaacaaaggagctaactctggagaaagcagcattttgatcctctgagtgaggatgtcacagcaaataccacattactgacatccagataccattaccagatggtacagaatacatcctacactgtagagtttgtgttgatccaggctctggttctcagactgttctcacaatgcagatcaccaatcactcagggttggcttttgaatcttcaatcacagtccagaagttccttcaagctcccatgtaacttttgttattattttgaccaaaatattatagaatgggtacattgagtctggactaaatgattactttcttcactcataatagctttatttaacactagactataagactattatcaatctccctctaagatacatacttaaaattatattttatagtgaaatgtataaagttgttctcaatacttccaacatttaccacataatttttactcttggtttctgacacttcagtcacaatattgcatcatttcagcataacagctttcagtgcctaatccatccagtggggctgcatttggacattgaattgtttgttgactaatatttgccaacactaactgtgcaccaggttttgttctagatgcttggaatatgccaattaacaacgtaaatagatttcttacactctgaaagcttatattctagtgagtagaaacagactctgaagacataaagtggtaaatatatcacaggccagagagcaaaaaaaggtaaaaggaaaaataaaggaagacaaaggaaaacacagaatgatggatgctgtactcctatagatatttcactcaaaagcttttcttgaaataatgaaatcagaacaaagaatggacagagttggggagtgaataatgtggttcttatgcaggaaaagtgttccagcacagaatacagccagtgcaaatgccctgggatagcaatgcactaaacatgtttaaagaactgcaatgagacagtgtgaccaaaagagaacgtgagtggagaaaatggcagagacaaattaggagaagcagtgagaagccagatcgcgtggttctatgttatcacatggtaaacctttaaaaattattatctgagcgagacaggaagcctttctagtgctttagaaaaaagaaataatatgctttaaattaggttttacaaagatcacattttggtgaatagactaagatgtcacagatggaagtcaagggaagtggcaagagcacatggaagaggatgcaagaagaatcatgatgagggatgggatgaaggcagcaaggggtaaccatcttgaccttctgttttttctctcccctgcaggaagccacaagcagcccagccctccttaatcaacttcaaggagcaccttcattagtacagcttgcatatttaacattttgtatttcaataaaagtgaagacaaaaaaaaaaaaaaaaa

SEQ ID NO: 1918 - DNA, 1611 bp, Homo sapiens
  SIMILAR (54)..(974): 521254mologous to Homo sapiens cysteine protease,accession number U28014,Smith-Waterman Score=576.
  misc_feature (1)...(1611): n = a,t,c or g
tttgactctgaggctctttccaacgctgtaaaaaaggacagaggctgttccctatggcagaaggcaaccacagaaaaaagccacttaaggtgttggaatccctgggcaaagatttcctcactggtgttttggataacttggtggaacaaaatgtactgaactggaaggaagaggaaaaaaaagaaatattacgatgctaaaacctgaagacaaagttcgggtcatgggcagactctatgcaagagaagcaacgtatggcaggacaaatgcttcttcaaacctttttttaacatagaccaaatatcccccaattaaaaaagctcatccgattatggaggctggaccacctgagtcacggggaatctacagacgccctcacgctttgtcctcatgaagaattcctgagactatgttaaagaaaggagctgaaggagatctatcccattaaagggaggaggaaacaaccgcacacggctgggctcttcttcatatggcattacagagtttgaccatctgcctccgagggaatgggagctgactttgacatcacagggatgaaggagctacttgaggggtctgggactatagtgtaggtgtaggaaggagattcttgacagccaggggtatgggattcagcgctggagggcatttgctaccagaccagagcacaagtcctctgacagcacattcttgggtactcatgtctcatgggcatcctggagggaatctgcggaactgtgcatgatgagaaaaaaccagatgtggctgctttatgacaccatcttccagatatttcaacaaccgcaacttgcctcaggtctgaagggacaaaccccaagggtcatcaattgtccaaggcctgcagagggtgcaaacccgtcggggaactgatgggtcaagagactctccaagcatcccttggaaagtggccttcttcacagtcatctggagaaccctggaggaaagatgctgtttaacaagacccccacgtggaagaagggacttcattggctttcctggctccttcaaacggccacacaaccgtgccccctgggagagaccagcacaatggggctctatcttcatcacacaacctcatcacatgccttcccagaaatattccttggtgctgcccaccctagaggaagtatttcgaaagggtacagcaattcatttggaaactccaaggggccaaagctcaaatggcccaccatagaacggactgtccgatgacaaggatatttctacctctttccgggggaatttgaaaattgggaaggccacaagcagcccagcccttccttgaatccaactttcaaggaggcacctttctttgttacagcttgcatattttaacattttgtatttcaataaaagtgaagacaaacgnnnnnnnnnnnnnnnnnnnnnnnnnnnnnnnnnnnnnnnnnnnnnnnnnnnnnnnnnnnngggggggcccctttaaaaaaacccccgggggggcccaattttcccgggggttgggaactaaaaaccttcccccaaagggggggtgtaaaaaaccccccggggggattttgggaaaaacccctttttttggggggggaaaaaatgggggcaacccccccaaaa

SEQ ID NO: 1919 - DNA, 708 bp, Homo sapiens
  SIMILAR (247)..(215): 631254mologous to Homo sapiens Human PRO940 protein sequence,accession number AAY41724,Smith-Waterman Score=42.
tcagacagtggaaggagcccaggtccaggccagggaaagcctggacagtggccccatgtctctgagcccagtgtcttctgctccagagcccgggttttgaacctccatgggttttggcagctcatccccgagctctgcaaagcctgcagaggaaacacggccgctcagactgtggaggaactggtgaggaggcatctggaagcagtctggagtcagacgcaggctttggccctccaggacccgggggatgtgccgttcctcaggttttccaggactgtcctgtttgcttgggaaaccatcactctcaggttctcggaggatactgcacagaaggtccagggctcgctgctgggagccaagcctgttctccgctcggcagggtagcgccctgaatccccggcccttaccccacgcagctccagccccaggttctggggccccaggggtgggacgaggagaggactctgtcctgcaggaccagctcagcgtggcagggggctggctgtcagcagcacagaggagccgcagaactggcctttctgaacttccagatatatgacgtttccctggagttccgggaggccacacggagtcggacggtcctctgtgcgccacaccctttctggagaagtccacatggcaggtgaggtcggtgtcgtggcctgggggccgcccccagcacggcagcagcaggggcagcagcagcat

SEQ ID NO: 1920 - DNA, 664 bp, Homo sapiens
  misc_feature (1)...(664): n = a,t,c or g
caaactgaggtgnnnnnnnnnnnnnnnnnnnnnnnnnnnnnnnnnnnnnnnnnnnnnnnnnnnnnnnnnnnnnnnnnnnnnnnnnnnnnnnnnnnnnnnnnnnatttattttcgtttcacaagtctataaaagattaggggggttagctgcccttcagcacccaaatcaggtgagcagacgggtcagcatcacaatatcaacaccgggttccatcctctgccccttggggcagtgaccagtccagtgcctcagggtcctggcgaccgcttgtgtcctcctccctcatctcctgaaccagcacagccagcccaggctgaccctgctcagacagtggaaggagcccaggtccaggcccagggaaagcctggacagtggccccatgtctctgagcccagtgtcttctgtctccagagcccgggttttgaacctccatgggttttggcagctcatcccccgagctctgagaggagggcgtcatcatcaggattagatgatgatctcccagcacaggagactgggaatggctcaggtgctaccaggacgtgcagctgatggtggctggagcccgttctctgtccaccacacccacaccctgccccttgccccaaaatggaaccgtggcttagatttaatcaggaattccaccacactgcactaatggtc

SEQ ID NO: 1921 - DNA, 1109 bp, Homo sapiens
  SIMILAR (1091)..(984): 771254mologous to Homo sapiens Human secreted protein encoded by gene 22 clone HMSJW18,accession number AAY02671,Smith-Waterman Score=139.
gggggagaaagataagttgaggacggggctttatcgtttgttaatcagaggtggtgatagagtggaaaatataacacgtttcggcattcaggagacctaccttccaatgtaaataagcccttgcgggcttgatattttattccttttgtaccttcatctcataatctgtatgaagactttagagttccaagctcttaagatccctattagctctcaaattgtgggataaaaataattgttaaggcatgcctaatactcttatacagactttgtaaactgatttcacagaagcgattaaggaattgtactgtctttaaacaatatttagaatgcttcagtaaaagccttttttaaaaaatttttctaatgatgtagtaaatgtacctaatataaagttaagtggttttatttaatacttttcacctgaccatgattatgttatatataagaggatttatagtttgcatgcctgatataatctatttaatttcctttacgagatttttgtactatgaagataagtggtctcattttaccaattaactcgttccagagtgatatggttctgtgcactttgattttcaaattggctatttattttttaatgtaattaacctttcacaatttaaattgaaggatattctgatccttaggttataaatatgtgacttgatggtttatgtaacattcgaggaatcatgttttctattacaaaatgattaaaagttttgatacataccttgtatgttgcttgacagatctgttttagaaaacattcctctgcccttttgaaatgaagccatgtatttgaaattatttcccaaacaattatatcttaagcgtgtgctacatagtaatcatagtcattttaatttagattataaagctatattttaactttgaggtttgtgaattttcttagacatattaatgactttatagttaatggtgctctcagattttatttttaagttaaaaatttgccaggcgcggtggctcacgcctgtaatcttagcaccctgggaggccgaggcaggtggatcacgtgaggtcagcagtttgagaccagcccagccagcatagtgaaacccccatctctactaaaaatt

SEQ ID NO: 1922 - DNA, 2677 bp, Homo sapiens
  SIMILAR (226)..(1065): 761254mologous to Homo sapiens DNA encoding a human thioredoxin family active site molecule MP-4,accession number AAB18615,Smith-Waterman Score=1017.
cctaggcggtttaagcagccgcttttctgtcatgcgcattgcggagagtcgttcttccctctttcccgacttcaccactcactgggataagacccctgtcatgcgcattgagagtcctctagacaggcgctcctcgcaaaaccgctaagcgcttgcgctgagcagcccgctagggcggaagtgggagctgcgaccgcgctccctgtgaggtgggcaagcggcgaaatggcgccctccgggagtcttgcaggtcccctggcagccctggtgctggtgctttggggagctccctggactcacgggcggcgggacaaacgttcgcgtcatcacggacgagaactcggagagaactgctggaaggagactggatgatagaattttatgccccgtggtgccctgcttgtcaaaatcttcaaccggaatgggaaagtttttgctgaaatggggagaagatcttgagggttaatattgcgaaagtagatgtcacaaaagcagccaggacttgagtggacggtttatcattaactgctcttcctactatttatcatttgtaaagatggtgaattttaggcggttattcagggtccaaggactaagaaggacttcataaactttataagtgataaagagtggaagagtattgagcccgtttcatcatggtttggtccaggttctgttctgatgagtagtatgtcagcactctttcagctatctatgtggatcaggacgtgccataactactttattgaagaccttggattgccagtgtggggatcatatactgtttttgctttagcaactctgttttccggactgttattaggactctgtatgatatttgtggcagattgcctttgtccttcaaaaaggcgcagaccacagccatacccatacccttcaaaaaaattattatcagaatctgcacaacctttgaaaaaagtggaggaggaacaagaggcggatgaagaagatgtttcagaagaagaagctgaaagtaaagaaggaacaaacaaagactttccacagaatgccataagacaacgctctctgggtccatcattggccacagataaatcctagttaaattttatagttatcttaatattatgattttgataaaaacagaagattgatcattttgtttggtttgaaagtgaaactgtgacttgcttgtatattacagcgttcagtcctagattgtcattaaattgaagactcctacattcagaacataaaagcactaggtatgtaagtttgaaatatgatttaaggacagtatggtggtttaactagttctctaatttttgaaaaatcttgccaaacaataagatttatgtatatttgtttaataataacctgtttcaaatctgagtttttgaaaatttacatttccccagtattgcattattgaggggtttaaggaggattattttagagaaaaatatttctcatttgatataatttttctctgtttcactgtgtgaaaaaaaggaagatatttcccataaatggggaagtttgcccattgtctcaaggaaatgtgtatttcagtggaccaatttcgtgggtctttttggggggtatattccaaaatttccttgtatttttaggttatgcaactaataaaaactaccttacattaattaattacagttttctacacatggtaatacaggatatgctactgatttaggaagtttttaagttcatggtattctcttgattccaacaaagtttgattttctcttgcatttttcttacttactatgggttacattttttatttttcaaattggatgataatttcttggaaacattttttatgttttagtaaacagtatttttttgttgtttcaaactgaagtttactgagagatccatcaaattgaacaatctgttgtaatttaaaattttggccactttttttcagattttacatcattcttgctgaacttcaacttgaaattgtttttttttttttttctttttggatgtgaaggtgaacattccctgatttttgtcctgatgtgaaaaagccttggtattttacattttgaaaattcaaagaagcttaatataaaagtttgcattctactcaggaaaaagcatcttcttgtatatgtcttaaatgtatttttgtcctcatatacagaaagttcttaattgattttacagtctgtaatgcttgatggttttaaaataataacatttttatatttttttaaaagacaaacttcatattatcctgtgttcctttcctgactgggtaatattgtgtggggatttccacggggtaaaagtccagtagggtgggaacattttaggtgtatttttacctcccttaaagagcctagaataccataggttttcacccttaaaagaaggggggaaaatccataaaatacaatggattccaactgacccattacgtagtaggacaatttctgttaatgtccccttctttctagggctctgttggctgtgtggaatccattaggtttacagtattcgtaatatacaagttttctttaaagccctctcctttagaatttaaaatattgtaccattaaagagtttggatgtgtaacttgtgatgccttagaaaaatatcctaagcacaaaataaacctttctaaccacttcattaaagctgaagaccagtaaaaaaaaaaaaaaa

SEQ ID NO: 1923 - DNA, 448 bp, Homo sapiens
  SIMILAR (106)..(447): 791254mologous to Homo sapiens Human secreted protein clone aw92_1,accession number AAW73624,Smith-Waterman Score=495.
catcgcggtggacttcctgggctcaaacttccagattttcaggattccatttttgagtatttcaacactgcttttcttttacatgacctgacatttagaaccagctcagctagtgagcaagaaacacaagctccgaagccagaagcgtccccgtcgatgtctgtggctgcatcagagcagcaggagccaaaagctcaccagttcagcatcaagtccttctccagccctactcagtgcagccactgcacctccctgatggttgggctgatccggcagggctacgcctgcgaggtgtgttcctttgcttgccacgtgtcctgcaaagacggtgccccccaggtgtgcccaatacctcccgagcagtccaagaggcctctgggcgtggacgtgcagcgaggcatcggaacagcctacaaaggccatgtcaaggtcccaaagcccacggggg

SEQ ID NO: 1924 - DNA, 641 bp, Homo sapiens
  SIMILAR (16)..(429): 981254mologous to Homo sapiens Human secreted protein clone aw92_1,accession number AAW73624,Smith-Waterman Score=664.
ataatcagtccacacattaacaaagatgaggatgtgcagcgggacctggagcacagcctgcagatggaagcttacgagaggaggattcggaggctggaacaggagaagctggagctgagcaggaagctgcaagagtccacccagaccgtgcagtccctccacggctcatctcgggccctcagcaattcaaaccgagataaagaaatcaaaaagctaaatgaagaaatcgaacgcttgaagaataaaatagcagattcaaacaggctggagcgacagcttgaggacacagtggcgcttcgccaagagcgtgaggactccacgcagcggctgcgggggctggagaaacagcaccgcgtggtccggcaggagaaggaggagctgcacaagcaactggttgaagcctcagagcggttgaaatcccaggccaagtcggcactgagtggcccagcaccgcctagccctgccaccccactgccctcctgggccttttgctggatgggcacctggggggttctggtttttacttttttaatgtaagtctcagtctttgtaattaattattgaattgtgagaacatttttgaacaatttacctgtcaataaagcagaagacggcagttttaaagttaaaaaaaaaaaaaa

SEQ ID NO: 1925 - DNA, 2268 bp, Homo sapiens
  SIMILAR (1266)..(2006): 701254mologous to Human herpesvirus 4 BKRF1 encodes EBNA-1 protein, latent cycle gene,accession number V01555,Smith-Waterman Score=755.
tttcgtcgtagcccgagccccgccgccgtgtcgctcggcctgggcgtggccgtcgtgtcgagcctggtgaacgggtccacgttcgtgctacagaagaagggcatcgtgcgtgccaagcggcgaggtacttcctatttaacagacattgtgtggtgggctggcacaatcgcaatggctgttggccagattggaaacttcctggcttacacggcggtccccacggtcctggtaacccccctgggcgcccttggagtaccgttcgggtccattttagcttcctatctcctgaaggaaaagctcaacatcttgggcaaggtggggtgcctgctaagctgtgcaggctccgtcgtgctgattatccactccccaaagtctgagagtgtgacaactcacgctgagctggaggaaaagcttgaccaatccagagttggggggctaccctgtgcatccttactggtcatgctggctgctgctcatcttctggatccgtgccggcccatgggcccaccaacatcatggtctacatcagcatctgctccttgctgggcagatacaccgtgccttccaccaagggcatcgggctggcggcccaagacatcttgcataacaacccgtccagtcagagagccctctgcctgtgcctggtactcctggccgtgctcggctgcagcatcatcgtccagttcaggtacacgcaacaaggcgctggagtgcttcgactcctcggtgttcggggccatctactacgtcgtgtttaccacgctggtcctgctggcctcagccatcctcttccgggagtggagcaacgtgggcctggtggacttcttggggatggcctgtggattcacgaccgtctccgtggggattgtccttatgcgggtgttcaaagagttcaatttcaaccttggggagatgaacaagtctagagacacctggcgacaaagctctcccctcattgtggcaccccgggaccactttcatcttgaaagaggagtccagtttcagaacatgaattcagtcatgggaagccacctggtgatggttgctctctctcccggggtggattttattccccagccagacgatcctgcagccttgctggttaccgagctctttgctaacagacttgtttcagggtatgcgccggccacaggcctgcaaggcacaatcctgcagtacgggaacacgctgatggaggtgatgcccaagatctgccgcctgccccggcacgagtgcggctctcctggtcccgcctggatcctgcgccccgcccccgtccccacactctacgcgccccgccctccgcgctcagccgactggggccttgtaaaggaaccggaacccggcgggagagagccccgggggcggggtgagcagaggctgcgggaccaggagaaggaggtgtgggggcgggagcagcaaatgcaggagcaggagcagcagatgcgggagcaggaggagcagatgcgggagcaggaggggcaggtgcgggagcaggaggggcaggtgcgggagcaggaggggcaggtgcgggagcaggaggggcaggtgcgggagcagggggggcgggtgcgggagcaggaggggcaggtgcgggagcaggaggggcaggtgcgggagcaggaggggcaggtgcgggagcaggaggggcaggtgcgggagcaggaggggcaggtgcgggagcaggaggggcaggtgcgggagcaggaggggcaggtgcgggagcaggaggggcaggtgcgggagcaggaggggcaggtgcgggagcaggaggggcaggtgcgggagcaggaggggcaggtgcgggagcaggaggggcaggtgcgggagcaggaggggcaggtgctggagcaggaggggcaggtgcgggagcaggaagggcaggtgcgggagcaggaggggcaggtgcgggagcaggaggggcatgtgcgggagcaggaggggcaggtgcgggagcaggaggggcaggtgcgggagcaggagggccagttgcgggagcaggaggggcagtttgttctcagactatattcacaaggtcacatggcggcttacacttgtggaggccttgttgaccgttctttttacatattgatgatcttgatgttcggcttgtctcctcggaagaagaatgggatgcaagaggtgctgcctaaccctgggcgctcctgggcgctcttcacttccgggggaaggtggctgatctgccgtacagtcgggggggaaaagcgaaaaaccgttgccgcctcttctcctttggctccagcctga

SEQ ID NO: 1926 - DNA, 5196 bp, Homo sapiens
  SIMILAR (472)..(2595): 961254mologous to Homo sapiens CDC42-binding protein kinase beta,accession number AF128625,Smith-Waterman Score=3414.
atggctgctgcaggcacggggacatgctggctgcttgccattggcagccagaaggtatggaagccgctgtcactgccagttgctgttgtcaaaatgaagaatactgaacgaatttatgcaatgaaaatcctcaacaagtgggagatgctgaaaagagcagagaccgcgtgcttccgagaggagcgcgatgtgctggtgaacggcgactgccagtggatcaccgcgctgcactacgcctttcaggacgagaaccacctgtacttagtcatggattactatgtgggtggtgatttactgaccctgctcagcaaatttgaagacaagcttccggaagatatggcgaggttctacattggtgaaatggtgctggccattgactccatccatcagcttcattacgtgcacagctggaccccaaaagccttccgggtgaggaaatcagtggcagaccaggaccctgtgggtgcccctcacagagacattaaacctgacaatgtccttttggacgtgaatggtcatatccgcctggctgactttggatcatgtttgaagatgaatgatgatggcactgtgcagtcctccgtggccgtgggcacacctgactacatctcgccggagatcctgcaggcgatggaggacggcatgggcaaatacgggcctgagtgtgactggtggtctctgggtgtctgcatgtatgagatgctctatggagaaacgccgttttatgcggagtcactcgtggagacctatgggaagatcatgaaccatgaagagcgattccagttcccatcccatgtcacggatgtatctgaagaagcgaaggacctcatccagagactgatctgcagtagagaacgccggctggggcagaatggaatagaggatttcaaaaagcatgcgttttttgaaggtctaaattgggaaaatatacgaaacctagaagcaccttatattcctgatgtgagcagtccctctgacacatccaacttcgacgtggatgacgacgtgctgagaaacacgaagtctttgaaaatcactaacctggtgacggcctgtgccactgtcatcatcgaaatcagagtgtgtctcctctgtttttctgatcgaggctctctgaagagcataatgcagtccaacacattaaccaaagatgaggatgtgcagcgggacctggagcacagcctgcagatggaagcttacgagaggaggattcggaggctggaacaggagaagctggagctgagcaggaagctgcaagagtccacccagaccgtgcagtccctccacggctcatctcgggccctcagcaattcaaaccgagataaagaaatcaaaaagctaaatgaagaaatcgaacgcttgaagaataaaatagcagattcaaacaggctcgagcgacagcttgaggacacagtggcgcttcgccaagagcgtgaggactccacgcagcggctgcgggggctggagaagcagcaccgcgtggtccggcaggagaaggaggagctgcacaagcaactggttgaagcctcagagcggttgaaatcccaggccaaggaactcaaagatgcccatcagcagcgaaagctggccctgcaggagttctcggagctgaacgagcgcatggcagagctccgtgcccagaagcagaaggtgtcccggcagctgcgagacaaggaggaggagatggaggtggccacgcagaaggtggacgccatgcggcaggaaatgcggagagctgagaagctcaggaaagagctggaagctcagcttgatgatgctgttgctgaggcctccaaggagcgcaagcttcgtgagcacagcgagaacttctgcaagcaaatggaaagcgagctggaggccctcaaggtgaagcaaggaggccggggagcgggtgccaccttagagcaccagcaagagatttccaaaatcaaatccgagctggagaagaaagtcttattttatgaagaggaattggtcagacgtgaggcctcccatgtgctagaagtgaaaaatgtgaagaaggaggtgcatgattcagaaagccaccagctggccctgcagaaagaaatcttgatgttaaaagataagttagaaaagtcaaagcgagaacggcataacgagatggaggaggcagtaggtacaataaaagataaatacgaacgagaaagagcgatgctgtttgatgaaaacaagaagctaactgctgaaaatgaaaagctctgttcctttgtggataaactcacagctcaaaatagacagctggaggatgagctgcaggatctggcagccaagaaggagtcagtggcccactgggaagctcagattgcggaaatcattcagtgggtcagtgacgagaaagatgcccggggttaccttcaagctcttgcttccaagatgaccgaagagctcgaggctttgaggagttctagtctggggtcaagaacactggacccgctgtggaaggtgcgccgcagccagaagctggacatgtccgcgcggctggagctgcagtcggccctggaggcggagatccgggccaagcagcttgtccaggaggagctcaggaaggtcaaggacgccaacctcaccttggaaaggtgttccccgtggcagcctgacttcctctgtcccctgcacgaagttgctggaattgcaaggctacccgtgcgggtggtgctggtgcttcttggtgcagccaccatcttgccagttatgggaaagatattgatggggctgacggctgagcggcctgggccctgtgtccctgaagaacagaggactcgcctgggaacaagattaggaagcaaactaaaggattccgaagccaaaaacagagaattattagaagaaatggaaattttgaagaaaaagatggaagaaaaattcagagcagatactgggctcaaacttccagattttcaggattccatttttgagtatttcaacactgctcctcttgcacatgacctgacatttagaaccagctcagctagtgagcaagaaacacaagctccgaagccagaagcgtccccgtcgatgtctgtggctgcatcagagcagcaggaggacatggctcggcccccgcagaggccatccgctgtgccgttgcccaccacgcaggccctggctctggctggaccgaagccaaaagctcaccagttcagcatcaagtccttctccagccctactcagtgcagccactgcacctccctgatggttgggctgatccggcagggctacgcctgcgaggtgtgttcctttgcttgccacgtgtcctgcaaagacggtgccccccaggtgtgcccaatacctcccgagcagtccaagaggcctctgggcgtggacgtgcagcgaggcatcggaacagcctacaaaggccatgtcaaggtcccaaagcccacgggggtgaagaagggatggcagcgcgcatatgcagtcgtctgtgactgcaagctcttcctgtatgatctgcctgaaggaaaatccacccagcctggtgtcattgcgagccaagtcttggatctcaggtctgcgtttgggcagcactgtccttgctctgtgaatcttcctcagctatctttagccaaaaggacggtgacggcctctctcttaggtgcaccttctaagaccagctcgctgctcattctgacagaaaatgagaatgaaaagaggaagtgggttgggattctagaaggactccagtccatccttcataaaaaccggctgaggaatcaggtcgtgcatgttcccttggaagcctacgacagctcgctgcctctcatcaaggccatcctgacagctgccatcgtgggttgtgtccttcaggtgtctgaagcaacagcacttccggcggcgctgcagtgcccatctgaaaatcagatgaaggtcacaggtccatttgggtttgtagacagtttctccatgcatgttaagaagcagacgaggccggatgcagacaggattgcagtcggcctagaagaagggctctatgtcatagaggtcacccgagatgtgatcgtccgtgccgctgactgtaagaaggtacaccagatcgagcttgctcccagggagaagatcgtaatcctcctctgtggccggaaccaccatgtgcacctctatccgtggtcgtcccttgatggagcggaaggcagctttgacatcaagcttccggaaaccaaaggctgccagctcatggccacggccacactcaagaggaactctggcacctgcctgtttgtggccgtgaaacggctgatcctttgctatgagatccagagaacgaagccattccacagaaagttcaatgagattgtggctcccggcagcgtgcagtgcctggcggtgctcagggacaggctctgtgtgggctacccttctgggttctgcctgctgagcatccagggggacgggcagcctctaaacctggtaaatcccaatgacccctcgcttgcgttcctctcacaacagtcttttgatgccctttgtgctgtggagctcgaaagcgaggagtacctgctttgcttcagccacatgggactgtacgtggacccgcaaggccggagggcacgcgcgcaggagctcatgtggcctgcggctcctgtcgcctgtagttgcagccccacccacgtcacggtgtacagcgagtatggcgtggacgtctttgatgtgcgcaccatggagtgggtgcagaccatcggcctgcggaggataaggcccctgaactctgaaggcaccctcaacctcctcaactgcgagcctccacgcttgatctacttcaagagcaagttctcgggagcggttctcaacgtgccggacacctccgacaacagcaagaagcagatgctgcgcaccaggagcaaaaggcggttcgtcttcaaggtcccagaggaagagagactgcagcagaggcgagagatgcttagagacccagaattgagatccaaaatgatatccaacccaaccaacttcaaccacgtggcccacatgggcccaggcgacggcatgcaggtgctcatggacctgcctctggcagccatgctggctgagactgtcccaaaggcagtgcctgcgaggctggcgctgtgctctgacctggcgctcctgtcacacaagcccgtctccgctgaagctctgttcacgagcacttaccctgtcacaaggccttgtgcacaggcctcgggccgccctgggcagtga

SEQ ID NO: 1927 - DNA, 356 bp, Homo sapiens
  SIMILAR (1)..(147): 1001254mologous to Homo sapiens CDC42-binding protein kinase beta,accession number AF128625,Smith-Waterman Score=236.
gacccgctgtggaaggtgcgccgcagccagaagctggacatgtccgcgcggctggagctgcagtcggccctggaggcggagatccgggccaagcagcttgtccaggaggagctcaggaaggtcaaggacgccaacctcaccttggaaaggtgttccccgtggcagcctgacttcctctgtcccctgcacgaagttgctggaattgcaaggctacccgtgcgggtggtgctggtgcttcttggtgcagccaccatcttgccagttatgggaaagatattgatggggctgacggctgagcggcctgggccctgtgtccctgaagaacagaggactcgcctgggaacaagattaggaag

SEQ ID NO: 1928 - DNA, 542 bp, Homo sapiens
  SIMILAR (1)..(354): 971254mologous to Homo sapiens CDC42-binding protein kinase beta,accession number AF128625,Smith-Waterman Score=623.
aggaggtgccagaccgcgtgctttcgagaggagcgcgatgtgctggtgaacggcgactgccagtggatcaccgcgctgcactacgcctttcaggacgagaaccacctgtacttagtcatggattactatgtgggtggtgatttactgaccctgctcagcaaatttgaagacaagcttccggaagatatggcgaggttctacattggtgaaatggtgctggccattgactccatccatcagcttcattacgtgcacagagacattaaacctgacaatgtccttttggacgtgaatggtcatatccgcctggctgactttggatcatgtttgaagatgaatgatgatggcactgtaggtatttttgttggagattttccatttggttttgggtttggcatatagtcagaagggaagttttcaatttgaggtacaattaagaaaccaagtatattaattcagaaaatgaatccattttggagatagttgaaattttctgtttggggagttttgtttcccaaataaaaattaagttggaaagcaaa

SEQ ID NO: 1929 - DNA, 6932 bp, Homo sapiens
  SIMILAR (344)..(4951): 851254mologous to Rattus norvegicus myotonic dystrophy kinase -related Cdc42-binding kinase MRCK-beta,accession number AF021936,Smith-Waterman Score=6688.
  misc_feature (1)...(6932): n = a,t,c or g
gcggccgcgggcggggctgagggcggcgggggcgggccgcccgagctgggagggcggcggcgccgaggggaggagagcggcccatggacccgcggggcccggcgccccagactctgcgccgtcgggacggagcccaagatgtcggcctaggccggggcgcgacgacgcggacggggcggcgaggaggcgccgctgctgccggggctcgcagccgccgagcccccgagggcgcgccctgacggactggccgagccggcggtgagaggccggcgcgtcgggagcgggccgcgcggcaccatgtcggccaaggtgcggctcaagaagctggagcagctgctcctgggacgggccctggcgcaacgagagcgccttgagcgtggaaacgctgctcgacgtgctcgtctgcctgtacaccgagtgcagccactcggccctgcgccgcgacaagtacgtggccgagttcctcgagtgggctaaaccatttacacagctggtgaaagaaatgcagcttcatcgagaagactttgaaataattaaaagtaattggaagaggtgcttttggtgaggttgctgttgtcaaaatgaagaatactgaacgaatttatgcaatgaaaatcctcaacaagtgggagatgctgaaaagagcagagaccgcgtgcttcccgagagaaccgcgatgtgctggtgaacggcgactgccagttggatcaccgcgctgcactacgcctttcaggacgagaaccacctgtacttagtcatggattactatgtgggtggtgatttactgaccctgctcagcaaatttgaagacaagcttccggaagatatggcgaggttctacattggtgaaatggtgctggccattgaccccatccatcagcttcattacgtgcacagagacattaaacctgacaatgtccttttggacgtgaatggtcatatccgcctggctgactttggatcatgtttgaaagatgcaatgatgatggcactgtaggtgcagtccctcccgtggccgtgggcacacctgactacatctcgcccggagatcctgcaggcgatggaggacggcatgggcaaatacgggcctgagtgtgactggtggtctctgggtgtctgcatgtatgagatgctctatggagaaacgccgttttatgcggagtcactcgtggagacctatgggaagatcatgaaccatgaagagcgattccagttcccatcccatgtcacggatgtatctgaagaagcgaaggacctcatccagagactgatctgcagtagagaacgccggctggggcagaatggaatagaggatttcaaaaagcatgcgttttttgaaggtctaaattgggaaaatatacgaaacctagaagcaccttatattcctgatgtgagcagtccctctgacacatccaacttcgacgtggatgacgacgtgctgagaaacacggaaatattacctcctggttctcacacaggcttttctggattacatttgccattcattggttttacattcacaacggaaagctgtttttctgatcgaggctctctgaagagcataatgcagtccaacacattaaccaaagatgaggatgtgcagcgggacctggagcacagcctgcagatggaagcttacgagaggaggattcggaggctggaacaggagaagctggagctgagcaggaagctgcaagagtccacccagaccgtgcagtccctccacggctcatctcgggccctcagcaattcaaaccgagataaagaaatcaaaaagctaaatgaagaaatcgaacgcttgaagaataaaatagcagattcaaacaggctggagcgacagcttgaggacacagtggcgcttcgccaagagcgtgaggactccacgcagcggctgcgggggctggagaagcagcaccgcgtggtccggcaggagaaggaggagctgcacaagcaactggttgaagcctcagagcggttgaaatcccaggccaaggaactcaaagatgcccatcagcagcgaaagctggccctgcaggagttctcggagctgaacgagcgcatggcagagctccgtgcccagaagcagaaggtgtcccggcagctgcgagacaaggaggaggagatggaggtggccacgcagaaggtggacgccatgcggcaggaaatgcggagagctgagaagctcaggaaagagctggaagctcagcttgatgatgctgttgctgaggcctccaaggagcgcaagcttcgtgagcacagcgagaacttctgcaagcaaatggaaagcgagctggaggccctcaaggtgaagcaaggaggccggggagcgggtgccaccttagagcaccagcaagagatttccaaaatcaaatccgagctggagaagaaagtcttattttatgaagaggaattggtcagacgtgaggcctcccatgtgctagaagtgaaaaatgtgaagaaggaggtgcatgattcagaaagccaccagctggccctgcagaaagaaatcttgatgttaaaagataagttagaaaagtcaaagcgagaacggcataacgagatggaggaggcagtaggtacaataaaagataaatacgaacgagaaagagcgatgctgtttgatgaaaacaagaagctaactgctgaaaatgaaaagctctgttcctttgtggataaactcacagctcaaaatagacagctggaggatgagctgcaggatctggcagccaagaaggagtcagtggcccactgggaagctcagattgcggaaatcattcagtgggtcagtgacgagaaagatgcccggggttaccttcaagctcttgcttccaagatgaccgaagagctcgaggctttgaggagttctagtctggggtcaagaacactggacccgctgtggaaggtgcgccgcagccagaagctggacatgtccgcgcggctggagctgcagtcggccctggaggcggagatccgggccaagcagcttgtccaggaggagctcaggaaggtcaaggacgccaacctcaccttggaaagcaaactaaaggattccgaagccaaaaacagagaattattagaagaaatggaaattttgaagaaaaagatggaagaaaaattcagagcagatactgggctcaaacttccagattttcaggattccatttttgagtatttcaacactgctcctcttgcacatgacctgacatttagaaccagctcagctagtgagcaagaaacacaagctccgaagccagaagcgtccccgtcgatgtctgtggctgcatcagagcagcaggaggacatggctcggcccccgcagaggccatccgctgtgccgttgcccaccacgcaggccctggctctggctggaccgaagccaaaagctcaccagttcagcatcaagtccttctccagccctactcagtgcagccactgcacctccctgatggttgggctgatccggcagggctacgcctgcgaggtgtgttcctttgcttgccacgtgtcctgcaaagacggtgccccccaggtgtgcccaatacctcccgagcagtccaagaggcctctgggcgtggacgtgcagcgaggcatcggaacagcctacaaaggccatgtcaaggtcccaaagcccacgggggtgaagaagggatggcagcgcgcatatgcagtcgtctgtgactgcaagctcttcctgtatgatctgcctgaaggaaaatccacccagcctggtgtcattgcgagccaagtcttggatctcagagatgacgagttttccgtgagctcagtcctggcctcagatgtcattcatgctacacgccgagatattccatgtatattcagggtgacggcctctctcttaggtgcaccttctaagaccagctcgctgctcattctgacagaaaatgagaatgaaaagaggaagtgggttgggattctagaaggactccagtccatccttcataaaaaccggctgaggaatcaggtcgtgcatgttcccttggaagcctacgacagctcgctgcctctcatcaaggccatcctgacagctgccatcgtggatgcagacaggattgcagtcggcctagaagaagggctctatgtcatagaggtcacccgagatgtgatcgtccgtgccgctgactgtaagaaggtacaccagatcgagcttgctcccagggagaagatcgtaatcctcctctgtggccggaaccaccatgtgcacctctatccgtggtcgtcccttgatggagcggaaggcagctttgacatcaagcttccggaaaccaaaggctgccagctcatggccacggccacactcaagaggaactctggcacctgcctgtttgtggccgtgaaacggctgatcctttgctatgagatccagagaacgaagccattccacagaaagttcaatgagattgtggctcccggcagcgtgcagtgcctggcggtgctcagggacaggctctgtgtgggctacccttctgggttctgcctgctgagcatccagggggacgggcagcctctaaacctggtaaatccccaatgaccctcgcgcttgcgttcctctcacacagttctttttgatgccctttgtgctgtggagctcgaaagcgaggagtacctgctttgcttcagccacatgggactgtacgtggacccgcaaggccggagggcacgcgcgcaggagctcatgtggcctgcggctcctgtcgcctgtagttgcagccccacccacgtcacggtgtacagcgagtatggcgtggacgtctttgatgtgcgcaccatggagtgggtgcagaccatcggcctgcggaggataaggcccctgaactctgaaggcaccctcaacctccttcaactgcgagcctccacgcttggattctaattcaagagcaagttcttcgggaagcgggtttttcaaacgtggccggacaacttccgacaacagcaagaagcagatgctgcgcaccaggagcaaaaggcggttcgtcttcaaggtcccagaggaagagagactgcagcagaggcgagagatgcttagagacccagaattgagatccaaaatgatatccaacccaaccaacttcaaccacgtggcccacatgggcccaggcgacggcatgcaggtgctcatggacctgcctctgagtgctgtgcccccctcccaggaggaaaggccgggccccgctcccaccaacctggctcgccagcctccatccaggaacaagccctacatctcgtggccctcatcaggtggatcggagcctagcgtgcactgtgcctctgagaagtatgtctgatccagaccaggactttgacaaagagcctgattcggactccaccaaacactcaactccatcgaatagctccaaccccagcggcccaccgagccccaactccccccacaggagccagctccccctcgaaggcctggagcagccggcctgtgacacctgaagccgccagctcgccacaggggccagggagctggagatggcctccagcgtcagtgccaagactgagcgggccctccagtgttgtccaaggaaatgtagaatcactttgtagatatgggagatgaagaagacaaatctttattataatattgatcagttttatggccgcattgtttcgtgggcagtaggaccacatcttgtttcgtcttggcacagctgttgagggcgatgctgtttccatcttgcacatggagggacccccatacagcctgtctcccacccctgacaacccgagagggcatatggggccctgccaacaccacttcctcagcagaaacccgtcatgacgcggcctgccttcggaagcagacatctggggacacagcctcagtacccagtcttttccctagttcctgaaactttcctagggaccttaagagaatagtagggaggtcctattaggcattcccagtgttcactaggaatttttgaaggacagggaaagttggaggtttagttttgtgggccttttttttccattttaggccatttgcaacagttcaggttgcagaagtcctgctgaccacctagtcatggacaaaggcccaggaccagttgacaccctgcgtccctgtgtgcgttaagttcattctgggtccgcagccatgaagtgttcaccagtatctactactgtgaagtcagctgtgcggtttttccattcgcttccacggcttctgcctcctgccataaaaccagccaagtgtcgtggtgcaggcaggccctgtggcctgctgggctgagggaagtcagagccccagggcgcccacgaagcagccactgggataccccaccccgccccgccctgcccgcccccccccccaccagtcctgcccccgcatggagcccccgtgattagtagcccgtatgatcacgtagaccccaccccaaaacactcctgcacaactggccccgggccccacggnaacagcaatccccctgccgccgtggaatttcaaccttcacccctttggtacccagatgttgaagtgaaccaagctctgtggcccctgtgtcggtccagaggcgttgtgattaacagtgtggcggcaagacacagcttgtcccacagctttgggcccaggcttcccctgttccttcccaccggtcgggctgcttggcaaggctgttcaggacgtgcacttccccaaggtcggcactgagtggcccaagcaccgcctagccctgccaccccaactcgcctcctgggccttctgctggatgggcaccctggggggttctggttttttacttttttaatgtaagtctcagtctttgtaattaattattgaattgtgagaacatttttgaacaatttacctgtcaataaagcagaagacggcacctggggggttctggtttttacttttttaatgtaagtctcagtctttgtaattaattattgaattgtgagac

SEQ ID NO: 1930 - DNA, 2346 bp, Homo sapiens
  SIMILAR (37)..(453): 331254mologous to Ascaris suum collagen,accession number J04657,Smith-Waterman Score=150.
  misc_feature (1)...(2346): n = a,t,c or g
atggagaaaatccccatactgaggagcctccgcgcccgagagcagcaggctgggaaggatgtcaccctccagggtgagcaccagcaccttccggaaccaggctgccagcagacagtgcccctgagtgttggcaggaggcccccggacacacccggaccagaaaccaattccatggaggcagcccctggctccccaccaggggaggggtgccccgcttgcagccgatgtttacgttgggaacctcccccgggacgcccgtgtgagtgacctgaagagagccctgcgggaactcggctccgtgcccctgcggctcacctggcagggcccgcggcgcagagccttcctccattacccggactctgccgcagcccagcaggccgtctcctgcttgcagggcctgcgcctgggcaccgacaccctgagggtggcgctggccaggcagcagagggacaagtgacctcgtggacagccacggagctcactgcagacttcgccatccccgtccccttgccgctccggttccgatggcactcgagaggccttgcgtggcaagacgtgtcggagccaccgcctgagctgctcgggtctcaattcttctcagaagtcaccgctcagtgaacgcccaggccctcctgtgagtggggaagccgccctgcggttcatctcacagcgcgcagagactgcagcctcccaatcgtgcaggctcgggccttgagtcggtttctgtttctctggagggacagagcagaggggccagggactgagtgagtggctaagcaggggagggtgatgtgaaggtgatctcgagtttgccaggggtgggctgaacaggagaagatgaacaaaggatccggctctcaaaaggccctgggcagggactggatgctgggtacagaagcgcgcccttggnttttcaggctcctgagctgggcagcacggcagggagagttccatccatgttcgcaggagcccaggaagctcagcccctgggtaaaaagtgctcactgcagctcagatcagtcctcaggtcacatttcggggagccagcctcccctcttcccctccccagccccgctcctccctctgtggacacactccgggcccctcagccagctgggatgcatgagaagcaagctttgtgctgtgggagagaccggctctgggagaatgggtttcaccccagcctacgtcacatttgcccaagtgccttatgttttctgggttttttttcctccagttctgtttctaaaaaccagcttgagtttggctgaactgtcctttctcaacagaaagcgcttttgcaattgatcccgggcaacaagtcaaaataagcttttaagtggagattttgtttttttcaaatgtatatgctttggaaattttgattttttagccagagggttttaccaagtgttctttgaaaccacattacgaagccctcgaaaagggccggcccgtgcacgcgcctttccaagaaaaatgttctcgggacactcgggtcttctctttgaaaggacattttcctcattggttttgccgtgaaaatcctgtggaagacttcgcaaagaaaacgcagccttacatttggctcattaaagacagatttccttcccaagtcgccatgaataaaatgagagagtagaaacgtctggaagcgccacacctggccctgggccctcggccctctgtgtccttggccttgcccccgccccgcacggctggtcacgtttgtcactgggcattcagctcagcgtcagaggctgactcagtccccagttcagagtagtcacctggttacactgaaactcctcaccttcttttctctctttttttaaaaaatacttctttttctgaaagattctttttttttttttttgtttacctttttcctgtggatttgctgccgttagaatagcaactcccaggagaagagcaagtgagtcagccccccttctccactcccctgccccaccggcaagtgggcacagccctgcagacaggagcaaggacttccggggaatagacccactggggccgggagagggagaagctggattctgaccccaccactggcactcctgtggtccagccatgcctgacgcccaccccaccctcagacggcgggattaaaccaggcagtacagggttactcggggaagccagactgctgggatttcctgtcgctttagccagaataatccaggtatatggatatacagataatctgaaagagtttctcatttttatatttgtggaacatcgtgtaagaaaaactgaagagcaagtgcctgaaataaaatcccccacatgtatcagcctgcaaaaaaaaaaaaaaaaaaaaaaaaa

SEQ ID NO: 1931 - DNA, 1644 bp, Homo sapiens
  SIMILAR (166)..(471): 981254mologous to Homo sapiens cytosolic nucleotidase I,accession number AF331801,Smith-Waterman Score=504.
atgaaggtctgcagctccattgctgaagtcagcgataccacgaacccaccatcaagaaccaactctggacacatgacttcagtgctgaagcaggccctgaaggacccctgccgtacaaggcattaccgccttgtgttgtggactctggagaggacagaggtcctggacctgttcatcgagaggttctgcatgacaggtgggaacagcccgatctgctacctcaaggcctatcacaccaacctctacttgtcagccgatgcggaaaaagtgcgagaagccattgatgaggggatcgcagctgccaccatcttcagccccagcagggatgtggttgtgtcccagagtcagctgcgcgtggccttcgatggggacgccgtgctcttctcggacgagtcggagcgcatcgtcaaggccacgctggaccgattcttcgagcatgagaaggcccacgagaacaaacctctggctcaggaacaaggaagcacctccttcccagacaaggtggaggccttcaggagcccctcagttcccctccccatcactggacactcagccaatgtttaccaaacacctacctgtgccagacgccggacaactcgacctctggtgaactgggaactgattcccagggacaacccaccactgccaccacgccaggcctttagggacctcggccagagcccagctttctcagatgcggtggccacaacttcagccgtcccttttgggggtgactgccacctctcagaagtccgcggggctgagaccaggcagcctgcgttcgccatgaagcgacccaaggagccgagcggctccgacggggagtccgacggacccatcgacgtgggccaagagggccagctgaggtcttccaagctggagaaagccgaggtcttgcagatgacggtggatcacttgaaaatgctccatgccactggtgggacaggattctttgatgcccgagccctggcagttgacttccggagcattggttttcgggagtgcctcactgaggtcatcaggactcctacgatctggttactgcctggccgatccaaggctgtggagtcccagagccagcagttcactggtgctcattccacactgggagagcccactgctaaaaaaggcctagtcaaatcctcaggtgtacatggacatcaagattgggaacaagccggctggctgcatccaaaccctcctgcgttccgacgtcgtgcccatgaccacagagaattttctctacatgtgcacccatttaaaggactcggcttcaagggaagcagcttccaccgcattatcccccagttcatttgccagggcagtgatttcacaaaccacggtggcaccaggggtaagtccatctacaagaagaaatttgatgatgaaaactttatcttcaaacacacaggaccaggtctgcgcaggcatggcactaagtgtcccatggcacatttggccctcatggaggcctcaaaagggcaggaccagcaccctcttctacggaggaaggaacgggcacagcaggtacatgatgtggtcaaattaacaagaggcagaggccggggaatttctctaaagcgcatcgcccggtccctatgtaaagacaaagaaacaggactttgcacgctcacctggcattag

SEQ ID NO: 1932 - DNA, 1099 bp, Homo sapiens
  SIMILAR (61)..(948): 1001254mologous to Homo sapiens cyclophilin-33B,accession number AF042386,Smith-Waterman Score=1568.
ctactactactaggccacgcgtcgactagtacggggggggggggaaagcgcgcgagcaagatggccaccaccaagcgcgtcttgtacgtgggtggactggcagaggaagtggacgacaaagttcttcatgctgcgttcattccttttggagacatcacagatattcagattcctctggattatgaaacagaaaagcaccgaggatttgcttttgttgaatttgagttggcagaggatgctgcagcagctatcgacaacatgaatgaatctgagctttttggacgtacaattcgtgtcaatttggccaaaccaatgagaattaaggaaggctcttccaggccagtttggtcagatgatgactggttgaagaagttttctgggaagacgcttgaagagaataaagaggaagaagggtcagagcctcccaaagcagagacccaggagggagagcccattgctaaaaaggcccgctcaaatcctcaggtgtacatggacatcaagattgggaacaagccggctggccgcatccagatgctcctgcgttctgatgtcgtgcccatgacagcagagaatttccgctgcctgtgcactcatgaaaagggctttggctttaagggaagcagcttccaccgcatcatcccccagttcatgtgccagggcggtgatttcacaaaccacaatggcactgggggcaagtccatctatgggaagaagttcgatgatgaaaactttatcctcaagcatacgggaccaggtctactatccatggccaactctggcccaaacaccaatggctctcagttcttcctgacatgtgacaagacagactggctggatggcaagcatgtggtgtttggagaggtcaccgaaggcctagatgtcttgcggcaaattgagaaacaagaagagtcagcaattaccagccagccgaggtcctggaagctgacgtagagctcgtgccgacggcagacctgccggccgtgggagccgtggacgtcatctgcagggacagaaggggcaaggtcttttctggggttcctactgtgtgcagctactatggggtaccagggtgggggatgccctgatgagcacatttgtc

SEQ ID NO: 1933 - DNA, 584 bp, Homo sapiens
  SIMILAR (582)..(301): 971254mologous to Homo sapiens osteogenic protein-2,accession number M97016,Smith-Waterman Score=488.
caccgaaggcctagatgtcttgcggcaaattgaggctcagcttggacctctcttctgaactccagacttgtggatcctgctcccctcgccacttctgcacttggggtctaatggggcctcagcggaacatggagttcctcccgccctgacatcatagcccccgcctgggaggcctcctggatgactcctcttgcctcctcccttccctgggagcagcccctggctcaacctccacctccatgctgccttggaccacctgccccgtccagctgccatcacctgtcagaaacaaggagagtcagcaattaccagccagccgaggtcctggaagctgacgtagagctcgtgccgacggcagacctgccggccgtgggagccgtggacgtcatcaaagatccctgggagtcggttggcctgcggcagctcgttgcttttcttcggctgcctcctcctcagtggcctcactgcccgaggggtgcggatgggactcggactggccctgaagaaagtgaccacgaaaggctgttgggagcgtggggcccgttgacccagcaggccggccaggccaggatccacgctgtgcc

SEQ ID NO: 1934 - DNA, 1262 bp, Homo sapiens
  SIMILAR (641)..(922): 481254mologous to Homo sapiens Human isomerase homologue-2 (HIH-2),accession number AAY52295,Smith-Waterman Score=214.
agcaaatgaaaaaatagagttttctctatcacacaaatgggaaggtttgtattgaatgttatatttatcctctatccagtcttgtcttggagcacaaagcaaaaaggcccagcatcctccactatcttctgaaaacttgctcaggcctgagggcaagttttcagaagatagtggaggatgctgggcctcaggcctgagcaagagggctgcccggttgcttccatgtagccagccagcatatgtgcagggccaagtctagagggaggagggggtggcacatggatggtttcgtttaattggaagacagtgggtagattggagctggcatttgaagatgttagagagttgtggatcatgggcaagaaaagcgctgttctgggactgcggggcaggagaaggaaactgatgcttctgagggtgagtctgatgagataacatgcctgcgtgtgggcctcaggttagacagagctgaggtctcccgtcactgggcatccagctgggtgctacggccgtggctcctgccttctgcagccctgtcagggcccaaggccttcctcatcagcacttgctccagcctactcactggagttgtgttctggggtgggtgtatagaatactcgcactcctacttggggcatcagggagctctctagcaatttcttctgcacctagggagagcccactgctaaaaagggcctagtcaaatcctcaggtgtacatggacatcaagattgggaacaagccggctggctgcatccaaaccctcctgcgttccgacgtcgtgcccatgaccacagagaattttctctacatgtgcacccatttaaaggactcggcttcaagggaagcagcttccaccgcattatcccccagttcatttgccagggcagtgatttcacaaacccacggtggccaccaggggtctgcgcaggcatggcactaagtgtcccatggcacaatttggccctcatggaggcctcaaaagggcaggaccagcaccctcttctacggaggaaggaacgggcacagcagaaacaaggagagtcagcaattaccagccagccaaggtcctggaagctgacgtagagctcgtgccgacggcagacctgccggccgtgggagccgcggacgtcatctgcagggacagaaggggcaaggtcttttctggggttcctgctgtgtgcagctactatggggtaccagggtgggggatgccctgatgagcacatttgtcaaataaatgaatgacaggaaaccaaaaa

SEQ ID NO: 1935 - DNA, 2685 bp, Homo sapiens
  SIMILAR (723)..(1547): 731254mologous to Homo sapiens step II splicing factor SLU7,accession number AF101074,Smith-Waterman Score=1008.
gtcggatggacttggggctagctgcggcggggctggatggtgctgtattgaatttttggacggtactgcattggaggattttaagcttgggcagtaggacattgtattaatctgttttcacattgccaatgaagacatagcccagacctgccaatttactaaagaaaggaggccagataaccatgtcagccacagttgtagatgcagttaatgctgcacccctatcggggtccaaagaaatgagtttggaagaaccaaagaagatgaccagagaggactggagaaagaagaaggagctagaagaaccagcaaaaattgggcaatgctcctgcagaagttgatgaagaaggaaaagacatcaacccccatattcctcagtatatttcttcagtgccatggtatattgatccttcaaaaagacctactttaaaacaccagagaccacaaccagaaaaacaaaagcagttcagctcatctggagaatggtacaagaggggtgtaaaagagaattccataattacctaagtaccgcaaaggagcatgtgaaaattgtggggccatgacacacaaaaagaaagactgctttgagagacctaggcgagttggagccaaatttacaggtactaatatagctccagatgaacatgtccagcctcaactgatgtttgactatgatgggaagagggatcggtggaatggctacaatccagaagaacacatgaaaattgttgaagagtatgccaaagttgatttggcaaaaccgaacattgaaagcccagaaactccaagaggaattagcctcaggaaaattagtggaacaggctaattctccaaaacaccagtggggagaagaggaaccaaattctcagacggaaaaagatcataatagtgaagatgaggatgaagataaatatgcagatgatattgacatgcctggacagaattttgactccaagagacgaattactgtccggaatctcaggattcgagaagatattgcaaaatatttgaggaatttagatccaatttctgcctactatgatccaaaaactagagcaatgagagagaatccttatgccaatgcaggaaagaatccagatgaagtgagttatgctggagataactttgttaggtacacaggagataccatttcaatgggtcagaccacaggtggtttgcatgggaagcctaatgacaagggatctgaaagtgcatctaccaggcagatccttacaaagctagagctgttgtataagtcccttcaaagtcaaaaaaagaagatttcaaagaacagcagaaagaaagcatcctggaaaagtatggtggccaagaacatttggatgcccctccagctgaattgcttttagccccagactgaagactatgtggagtactcaagacatgggacagtcatcaaaggacaggagcgggctgttgcctgctctaagtatgaggaggatgtgaagatccacaatcacacacatatctggggatcgtactggaaagaaggccgcagggggaaccaaatgctgtcactctttttccaagtattcctattgtactggagaagctgggaaggagattgttaactctgaggagtgtattataaatgagataactggggaagaatctgtgaaaaaacctcaaaccctcatggagctgcatcaagaaaaactgaaagaggaaaagaagaagaagaaaaagaaaaagaagaagcatcgaaagagcagttcagatagtgatgatgaagaaaagaagcatgaaaaattgaaaaaggcactgaacgcataggaggccacgccttcttcatgtcaaggagaccattgcagatttgatgagaggaagcggcctttacaatagcatgtattaaacttcaagaccttattgaagaggaaatggaggcatatagaatgaaaccgtcagaggccagatgaccccatggcctctttccttggacagtagcaactagtcagaagaccatccaagatagatgcagctgatacattcttttcagcttcttattgatgattgtagatagaaaaaatccttgtttattcttcttgctgcctggctttaataaatattttcagatgcctcacagttaagttcactcctttccatactgaggaaacaagaaaagaagaagaggcacatgaagtgtgcttttgggaatagaatttaaaattggattaagattttatttccagttttttttatttatttatttttttttttgagacggaatctcactttgtcgcccaagctggagtgcaggggggcgatctcggctcactgcaagctttgcctccagggttcaagtgattctcctgcctcagcctccctagtagttggggactacagggcgcccgccaccatgctcagctaattttttgtatttttagtagagacgcggtttcatcgtgttagccagggatggtctcgatcttcctgaccacaagcaatccgcccacctcggcctctcaaaatgctgggattacaggcgtgacacccgcggcctgggcctgtcacaggtttgttttttttttttctgttttttgagatggagtcttgaaaaaaaataaataaataaaaaaaactggaaataaaatcttaatccaattttaaattctattcccaaagcacacttcatgtgcctcttcttctttttcttgtttctcagtatgg

SEQ ID NO: 1936 - DNA, 390 bp, Homo sapiens
  SIMILAR (4)..(216): 921254mologous to Mus musculus putative,accession number AK012599,Smith-Waterman Score=365.
attacgctcggtccagactctatcataggaatatggagtggcaatcagcacaagcaagatccatatatagcatctatggaacaccatactgattgggtaaacgacattgtactctgttgtaatgggaaaacattaatatctgcttcttctgacacgacagtaaaagtatggaatgcacacaagggattttgcatgtcaacattaaggacacataagcttcttctttaagtggaaacaaagattccatttatagcctggccatgaatcaactgggaacaatcattgtatcagggtccactgaaaaggtgttacgggtatgggatccaagaacatgtgcaaaactaatgaagcttatagggcacacggataatgtgaaggcattgctattat

SEQ ID NO: 1937 - DNA, 1140 bp, Homo sapiens
  misc_feature (1)...(1140): n = a,t,c or g
agcggccgcagggcagggaaacccctactggaccctgtgtgtctgccagcctggagcctttgtctccagccctgcctttattcctccttgcctccacaccagcctccccttgcttctccttacagactatccaagaagtgaagcttatgtctaggggggagccttgggcagagtccacataaatgcaggaagaacttagacaatgcctgaaatgcaaaggcgacactggagtcttctttctctaacgtgtagcgttgaatgaatatctgcctggaaccaagagggctgctctgatgtttgggagtcggttttttgtgagccacatctgatatttctgatatccccaggaaggagtggcctggaggtcactggttcaggctccctttgggcgaaatcctgggagtgatgctctaaaaatccacctttcccatcatccctactcatcagaaagacaaatataaaatcccagagaggttgaagaagcttaaaaaagccaattgctcaaccttacaaatttggatagaaaggagatgtagtttatttcatatgggcaaagtagtcctcttccaaagtcctgtacagttgttctctgcaattgacgcacatctgccctaagcngaaatctgtcagaaggaatcaacaaggctccttgcctcccctcccaatcccccttttgggaggacttgtggcttcagtgtcgtcctaagtgaggagtgggcgtgtgcttttttcctgtcccctcctccctccgtgtcctaggacgctgggctgccttctgtgcactcccaggcagatcactacggaagagtcggagcctgtggggttggactggccacactcagtcctgagaaggcgagttgccatggaaagctgggggcagaggtgtttttggagaggaggcggcaggcaaacattgcctttgacttgctctccgcgtacccggggttgtagagctgctcaggaaggggcaggatgtaaggccagaggtgcctggtgggtgagaagcccaggcagagctgggcgccctctccgaagaggtggcagcagggtgaccctgaactcccaaatggggagtgatgccactggggaaactgagtggatcaaagagatgaaaccaaaaaaaaaaaaaaaaatgagcgg

SEQ ID NO: 1938 - DNA, 762 bp, Homo sapiens
  SIMILAR (439)..(534): 1001254mologous to Homo sapiens HSPC040 protein,accession number AF125101,Smith-Waterman Score=178.
atggcgggcgcgttggtgcggaaagcggcggactatgtccgaagcaaggatttccgggactacctcatgagggtgacccagcagccctacaaggtgttcaactctggcccctgggccttcagcagctcctcctacatgagcaggcccagtgcccacatcagctccttgattgtctcccgagtgggcagcagcagcaccagcttccagggtggcctgggtgccggcatgggagttgaacccttagatccacacgaaaacctgtatgtggatttttatagaggttttattcataactgccaaaatttggaagcaaacaagatgtcctttggtagaagccagtctgaaaaggctgcatactacctggttccaactacacaacgttctggaaaaggcaaaattatggagctagtcgaaagatcggtggttgcaagggttgagcacttctggggcccagtagccaactggggtcttcccattgctgccatcaatgatatgaaaaagtctccagagattatcagtgggcggatgacatttggtacagcctcggaactggcttctgtttgcatgccacgcaacaaatgaagtagcccagctcatccagggagggcggcttatcaaacacgagatgactaaaacggcatctgcataacaatggaaaaggaagaacacggtcttgaagggacagcattgccagctgctgctgagtcacagatgtcattataaatagcctccctaaggaatatacactgaatgctattcttt

SEQ ID NO: 1939 - DNA, 953 bp, Homo sapiens
tttcgtgctgccggagggttggccggggtgtcattggctctgggaagcggcagcagaggcagggaccactcggggtctggtgtcggcacagccatggcgggcgcgttggtgcggaaagcggcggactatgtccgaagcaaggatttccgggactacctcatgagtacggtaagaaaattatttccatccatttcaggcttttgcagactttctgcattaacagagttaggggtaacaggcttagcatcctttgcatatgagagcctttctagccgccatggctggcaggttgtgaagggtgcctactgcaccctggcctgtcctggggagcctagacacgagctctgtgacagccatgctcctggggctgctccctactcctgtttttagaaacaagcatataattacttcattgataacagtcacagtggagcctagcaaccgatgaaaggaaatagagaaagaaaaagagaaagcaggaaaagaagggtgggatgattttttcctgtagggtggagttcatttccatggcttgattttcacacaggagatggtgttgtataattctgttggaactttcttttcagcacaattaagaattataatcaagtaaaatgttttccatttaatccaacatatgttaatttctttttgaattttaataaagttccttatttttctcaaaattgactgctgaatatctgacagcataaatcaattgtattctaaaaaagggaagagagaactagaatattgtactagatagaaaagatgcattataaactttctaaggttaggtattttagtaaactagtgttaaaatgatttttacctttcgtgttcttcttaagaaacatattttcagtatagctcaacacttacagtcataagtgtatgtatagttcttaacttgcagaactgtttcctataacctaacactcatcacacttaaa

SEQ ID NO: 1940 - DNA, 671 bp, Homo sapiens
  SIMILAR (166)..(483): 461254mologous to Mus musculus putative,accession number AK002241,Smith-Waterman Score=140.
  misc_feature (1)...(671): n = a,t,c or g
gtcgtgaggcgggccttcgggctgngctcgccgtcggctgccggggggttggcctgggtgtcattggctctgggaagcggcagcagaggcagggaccactcggggtctcggtgtcggcacagccatgtgcgggcgcgttggtgcggaaagcggcggactatgtccaaagcaaaggatttccgggactacctcatagagtacgcacttgctggggcccagtagccaacttggggtcttcccattgctgccatcaatgatatgaaaagagtctccaggagattattcagtggggcggatgacattttgccctctgtttgctattcttttgacattcatggagattttgccttacaaggtacaggtntagnctctgaactggctttctgttttgcatgccacggaacaaatgaagttaggcccagcttcatccagggggaggggcggcttattccaaacacgaggatggacttaaaacgggcatctggcattaaccaatggggaaaagggaagaacaaggtctttgaaggggacagcctttgcccaggttgctgctgagttcacaggttttcttattaaataggcttccctaaggaaaatacactgaatgctatttttactaaccattctatttttatagaaatagctgagagtttctaaaccaactctctgct

SEQ ID NO: 1941 - DNA, 554 bp, Homo sapiens
cagtgtgcagaaaaaattgcgagcaatcctaaaattgtagtagcgatggccaaagaatcagtgaatgcagcttttaaaatcacattaccagaaggaagatgaccggaaagaagggatgacgccgtttgtggaaaagagaaaggccaacttcaaagaccagtgagaaccagctgcccctgcttcacacctctgcttgtagaggacaagtgcagcctgtcagttttagaagcaagtaaatcatcctcttttcaagagcagtgtccgtggtgtgcagttcctctccaattgctgcgtggtcgtggcccgacctctcacggcatgacagccttcgtcacccagcctgtgagggtcctgactggagcaccttctaaatctaagattctgctgaggagcccccgctggtccctctgggcatgctgtgctcggacggaaagcggggcctgtgggtccttgtgtccctgccgctgaagaatggggctgctctgagggaaacgcttgtctgcttgccttcatacagatgctgattaaagtgatagcgattcagaaaaaaaaaa

SEQ ID NO: 1942 - DNA, 520 bp, Homo sapiens
  SIMILAR (1)..(171): 941254mologous to Homo sapiens enoyl-CoA hydratase,accession number X98126,Smith-Waterman Score=296.
tttccaggctgttactccagcaagttcttgaagcactgggaccacctcacccagttcaagaagccagtcatcgctgctgtcaatggctatgcctttggcgggggctgtgagcttgccatgatgtgtgatatcatctatgccggtgagaaggcccagtttgcacagccggagaggacaagtgcagcctgtcagttttagaagcaagtaaatcatcctcttttcaagagcagtgtccgtggtgtgcagttcctctccaattgctgcgtggtcgtggcccgacctctcacggcatgacagccttcgtcacccagcctgtgagggtcctgactggagcaccttctaaatctaagattctgctgaggagcccccgctggtccctctgggcatgctgtgctcggacggaaagcggggcctgcgggtccttgtgtccctgccgctgaagaatggggctgctctgagggaaacgctgtctgctgccttcatacagatgctgattaccgtgatagcgattcagattaaa

SEQ ID NO: 1943 - DNA, 427 bp, Homo sapiens
  SIMILAR (202)..(426): 941254mologous to Homo sapiens enoyl-CoA hydratase,accession number X98126,Smith-Waterman Score=331.
gggagcaccagatgtggggcctgagcttgaaaaggggctgctgcccctgatgttcccgggctcttgtgctgcctggcctctgacccctggacctagtctcagggcctatcttaagccccttggaatttgctggctgcacagctgtgatgtcttcttgggttcactcatcacagtgccagccatgaccagcccctccctgcaggtgcgggcggcacccagagactcacccgtgctgttgggaagtcgctggcgatggagatggtcctcaccggtgaccggatctcagcccaggacgccaagcaagcaggtcttgtcagcatgatttgtgctgttgagacactggttggaggagccatccagtgtgcagaaaaaattgccagcaattctaaaattgtagtagcgatggccaaagaatcagtgaatgcag

SEQ ID NO: 1944 - DNA, 1486 bp, Homo sapiens
  SIMILAR (302)..(604): 971254mologous to Homo sapiens enoyl-CoA hydratase,accession number X98126,Smith-Waterman Score=508.
gaggccactctcaccaggccacgtcctgcgggaggcccggcggctggctggtactgccccagtgccaagacctctggccaactgggcgcagggttcaccttctcacccctggaacgccattgtcctttgtctccttcccaccttgctgtccacccagcaggcgcaggtcctgtgcagcaggccaaccgagaagcgcctgcgtctcccattttcgggctggcctgctgctccggacctgtgcctgatcttaatgctgcaggaacacccaggattttcacatcccccaccctgcgtccagttggccagaggtgctaactttgagtacatcatcgcagaaaaaagagggaagaataacaccgtggggttgatccaactgaaccgccccaaggccctcaatgcactttgcgatggcctgattgacgagctcaaccaggccctgaagaccttcgaggaggacccggccgtgggggccattgtcctcaccggcggggataaggcctttgcagctggagctgatatcaaggaaatgcagaacctgagtttccaggactgttactccagcaagttcttgaagcactgggaccacctcacccaggtcaaagaagccagtcatcgctgctgtcaatggctatgcctttggcgggggctgtgagcttgccatgatgtgtgatatcatctatgccggtgagaaggcccagtttgcacagccggagatcttaataggaaccatcccaggtgcgggcggcacccaagagactcacccgtgctgttgggaagtcgctggcgatggagatggtcctcaccggtgaccggatctcagcccagggacgccaagcaagcaggtcttgttcagcaagattttgtcctttttgagacactggttggaaggaagccatccagttttgcagaaaaaattgccagcaattctaaaattgtagtagcgatggccaaagaatcagtgaatgcaggcaggtcccctaacctctctgagtgcatttatctcgagggtgtggccgtcccccgggcttgccgttggcttgaggcaggatacagtgaggagagcattttgaaagaacggaggctgctgtcgcccgaggtgtttggcaaggtcgtgctcccctgggagaggatgctggcaccagccctggagccacagcgcctgcctccatctgcgcacctggatctgctctgcttggcctcgtgcaaagaacgggcctggaatgagcagagccaaaggcgttcttggtgccggccgcgcccagctctggctctcgtgctgtccttcctggttttcatccttggttatttttctctgtttgcagccccgttgccgcctcacagcctctcctcaagggcacagtttgccatctcacctttcatccagttcctctcccttcttggggccgtgggctaccggagtgtgacgtttgggggccatagcagagctgttggttctgccaggtctccgctggggcagtgcctttga

SEQ ID NO: 1945 - DNA, 1332 bp, Homo sapiens
  SIMILAR (194)..(943): 361254mologous to Homo sapiens enoyl-CoA hydratase,accession number X98126,Smith-Waterman Score=215.
gggcgaggagtccagagagccatggccgccctgcgtgtcctgctgtcctgcgcccgcggcccgctgaggcccccggttcgctgtcccgcctggcgtcccttcgcctcgggtgctaactttgagtacatcatcgcagaaaaaagagggaagaataacaccgtggggttgatccaactgaaccggcgccttgcctgtcaattggctgtgcgattgcctgatgtgactagctcaaccagggcctgaagatcttcgaggaggacccggccgtgggggccatttgtcctcaccggcggggataaggcctttgcagctgggagctgatattcaagggaaattgcagaaccttgagttttccagggactgtttattccagcaagttttttggaaggcactggggaccaccttcacccagggtcaagaagccagtcatcgctgctgttcaatggctatgcttttggcggggggctgtgagctttgccattgatgtgttgatatcattctattgccggtgagaaggcccagttttgcacagccggagatcttaatagggaaccttcccagggtgcggggcggcacccaggaggattcacccgtgcctgttgggaagtcgctggcgatggaaaatggtccctcaccggtgacccggatcctcagccccaggacgcccaagcaagcagggtcttgtccagcaagatttgtccctgttgagacactggtggaagaagccatcccagtgtgcagaaaaaattgcccagcaattctaaaattgtagtagcgatggccaaagaatcagtgaatgcagcttttgaaatgacattaacagaaggaagtaagttgggagaagaaactcttttatttcaacctttggccacttgatgaccgggaaagaaggggatgaccgcgttttgtgggaaaagagaaagggccaactttcaaagaccagtgaggaaccagcttgcccctgcttcacacctctgcttgggagaggacaagtgcagcctgtcagttttaggaagcaagtaaatcatcctcttttcaagagcagtgtccgtggtgtgcagttcctctccaattgctgcgtggtcgtggcccgacctctcacggcatgacagccttcgtcacccagcctgtgagggtcctgactggagcaccttctaaatctaagattctgctgaggagcccccgctggtccctctgggcatgctgtgctcggacggaaagcggggcctgtgggtccttgtgtccctgccgctgaagaatggggctgctctgagggaaacgctgtctgctgccttcatacagatgctgattaaagtgatagcgattcagatt

SEQ ID NO: 1946 - DNA, 416 bp, Homo sapiens
  SIMILAR (1)..(99): 931254mologous to Mus musculus putative,accession number AK007377,Smith-Waterman Score=165.
  misc_feature (1)...(416): n = a,t,c or g
gttagagattacaatttgactgaagaacagaaggcgatcaaggccaagtatccgccagtcaataggaagtacgagtatttggatcatacagcagatgtccatggattgtattacacagagcatgaatatacttctttaggttacacgcatggggagatactctggaggaagcatttgagcaatgtgcaatggccatgtttggttacatgacagatactgggacagtggagcccctccaaacagtagaagtagaaacccaaggtggggagaagaattttcattgtccaagcaccctcagggaacagaagtcaaagcaataacatattcagcaatgcaggtctataatgaagagaacccggaagtttttgtgatcattgacatttaagacacccaaaaatanaagactcctacgaaaa

SEQ ID NO: 1947 - DNA, 1050 bp, Homo sapiens
  SIMILAR (491)..(1048): 981254mologous to Mus musculus putative,accession number AK012599,Smith-Waterman Score=960.
tttcgtgtcaacatgcaagatggcggcccatcaccggcagaacacagcaaggcggaggaaagtgcaggtatggaagcccggttcctcggtcttccggacgcggccggcagctccgggcccactccagctagaaggtgcccggcgccacgaccagctggggtttcctatgttattcgagatgaagtggagaagtacaaccgaaatggagtcaatgctctgcagctggatccagcactaaatagacttttcacagcccggcgagactctatcataagaatatggagggtcaatcagcacaagcaagatccatatatagcatctatggaacaccatactgattgggtaaacgacattgtactctgttgtaatgggaaaacattaatatctgcttcttctgacacgacagtaaaagtatggaatgcacacaagggattttgcatgtcaacattaaggacacataaggattacgtaaaggccttagcatatgccaagggataaagaactagtagcatcagctgggttggacagacaaatattcctttgggatgtgaatactctaacagcattgactgcctcaaataacactgtcacaacttcttctttaagtggaaacaaagattccatttatagcctggccatgaatcaactgggaacaatcattgtatcagggtccactgaaaaggtgttaagggtatgggatccaagaacatgtgcaaaactaatgaagcttaaagggcacacggataatgtgaaggcattgctattaaacagagatggcacgcaatgcctgtcaggcagttctgatgggacaattcgcctttggtcccttggccagcagagatgtatagcaacataccgagtccatgatgaaggtgtttgggcgctgcaagtcaatgatgccttcacacatgtgtattctggtggaagggacaggaagatttattgtacagacctaagaaaccctgacattcgggtgctaatttgtgaagaaaaagcaccagttctcaagatggagcttgatagatcagctgatcctcctcctgcaattag

SEQ ID NO: 1948 - DNA, 362 bp, Homo sapiens
  SIMILAR (76)..(330): 951254mologous to Mus musculus putative,accession number AK007377,Smith-Waterman Score=429.
agagattacaatttgactgaagaacagaaggcgatcaaggccaagtatccgccagtcaataggaagtacgagtgagatgacttacagtctcttctgtttcactttttggatgaatggctttataagttcagtgctgatgaattcttcataccccgggaagtgaaagtacttagcattgatcaaagaaatttcaaattacgatcaattgggtggggagaagaattttcattgtccaagcaccctcagggaacagaagtcaaagcaataacatattcagcaatgcaggtctataatgaagagaacccggaagtttttgtgatcattgacatttaagacaccaaaaaataaaagactcctacgaa

SEQ ID NO: 1949 - DNA, 425 bp, Homo sapiens
  SIMILAR (250)..(423): 941254mologous to Mus musculus putative,accession number AK007377,Smith-Waterman Score=290.
tttcgttcatggcgcaggaagaggaagatgttagagattacaatttgactgaagaacagaaggcgatcaaggccaagtatccgccagtcaataggaagtacgagtatttggatcatacagcagatgtccagttacacgcatggggagatactctggaggaagcatttgagcaatgtgcaatggccatgtttggttacatgacagatactgggacagtggagcccctccaaacagtagaagtagaaacccaagttcagtgctgatgaattcttcataccccgggaagtgaaagtacttagcattgatcaaagaaatttcaaattacgatcaattgggtggggagaagaattttcattgtccaagcaccctcagggaacagaagtcaaagcaataacatattcagcaatgcaggtctataatgaaga

SEQ ID NO: 1950 - DNA, 756 bp, Homo sapiens
  SIMILAR (473)..(595): 971254mologous to Mus musculus putative,accession number AK007377,Smith-Waterman Score=210.
aacgctttgaggaactctgcacgagctcgtgccggtctaatcctgcagtcatggcgcaggaagaggaagatgttagagattacaatttgactgaagaacagaaggcgatcaaggccaagtatccgccagtcaataggaagtacgagtgtgagtaggtggcttacttctctctttacatatttggatcatacagcagatgtccagtgagtatagcgggagttcattcctttgaaaccacgtcagtaggaagactgaatgtttcaatcttggttacacgcatggggagatactctggaggaagcatttgagcaatgtgcaatggccatgtttggttacatgacagatactgggacagtggagcccctccaaacagtagaagtagaaacccaaggagatgacttacagtctcttctgtttcactttttggatgaatggctttataagttcagtgctgatgaattcttcataccccgggtggggagaagaattttcattgtccaagcaccctcagggaacagaagtcaaagcaataacatattcagcaatgcaggtctataatgaagagaacccggaagtttttgtgatcattgacatttaagacaccaaaaaataaaagactcctacgaagaactggttttgttttcctcttccttttgagaagacactatgaattaaattctacagcttttttttgatatatggaaatttgtagaacagaaatattttagttaaagtgtgactttcagaaagggaaaa

SEQ ID NO: 1951 - DNA, 938 bp, Homo sapiens
  SIMILAR (78)..(173): 931254mologous to Mus musculus putative,accession number AK007377,Smith-Waterman Score=156.
  misc_feature (1)...(938): n = a,t,c or g
attgttatgtagactttagtcagtgtggtggaattcggtggatgaagggcggaagtagagtgtctaatcctgcagtcatggcgcaggaagaggaagatgttagagattacaatttgactgaagaacagaaggcgatcaaggccaagtatccgccagtcaataggaagtacgagtgtgannnnnnnnnnnnnnnnnnnnnnnnnnnnnnnnnnnnnnnnnnnnnnnnnnnnnnnnnnnnnnnnnnnnnnnnnnnnnnnnnnnnnnnnnnnnnnnnnnnnnnnnnnnnnnnnnnnnngattcttttatgtctggcttcttcactcgtgtgtgaaagtggattgtattacacagagcatgaatatacttctttaggttacacgcatggggagatactctggaggaagcatttgagcaatgtgcaatggccatgtttggttacatgacagatactgggacagtggagcccctccaaacagtagaagtagaaacccaaggtaaatgactacaagtttcttctgtttcacttttgggatgaatggctttataagttcagtgctgatgaattcttcatacccgggaagttgtgtgctattgttttctagaaaaggttgtaaaggccaggcgcggtggcttacgcctgtaatcccagcactttgggaagccgaggcaggtggatcacctgaggtcaggagttcgagaccagtctgaccaataaggaagtgaaagtacttagcattgatcaaagaaatttcaaattacgattcaattgggtggggagaagaattttcattgtccaagcaccctcagggaacagaagtcaaagcaataacatattcagcaatgcaggtctataatgaagagaacccgggaagtttttgtgatcattggacatttaagaccacccaaaaaattaaaagactccctacgggaaaaaaaaa

SEQ ID NO: 1952 - DNA, 393 bp, Homo sapiens
  misc_feature (1)...(393): n = a,t,c or g
gggtcntaccggatttaccttaccgaaaaaaaggaaaggaaattatggccccttaggctttttttacccaccattccaaaccaggtangttccaggtttcccgaggtgagnccaaagccaattacctggaaggaaggtaaagaaattttattacgtcataaaccattgaaaacacatctagtaagaaaatgaaaacctgaataaggatagggacaatagttgaagaaagaaaagtctctgatggagaagcatttcttttaacaaactgattcttctgtatcaaacctggaaaaaaatcatgaaccatctgacatcgtgaacagtctgcagtgggctatggtttcttgacaagtcttatttccttatcatcccnattaaatgttgtcattttgc

SEQ ID NO: 1953 - DNA, 470 bp, Homo sapiens
  SIMILAR (10)..(252): 461254mologous to Gallus gallus ovomacroglobulin, ovostatin,accession number X78801,Smith-Waterman Score=202.
accctcaaatacactggaattcgcaataaatccagtatggtggttatagatgtaaaaatgctatcaggatttactccaaccatgtcatccattgaagagcttgaaaacaagggccaagtgatgaagactgaagtcaagaatgaccatgttcttttctacttggaaaatagcaaccttgtgttcaacattcagccagccccagccatggtctacgattactatgaaaaagaagaatatgccctagctttttacaacatcgacagtagttcagtttccgagtgagacaaagcaattactagaagagttggagaagcatttcttgtaacaaactgattcttctgtatcaaacctggaaaaaaatcatgaaccatctgacatcgtgaacagtctgcagtgggctatggtttcttgtcaagtcttatttccttatcatcccattaaatgttgtcattttgaaaaaaaaaaaaaaa

SEQ ID NO: 1954 - DNA, 425 bp, Homo sapiens
  SIMILAR (155)..(424): 411254mologous to Homo sapiens pregnancy zone protein,accession number M24416,Smith-Waterman Score=188.
gcgttcggacccctgtcggatagtaaatcccaggtaaggtacctgcggtcggcaggtctgagctttcttcttggacacctaaaacccacagtcctccaggtacctgccgtgggcagatctgagctttcttcttggacaccccatacccacagtcctccaggccacccttaagtacaatgttctcctacctaagaaggcatctggattttctctttccttggaaatagtaaagaactactctttgactgtttttgacctcacagtgaacctcaaatacactggaattcgcaataaatccagtatggtggttatagatgtaaaaatgctatcaggatttactccaaccatgtcatccattgaagagcttgaaaacaagggccaagtgatgaagactgaagtcaagaatgaccatgttcttttctact

SEQ ID NO: 1955 - DNA, 3603 bp, Homo sapiens
  SIMILAR (88)..(2202): 451254mologous to Gallus gallus ovomacroglobulin, ovostatin,accession number X78801,Smith-Waterman Score=1630.
atgcctcgccctgcttcggctcgcacacggtgcgcgcacccactgacctgcgcccactgtcctgcactccctagtgagatgaacccggatcctcaaaacaatcggatttttcaaaggcaaaatgtgacttctttccgaaatattacccaactctcgttccaactgatttcagaaccaatgtttggagattactggattgttgtgaaaagaaactcaagggagacagtgacacaccaatttgctgttaaaagatatgtgctgcccaagtttgaagttacagtcaatgcaccacaaacagtaactatttcagatgatgaattccaagtggatgtatgtgctaagtacaactttggccaacctgtgcaaggggaaacccaaatccgggtgtgcagagagtatttttcttcaagcaattgtgagaaaaatgaaaatgaaatatgtgagcaatttattgcacagttggaaaatggttgtgtttctcaaattgtaaatacaaaagtcttccaactctaccgttcgggattgttcatgacatttcatgtcgctgtaattgttacagaatctgggacagttatgcagatcagcgagaagacctcagtttttatcactcaattgcttggaactgtaaactttgagaacatggatacattctatagaagagggatttcttattttggaactcttaaattttcggatcccaataatgtacctatggtgaacaagttgttgcaactggagctcaatgatgaatttataggaaattacactacggatgagaatggcgaagctcaattttccattgacacttcagacatatttgatccagagttcaacctaaaagccacatatgttcgacctgagagctgctatcttcccagctggttgacgcctcagtacttggatgctcacttcttagtctcacgcttttactcccgaaccaacagcttcctgaagattgttccagaaccaaagcagcttgaatgtaatcaacagaaggttgttactgtgcattactccctaaacagtgaagcatatgaggatgattccaatgtaaagttcttctatttgatgatggtaaaaggagctatcttactcagtggacaaaaggaaatcagaaacaaagcctggaatggaaacttctcgttcccaatcagcatcagtgctgatctggctcctgcagccgtcctgtttgtctatacccttcaccccagtggggaaattgtggctgacagtgtcagattccaggttgacaagtgctttaaacacaaggttaacataaagttctctaacgagcagggcttacctggttccaatgctagtctctgtcttcaagcggcgcctgtcttattctgtgccctcagggctgtggataggaatgtccttctactgaaatctgaacaacagctgtcagctgaaagtgtgtataacatggttccaagtatagagccgtatggttatttctaccatggcctcaatcttgatgatggcaaggaagacccttgcattcctcagagggatatgttctacaatggtttatattacacacctgtaagcaactatggggatggagatatctataatattgtcaggaacatgggtctaaaagtctttaccaatctccattaccgaaaaccagaagtatgtgtgatggagagaaggctgccactccctaagccgctttatctggaaacagaaaattatggtccaatgcgtagtgttccgtctagaattgcatctagtggaatcagaggggagaatgctgactatgtagaacaggctataattcaaacagtaagaacaaacttcccagagacatggatgtgggacctcgtcagtgtcgattcctcaggctctgccaatctttcgttcctcattcctgatacgataacccaatgggaggcaagtggcttttgtgtgaatggtgacgttggatttggcatttcctctacaaccactctagaagtctcccaacctttctttattgagattgcctcacccttttcggttgttcaaaatgaacaatttgatttgattgtcaatgtcttcagctaccggaatacatgtgtagagatttctgttcaagtggaggagtctcagaattatgaagcaaatattcataccttgaaaatcaatggcagtgaggttattcaagctggagggaggaaaacaaacgtctggactattatacctaagaaattgggtgccaaagcctccaagcagggagttttggacttgccaaacgatgtagtagaagggtcagccagaggctttttcactgttgtgggggatattctaggacttgccttgcagaatctggttgttctccaaatgccctatggaagtggagagcagaatgctgccctactagcatctgatacttatgttctggactatctgaaatctactgagcaactgacagaggaagttcaatctaaggctttctttctcttatctaatgcggcattggacagtggtgtcactaatggctataatcatgcaattctagcttatgcttttgccttagctggaaaagagaagcaagtggaatctttactccaaaccctggatcaatctgccccaaaactaaataatgtcatctactgggaaagagaaaggaaacccaagacagaagaatttccatcctttattccctgggcaccttctgctcagactgagaagagttgctacgtgctgttggctgtcatttcccggaaaattcctgacctcacctatgctagtaagattgtgcagtggcttgcccaacggatgaattcccatggaggcttttcttccaaccaggctccggtagattgcaaacgacctgctttctttgtgatcccggctgcattcggacccctgtcagacagtaaatcccaagatcaaaacactgtcacctttagcagtgaaggatccagtgagattttccaggttaacggtcataaccgcctactggtccaacgttcagaagtaacacaggcacctggagaatacacagtagatgtggaaggacacggttgtacatttatccaggccacccttaagtacaatgttctcctacctaagaaggcatctggattttctctttccttggaaatagtaaagaactactcttcgactgcttttgacctcacagtgaccctcaaatacactggaattcgcaataaatccagtatggtggttatagatgtaaaaatgctatcaggatttactccaaccatgtcatccattgaagagggttttggtcgagcagacagtttccctttttctgttgagcagagcaaccttgtgttcaacattcagccagccccagccatggtctacgattattacgaaaaaggcctaatccaacgttgcccatcccgttggagcaaaggcattgcttgtgcagaggatcggccaggacgtcctatgcttgcatccttactcaccagcatggctatggcacaagaggctttccgaagcagctgctcaggtggctcagcctggaaactggggcaggctgtgagggagcgtcttcctgagccctcagtatgtcatccacgagggacaggatgggctctggggacttgttctttgccccttccagagctgaaaccagaatga

SEQ ID NO: 1956 - DNA, 197 bp, Homo sapiens
  SIMILAR (4)..(102): 931254mologous to Homo sapiens Unknown (protein for MGC:2724),accession number BC005845,Smith-Waterman Score=163.
ggttttggtcgagcagacagtttccctttttctgttgagcagagcaaccttgtgttcaacattcagccagccccagccatggtctacgattattacgaaaaaggcctaatccaacgttgcccatcccgttggagcaaaggcattgcttgtgcagaggatcggccaggacgtcctatgcttgcatccttactcaccag

SEQ ID NO: 1957 - DNA, 966 bp, Homo sapiens
  SIMILAR (412)..(561): 711254mologous to Homo sapiens FLJ00075 protein,accession number AK024481,Smith-Waterman Score=155.
atgggggtcacaagagccaggggggaagtggggctggctctcagttcccgccttgcggccacccttaagtacaatgttctcctacctaagaaggcatctggattttctctttccttggaaatagtaaagaactactctttgactgtttttgacctcacagtgaacctcaaatacactggaattcgcaataaatccagtatggtggttatagatgtaaaaatgctatcaggatttactccaaccatgtcatccattgaagaggagaagctgaagtcctttcctgtgtgtgtgagcgccaagctggagcccaaggatgacatggaggaggcgcttggggggtctccccaggtctccatgctgctcgtcaacatcagagagatcctgtgtagcagaaaatggagtcgcagggtatacaagaagtctgtcttcccagacggactggctggtgctgtaacaaagacccatgtgatgctgggggtagagacagataaactgttcagtgccccttgtccatcagtgagagagcagctggagcagaaggtggagagggaggggcagagaactacttctacatgccagacctgggccaagtcccccaaggtcgatgtgccatcctacctgacctgcctggcagacctcaagtatggtgccagcctgggccccagcatcacccactctgccctggcaccaggctcaagtcgctcaagcccagccccggccactgcagtccaaggcgccgggcaggacgacagcagcagcatccccttcaggagggagctctctgaggccacctcagtctcatttctggatccctggcggattttctgtggggttgttagctgccttttcacctctggggctggtgaggggccgggaggagagagcccgtatgtcagacaacaaaccgtctctgctaacccccagcagccacaggcagaggaagaagaggacaactggaaatcctag

SEQ ID NO: 1958 - DNA, 610 bp, Homo sapiens
  SIMILAR (603)..(514): 761254mologous to Homo sapiens Human secreted protein, SEQ ID NO: 7870,accession number AAG03789,Smith-Waterman Score=97.
ggcacgagagaatatttatgttaactcccttattttacagctgatgaagttgaccctagggaggttagatgactctccacccagtcccaaagctcctaaagcaaggaatcgagttcctaatgtaggatttttaattctcttattggtgtattttccacttgtctatctttacccaaaggagccatcagtgatttttagtggatttccacaaaagggagtaataggacagcttcccttgtccctgtttatttctttaaaaactacaaccccaataatgatgagtgaggctgttgtaatttttggaaacatgataaatgggttgttgccaaatatattgaaagttaggggctgtgtgcagtggccttacacctgtaattcccagccttttgggagtcccaggtcaggtggattgcttcagcctcaggagttcaagatcagcctgaccaatatggtgaaatcctgtttctactaaaactacaaaaactaggtgggcatggtggcacaggtgagaggatcacttgagcctgggaggtcaaggctgcaaggagccaagattgtaccactgtactccagcctgggtgacagagcactatcttgtctcaaaaaaaaa

SEQ ID NO: 1959 - DNA, 384 bp, Homo sapiens
  SIMILAR (238)..(348): 591254mologous to Human herpesvirus 6 ORF5,accession number X73675,Smith-Waterman Score=90.
tttcccaactcctcaagactcatttggcctgagtgcaacagaataaaagaggaaagtttagtatcagcttcaccgggttcattttgcaaacctcacttagatttagcattaggtttagggctagagtagggcttatggtagagttaggattgaagctagggctgtttttaggattaggatttgatttaggggtagggttagggataggactagagttaagttagggttaagtgatggctacggctaggattcaggctaggtttagggttatgagcaggattagtcttagggttagggataagggtagggctaaaaccagggctaggattagagatatttgtaggcttaattttgtgtatatgtatatagatagatagatagata

SEQ ID NO: 1960 - DNA, 589 bp, Homo sapiens
tttttttttttcaaaatgacaacttttaatgggatgataaggaaataagacttgacaagaaaccatagcccactgcagactgttcacgatgtcagatggttcatgatttttttccaggtttgatacagaagaatcaagtttgttaaaagaaatgcttctccatctgggatttaaaacatcatttaaacaataaacacgtttgtatgtatatataaatagatatttagatataaaaacatgcatatataggcacatagacatgtatatacatatacacacatatgtacaaaatatatatgcctaaatttttactgacctgtcaacttaccaaaaccaaaaatggagagatttataaaaagggtaccatatatagctgtgaattctttaaagctatttttaaagaaattaatataatcttaatgattatcagattactcatgcagtacacagctacacaagtctaatgaagtaccagacacttttctttcttcaactattgtcctatcttattcaggttttcattttcttactagatgtgttttcaatggtttatgacgtaataaaatttctttacctcttctagtaattg

SEQ ID NO: 1961 - DNA, 1857 bp, Homo sapiens
  SIMILAR (1520)..(1633): 361254mologous to Rattus norvegicus alpha-1-inhibitor 3,accession number M28297,Smith-Waterman Score=45.
ttaactgctccagcatcttgtgcatctcagctgtttgtgcgagtcatccagcatgagggaggatgggtctgcatcaggtgcagttcctgggccttggaatatgtcctccacttttgtttgatcagcggcgtgtttccattgagtgtgcaactctgccttccacccattgctttttgtgctctcagaaactggagaaacgctagctttgcacactgggttttctcgaagcgggctaggcgtatcatttccaagggctgtggagcttcctggaactgtgcatgctgtgaacactctcccagaatgatgaaatgccaaagtgctcaagtcaccatgcctttgttcactggctcccatgcctttcttgctgtgaccatccatgaggcttagaaccatcacagctgccatcgacagatttgagctttcatctggacagctaatacccacagtcctccaggtgagtctaaagatcttaggacccgcgatgggggtcctgccttctgcccttaggctccggtagactgcaaataacctgctttctttctgttcccgggctgcgttcggactcctgccatcggcagatttgagctttcttcttggacacctaatacccacagtcctccaagtgggtcctaaggttcttaggatccgcgatgggggtcctatgccgggggggacgaggggctggctctcagtccctgcctcgttgggggtgcctcccacccctgcgattggtgtcctgccttctgcccttaggctccggtagactgcaaatgacctgctttctttctgatcccgggctgcgttcggacccctgtcgtatagaaaatcccaagtaaggtacctgccgtcggcagatctgagctttcttcttggacacctaatacccacagtcctccagacccctgtcggacagtaaatcccaagtaaggtacctgccctcggcagatttgagctttcttcttggacacctaatacccacagtcctccagacccctgtcggatagtaaatcccaagtaaggtaccttctgctggaagatctgagctttcttcttgggacaccttaaaacccacagtcctccagcagtgaaggatccaggtgagattttccacggttaacggtcactaaccgcctactggtccaacgttcagaagtaacacaggcacctggacaatacacagtagatgtggaaggacacggttgtacatttatccaggccacccttaaagtacaatgttctcctacctaagaaggcatctggattttctctttccttggaaataagtaaagaactactctttgactgtttttgacctcacaagtgaacctccaatacactggaattcgcaataaatccagtatggtggttatagatgtaaaaatgctatcaggatttactcccaacccatgtcatcccattgaagagcttgaaaacaagggccaaagtgatgaagactgaaagtcaaagaatgacccatgttccttttcctacttggaaaatgtttttggtcgagccagacagtttcccttttttctgttgagcagagcaacctttgtgttcaacatttcagccaggccccagccatggtcttacggattactatgaaaaagaagaatatgccctagctttttaccaacatcggacagtagttccagtttccgagtgagacaaagcaattactagaagagttggagaagcgatttcttgtaacaaactgattcttttgtatcaaacctggaaaaaaatcatgaaccatctgacatcgtgaacagtctgcagtgggctatggtttcttgtcaagtcttatttccttatcatcccattaaatgttgtcattttgaaaaaaaaaaaaaaaaa

SEQ ID NO: 1962 - DNA, 1514 bp, Homo sapiens
  misc_feature (1)...(1514): n = a,t,c or g
ctccaacctgccacgtgaacacgtcagtctgtgtgctgcctcttggacacctgcccttgaaagcctcaggccctgggagaagcactctgtccagtcctgtccccggggggagngcagggcactgagccctcctcagatggttagtggcttccaacagccatcaggagtgtttcttgaatgccccaggtgtggaggacttggtctgtgaccacctagaaccccagagctgaacaggaagccgtccctgcagcaacaagagggctggaagggggagctgcaggccaccctcggctctcccactgctggggcggtgatgttcgggtgacatgtttgaaaaatactcttaaagataccaactgttcccttatatggctaatggtttggtgcagccaccagcgatggcggcccctattagagaccaggtttgttaaaacaccaaatattgctgtccacactagacattaaccggcttcagaaaagatggacaccttttcccacgctgtttcgcttcttaactttggtccagctttagccaccacacagcgtgtaaggggactgctgctgcggagtcagcctcggttggtccttccgcctcccaccaagcacgcgccgcttctgagagacaccagctccctgcctccaagcctgggtgccacaggcttgtcgtgagggaccccttgctttccgagagctcctggggggggttcttgccctttcaacacctggggagaggtgttcagtttcagtttccgagtttgaaacaagggcccgttgcacacagcatgttgggggcccagcccaaagttcttgtcacctcctcatgcaaagccagccatcaccctccggccagagctcaaggaggccccttggccagccccctccttgggtcctccaggaggactgagcacccctcctagcggcatcccttgccctccacagtgctgccaggggcacgtcgctctgtgccgtggactgagaccatccccctggtgaacagaatgacccgtttgttggaaaatgcctcgttgcccagagaaactccccccaggcatcttcgggaacgaaacttatttagttcccattgtgaactggcccacggggacaagctttttatcaacttattaaagttgggagcactgtaaatcgcggcttgcctgagttaaacagtggtggtaagcggtgtgttaaacacataatgttacggttttaggagagagaggtcgtaaggaaggggtcgtgtcgctcatgactctcttctattagttgggtaacagtggcctcatgtttgtgtctgtgtgtacacagagcccttaggttctgctctgtttctttgcccaggtgaatgtttgtggcatgcgctgctgtccacgcccctctgtcctgcgcagctgttcagctgtgcggcgccctgatttcctccatgcacacagaacctccttgtgtctgtttctctgttcctctgtggctgactcaataaacttttccctctgaaaaaaaaaaaaaaaaaaaacgtt

SEQ ID NO: 1963 - DNA, 632 bp, Homo sapiens
gtggaaggaaagccaaggaaggtgtgagtggtgagtggcccgtggcctgtaggcagacctcacctgaggatttcactggcatctaccgggtgcccctcctgtggggcctcctgactgggggtggtcagggcagaggccatgggcacagagggggttgggctctttcaggcagacctcccctgaggatttcactggcatctaccgggtgcccctcctgtggggcctcctgactgggggtggtcagggcagaggccatgggcacagagggggttgggctctttcaggcatcccacccagactgcagtccttccaagtgtgggcagagagcccactgccccaactgccctggggatgcgtggcagggatttctgttcacaccggagtctcctggctgccataaatggccctgagacccgatatggtccattttatggagggggttcctgaatggaacctggttgggcatgggaacaggaatgaacccaaccagatgagatcacagtttcccttttgtaaaacgcctagtgttggaggaagacagtgaatacctaagtcacacctgtaaacataaatggaggaaggggcttggggtccccatgacatcatcccccctcttttaagctagctgaggg

SEQ ID NO: 1964 - DNA, 1058 bp, Homo sapiens
  SIMILAR (142)..(471): 471254mologous to Mus musculus putative,accession number AK009086,Smith-Waterman Score=234.
cttcatacaacaagaggaagagtctgcacgcagaagcaccaccttctagggataaataaagggtcaagctaaggaagggcagaacaaacttcagacactcacttctttgcctcaacttcagcctgctctcacaacctcactatgtcttgccccaactactgctcgggaaactccaactcaggatctctcagaacctcccgccatattcctctcacctccatcgacctctgccctaccagcgtgagctgtggagatgtcctctacttacccactagctctcaagaccatacctgggtcacagacaactgccaagagacctgcggtgaaccaaccagctgccagccggtccactgtgagaccggcaatcttgaaacctcttgcggttcttccactgcttactacgtgcccagggccttgccaaggaagcagttttcttcctgcttctttcttctccagttcctgccttccagtatcctgtaggaccacagaggtatgtgtccagcggctgttcgtccattgagggccgttgttcaatagtttaccagcccatagggagattgtgttgcccaatgcctatcgcccccaattctgcttgtccaagagttgccagccccaaaacctcctcacttctggatgccaaccctcgagttgcttggcctatcgtcctcaaagtcttcacgttgtgtccagcagcctcagacctctggggcctctgttcagtggttgccaacctctgacccatgtgttcagcaccgtgtcgtcccatcttgctctggaacatgggtccccaaacatatgctttttacagtcatccatccttttgcataggtcatcatcgagagcggtatgttcttcagctctgttttgaaaactcatacttgttagtagtttccaacctgggtcctggacaactgccaggagaacagtaacaaacccaccagctgccagccagccaaatgtgcgttcagcaactgtcaaatctattgcggcccttctactgattgtcctgtgtccagactctgccaagaaactcactttgttcctgccacttcctgtgt

SEQ ID NO: 1965 - DNA, 478 bp, Homo sapiens
  SIMILAR (1)..(477): 911254mologous to Homo sapiens EBF3-S,accession number AF288787,Smith-Waterman Score=814.
  misc_feature (1)...(478): n = a,t,c or g
gtagagaaattagtgaaaggaaaattccaagataattttgagtttattcagtggtntaagaaattctttgacgcaaactatgatggaaaggattacaaccctctgctggcgcggcagggccaggacgtagcgccacctcctaacccagttccacagaggacgtcccccacaggcccccccccctgcattctccggaagaatcctccatcagcccgaaatggcggccatgagactgatgcccaaattcttgaactcaaccaacagctggtggacttgaagctgacagtggatgggctggagaaggaacgtgacttctacttcagcaaacttcgtgacatcgagctcatctgccaggagcatgaaagtgaaaacagccctgttatctcaggcatcattggcatcctctatgccacagaggaaggattcgcaccccctgaggacgatgagattgaagagcatcaacaagaagaccaggacg

SEQ ID NO: 1966 - DNA, 1219 bp, Homo sapiens
  SIMILAR (837)..(1205): 391254mologous to Homo sapiens EB3 protein,accession number AB025186,Smith-Waterman Score=174.
agatgagtctctagaaacgaggctttgtctgggtcctggaggggaagggagaaaagcaatagggcctttgggaagcagcagcgttgggaggggaagggagaggagcagccccagcccgcgtcggaccccgtcatagcagagccacctcctctgtctgcactgctgttctgcctgggcctgccccactcgcccgcccgcttgctttgcactagaagcagcccgctctgtctagggaggtgcagtcgctagtgagcaagtcgccacggcatgctggctgcgctggggaggagctggggtccctgatttggccaccactgtgcagatacctggtccagcccagcagagggcaaaagagcccatcctgacacagggcccctggaggggcagccacccagggacaatggctttgggctggggcttctgttaggaaagaccctgtgccagctgcctttcctctagctatgagtacgagagggtcccgcacccttccaactctacttccccaaatttgcgtcctaatttctctcctctatccctcaggccagctctctccctgccccaacacctcacaccttgtttagttccctatagtttctgctctcccgggctcgccaaagggctgcccagctgctggagtgtccatgtggccaagactcggggcctagctgtagatgcccttcctggggtgggggcaggggggtgagagtgcctgcctgtcgcatgggcctgcccccgcagtcctcacaccagggctgtctcctgccacgtgcgctgtggggctcacgtgggacttacctgactcttttcctctggggcagttccacagaggacgtccccccaccaggccccaaaaaacatgccagaccttctggccggctgagccaatgtggccccccccctgcattctccggaagaatcctccatcagcccgaaatggcgggccatgagacttgatgcccaaattctttgaactcaaaccaacagctggtggacttgaagctgacagtggatgggctggagaaggaaacgtgacttctacttcagcaaacttcgtgacatcgagctcatctgccaggagcatgaaagtgaaaacagccctgttatctcaggcatcattggcatcctctatgccacagaggaagagattcgcaccccctgaggacgatgagattgaagagcatcaacaagaagaccaggacgagtactgagggcggccgct

SEQ ID NO: 1967 - DNA, 4842 bp, Homo sapiens
  SIMILAR (2977)..(3252): 981254mologous to Homo sapiens EBF3-L,accession number AF288787,Smith-Waterman Score=493.
  misc_feature (1)...(4842): n = a,t,c or g
atgagctctaagcatctaaaatcagaacaaatcaaggaccaaatcagagtcccagtaatatcgctgattcccaaaatacactcagcccaggaggagcagctctccagtacagctgtctgctcctgccctgctcgggtattttgtgcagtgacaaaggtggtagcagttttccagatgtggatgcttcatgatctggtgcagatggtccccaggtccctgcagtggctcccccacatcttcacactcttctcaaatccactcattctgtaccactcccacgagctctcagcccccagctttgcagagcagagagaatgcaaactcgcttatatgcctgtctcttctgcatctgcacatcacctcctcctacaagcctttgactttaacctctctgtatctctttcctctttggcaaggaacatgcttgccaactcagccagcgtgaggatcctcatcaagggaggcaaggtggtgaacgatgactgcacccacgaggctgacgtctacatcgagaatggcatcatccagcaggtgggccgcgagctcatgatctggcggggccaaggaaaactggtgatccctggtggcatcgacaccagcacccacttccaccagaccttcatgaatgccacgtgcgtggacgacttctaccatgggaccaaggtaatgctcctgtttgccaaaggtggcttcctctttggcttttttattctgcttctagggctgctccagactagactcatggcctcattagccaagagcgactggttttcccctgagaaccatcagctctttacagctgatgaagagctctgcacacgtgtctttatgcaaggtggcccgggggctgaagtcacctgtttggaaaatctgcaaaattgctacccctacccctgtgagtcacacatccaggttattctgggcttgcatggaggcagtatgtgcagctgcaatccagaccacaagcacccctttatgagcggggctttgagaagtatcatgaagcggcagaataaggagcaggtcccaccccctgctgtggaacctaagaaaccagggaacaagaagcagccaaagaaggtggcaactcctcccaaccaaaaccagaagcagggccgcttccgcagcctggaggaagcactgaaagctctggatgtggcagacctgcagaaggaactggacaagagccagagtgtgttctctggaaacccatccatatggttgaaggacctggccagctatctcaactacaagctacaagctcctctaagtgaacccacgctgagccagcatactcatgattatccctacagcctggtgagccgggagctacgtgggatcatccgagggctgctggcgaaggcagcagggtctctggagctcttttttgaccactgtctgttcaccatgttgcaagagctggataagacaccaggggagtcactacatggttaccgcatctgtatccaggccatcctgcaagacaagcccaagattgccacggcaaacctaggcaagttcctggaactgctgaggtcccaccagagccgaccagcaaagtgtctcaccatcatgtgggccctgggtcaagcaggttttgccaacctcaccgagggactgaaagtgtggctggggatcatgctgcctgtgctgggcatcaagtctctgtctccctttgccatcacatacctggatcggctgctcctgatgcatcccaaccttaccaagggcttcggcatgattggccccaaggacttcttcccacttctggactttgcctatatgccgaacaactccctgacacccagcctgcaggagcagctgtgtcagctctacccccgactgaaagtgctggcatttggagcaaagccggattccaccctgcatacctacttcccttctttcctgtccagagccacccctagctgtccccctgagatgaagaaagagctcctgagcagcctgactgagtgcctgacggtggaccccctcagtgccagcgtctggaggcagctgtaccctaagcacctgtcacagtccaggcaggtacagaagtctttgcaagaaaccattcagtccctcaagcttaccaaccaggagctgctgaggaagggtagccgtaacaaccaggatgtcgtcacctgtgcaatggcctgcaagggcctgttgcagcaggttcagggtcctcggctgccctggacgcggctcctcctgttgctgctggtcttcgctgtaggcttcctgtgccatgacctccggtcacacagctccttccaggcctcccttactggccggttgcttcgatcatctggcttcttacctgctagccaacaagcgtgtgccaagctctactcctacagtctgcaaggctacagctggctgggggagacactgccgctctggggctcccacctgctcaccgtggtgcggcccagcttgcagctggcctgggctcacaccaatgccacagtcagcttcctttctgcccactgtgcctctcaccttgcgtggtttggtgacagtctcaccagtctctctcagaggtggcaattaaccatgaccatcttcctggagaagagaaactacctggcaaagggccaaagtcttaggactgctgggcaggagaactggcctgtgttcaaggagagcacgtccggagaagccaagggaaatgtggagcaggagcagccaaagtggcccatcggctctcgagcagggtttgcgcgtcgcggtcgcaaagcccctgtgagtgcaggcaggccgttaaccgtcttccggaagacgctgctagaaccctccggccgctcctgcccgccatcgtccccgaacgacactcgctcagctacctgcttccccagaagccccatagtgggtaacagcatgattcgttgctgggtcctgaaaggagccattttttccagcttccttcacacaggcactgctgccactcatgggaccctagagtcagaccgaagctggggtatggccgtcaatgtgtactccacatctgtgaccagtgaaaatctgagtcgccatgatatgcttgcatgggtcaacgactccctgcacctcaactataccaagatagaacagctttgttcaggggcagcctactgccagttcatggacatgctcttccccggctgtgtgcacttgaggaaagtgaagttccaggccaaactagagcacgaatacatccacaacttcaaggtgctgcaagcagctttcaagaagatgggtgttgacaaagtaggtgcctgcgctctggggggccctgaggagcagtgtgaccctggggaagaagaggacccaccagcccaggcaactggggctgctggggtcattccgatcattcctgtagagaaattagtgaaaggaaaattccaagataattttgagtttattcagtggtttaagaaattctttgacgcgaaactttgatggaaaggattacaaccctctgctggcgcggcagggccagngagcgtagcgccacctcctaaccccaggtgaatcagatcttcaacaaaatcccaagaaactcattggcacagccagttcccacagaggaccgtcccccccacaggccccaaaaaacatgccagaccctctggccggctgagcaatgtggcccccccctgcattctcccggaagaatccctcccatcagcccgaaatggcggcccatgagactgatgccccaaattcttgaactcaacccaacagctggtgggacttgaagctgacaagtggatggggctgggagaaggaacgtgacttcttacttcaggcaaactttcgtgacatcgagctcatctgccagggagcatggaaagtgaaaacagccctgttatctcagggcatcattgggcatcctcttatgccacagaggaagggattcgcaccccctgaggacgatgagattgaagagcatcaacaagaagaccaggacgagtactgagggcggccgcagccctggctgactgcacggcttccccgtgcctccctccctgctccactcccacattatagtcctttcctaacacggtcggccgggtgctttgtgtcagtgctgcagcactggggagccaggcgaggggggcttgggggcatggggccggaaagcaggcagaagcccgtcctgggtggtgctggcccagttggtgggacccctgtccacacccaccctatttatttccgttgtctctctgctgtgtcgcccaacacttcccagggtgctgctgccacccgccccagccagccacctgctcctgacagccagcagctgtgtatttgacaaagtcattggtatatttttacttactggattctccttgcactttacctgttcttttccagagctgacagcacgggctccggcgcagtgtgcctggcttggcttcccttccccatggctgggggctggggtaggactcacccattctaatttattttgtcttttggcttctcagtagctaaggggaaggctgatgtcaggagagggagagggggctgaggaggtagtgctgtaggcccagggggtcagggaaagggaggggggcatgtgagggatggaaatgacctcctggcaccaggctcacccacccaaggccccctgccccagcactgaatcccagcgctgccctgaggcccccagccactccctccagcagcctggttcaccacacaaactctgcctggaccccattgtctgtctgcttcccacctgccctccccaccccctgcccctcgggcaccagcctgcatatgtgttcacttttatttaaataaacttgtgtggtaaaagtacatgccatgtgtccctcaactgaaaaaaaaaaa

SEQ ID NO: 1968 - DNA, 308 bp, Homo sapiens
cctgtgaacatataaatgaatctggtgttggggaaactttaatctgaaacccacgctgtggccctggagggtcccggtttgtcagttcttggtgctctgtgttcccagaggcaggcggaggttgaagaaaggaacctgggatgaggggtgctgggtataagcagagagggatgggttcatgatccaagggaccctttgcctttattatgccctttcctaggcccaggcctgggtttgtacttccacctccaccacatctgccagaccttaataaaggcccccacttctcccaaaaaaaaaaaaaaaaa

SEQ ID NO: 1969 - DNA, 431 bp, Homo sapiens
  SIMILAR (3)..(179): 881254mologous to Gallus gallus ets domain protein,accession number AF075708,Smith-Waterman Score=274.
tctggggcatccaaaagaatcggccagccatgaattacgacaagctgagccgctcgctccgatactattatgagaaaggcatcatgccgaaggtggctggtgagcgctactcgtacaagattgtgtgtgagcccgaggccctcttttctttggccttcccagagctggctgtccccgcccagccatttggccccaagggtggctactcttactagcccccagcggctgttccccctgccgcaggtgggtgctgccctgtgtacatataaaagaaactgggggtggggaaaccttcatctgaaacccacagatgtctctggggcagaaccccactgttctaccaagtgtcctataccagactctgagctgctcaccggagtcattgggaaggaaaagtggagaaatggcaagtctagagtctcagaaactcg

SEQ ID NO: 1970 - DNA, 418 bp, Homo sapiens
tattcatttcaataaggcaagaaaagaattcaccaaacacaaaattaattcatgataaaccctcctaaccaagtgggaagatatagaaatatcattaatctgacaactaatatctaccaaaaacctctagcacctgtcatattactggtgaaatattcaagatatttcttactggaattggagttacacaaagatatccattatcaccacttccattcaaagtcttcttggcagccctagacagaaaataaagggaaggggctggggaggaagtcaatggaattgaaaacaaaagaataaaactgtcatttgtaagtgacatgattgtgtatgtagaaaattcaaaagaaaaaaatggccaactattagaattaatgagaggaatttgcaaaactgctacaaaattacagaaattaat

SEQ ID NO: 1971 - DNA, 736 bp, Homo sapiens
  SIMILAR (736)..(383): 791254mologous to Homo sapiens RNA helicase (HRH1),accession number D50487,Smith-Waterman Score=464.
  misc_feature (1)...(736): n = a,t,c or g
tttaaagtttaaataattcttttcggcagtcctttggcacagagagcccagggctccctccccaaatagccttgattgtaattctaatagcaagtgttcctccctcttccatcccgcttgaatacctctgcctccaggcaaattccccccttcctgtgtgctggggagttagctgtgagctggctggggtggggtccgtggctgggtccgtggctgggtctgatggggaagtggtgtgttcaggaggtttcctggttggattcttcagtgcgttttggtggggcctgagggtgtcgctggtggggctctgacttctctctgcagctcaggtaccagacagtgatgagcagtttgttcctgatttccattcagaaaaccgtgagtagaggtcccattctggctgtctgttgaagagggcactggaaggatggatatagaccacctgctggtcgatcagtgtccggtaaccctcctgcgggtctttcttggcagcattacggaagaacccactgcagatggccttctgcactcggacctgtgacttgccacaggaaacaacatccagcttgtgtctgtccattatgcctaacatctgcttgcgaatgtcctgggcccggcgcanggaacgagcctggataaagtctcatagcaccatggggtggagaacttgttgtcttccaggagttgacacagctagcagggtgaggtgtccccttcatctgtggaatttgccctt

SEQ ID NO: 1972 - DNA, 2385 bp, Homo sapiens
  SIMILAR (1163)..(1597): 891254mologous to Danio rerio PEA3,accession number AF168008,Smith-Waterman Score=704.
acaactgtctgctgcgcccgaaaaacaagtcggtgcgctggggacccggggccggggccgccttactccggcctagccccgcggccctcggtgcgggctccagggcatgctcggtaccccccgcggctccagcccagacgccccggcctcaggtctcggcccccgcttggggccccggccgtgcggcgcgagggagcggccggatggagcggaggatgaaagccggatacttggaccagcaagtgccctacaccttcagcagcaaatcgcccggaaatgggagacttgcgcgaagcgctgatcggcccgctggggaagctcatggacccgggctccctgccgcccctcgactctgaagatctcttccaggatctaagtcacttccaggagacgtggctcgctgaagctcaggtaccagacagtgatgagcagtttgttcctgatttccattcagaaaacctagctttccacagccccaccaccaggatcaagaaggagccccagagtccccgcacagacccggccctgtcctgcagcaggaagccgccactcccctaccaccatggcgagcagtgcctttactccagtgcctatgacccccccagacaaatcgccaatcaagtcccctgcccctggtgcccattggacagtcgcccctacagccctttccccgggcagagcaacggaatttcctgagatcctctggcacctcccagccccaccctggccatgggtacctcggggaacatagctccgtcttccagcagcccctgggacatttgccactccttcacatctcagggagggggccgggaacccctcccaggccccctaccaacaccagctgtcggagccctgcccaccctatccccagcagagctttaagcaagaataccatgatcccctgtatggaacaggcggggccagccaggccgtgggaaccaggggtgggggttcaatgggggcacagggtacccaggggcgggggtggtgatcaaacaggaacagacggacttcgcctacgactcagatgtcaccgggtgcgcatcaatgtacctccacacagagggcttctctgggccctctccaggtgacggggccatgggctatggctatgagaaacctctgcgaccattcccagatgatgtctgcgttgtcccatgagaaatttgaaggagacatcaagcaggaaggggtcggtgcatttcgagaggggccgccctaccagcgccggggtgccctgcagctgtggcaatttctggtggccttgctggatgacccaacaaatgcccatttcattgcctggacgggccggggaatggagttcaagctcattgagcctgaggaggtcgccaggctctggggcatccagaagaaccggccagccatgaattacgacaagctgagccgctcgctccgatactattatgagaaaggcatcatgcagaaggtggctggtgagcgttacgtgtacaagtttgtgtgtgagcccgaggccctcttctctttggccttcccggacaatcagcgtccagctctcaaggctgagtttgaccggcctgtcagtgaggaggacacagtccctttgtcccacttgggatgagagccccgcctaacctcccagagctggcttggccccgcccagcatttttggccccaagggtgggctactcttactaagcccccagcggctgttccccctgccgcaagtgggtgctgccctgtgtacatataaatgaatctggtgttggggaaaccttcatctgaaacccacagatgtctctggggcagatccccactgtcctaccagttgccctagcccagactctgagctgctcaccggagtcattgggaaggaaaagtggagaaatggcaagtctagagtctcagaaactcccctggggggtttcacctggggccctggaggaattcagctcagcttcttcctaggtccaagccccccacactttttcccccaaaccacagagaacaaagagtttgttctgttctgggggacaagaaaaggcgcttcccaaactttcatactggcaagggagggtgaggaggttcacctgagctccccaagatctccccactgcggggagacagaagccttggactctgccccacagctgtggcccctggagggtcccggtttgtcagttcttggtgctctgtgttcccagaggcaggcggaggttgaagaaaggaacctgggatgaggggtgctgggtataagcagagagggatgggttcccttgtccaagggaccctttgcctttcttctgccctttccttaggcccaggcctgggtttgtacttcccacctccaccacatttgccagcccttaataaaggcccccacttctcccattaaaaaaaaaa

SEQ ID NO: 1973 - DNA, 444 bp, Homo sapiens
acgagctgagtcaggagagcttaaggggagagcgggaaaggactgcagccggggagagcaggacgcgccatctccattggcaccctctcccgccccacttccatcgctagaaaactaaggattcggtgttgggaccactcctgccctgacctgccctgtgactccgtcatactctccaaaggccagaccctcctagaccagctggaaccaccatcaagatgtccccagccatgtcagactctggggccccaggcggagggcaaccagatgtcttcagctccaagtctggcctctcctcccagcaagcagccacctctgatggccaacaggtgctgctgtgtgcccagatcaagaatccacctctgcggaattcaaaaccggctggggttctgggacagcagggaggagagaggtggagacgcaacatgggtttctgtgtcagac

SEQ ID NO: 1974 - DNA, 938 bp, Homo sapiens
  SIMILAR (214)..(348): 711254mologous to Mus musculus putative,accession number AK002220,Smith-Waterman Score=148.
ggcgcagatggcggcggcgcatttcgcttgagcgggccggggccatgagcgccgcccggccccagttcagcattgatgatgccttcgagctgtccctggaggacgggggccctgggcccgagtccagcggggtcgcgcgctttgggccgctgcacttcgagcgtcgggcccggttcgaggtggctgacgaggacaagcagtcccggctgcgcataccagaacctggagaacgatgaggatggagcccaggcctctccggagccggatgggggagtcggcaccaggttagggccagggattccagccgaacttccatccgcagcttcccagtggtccttcagcaccattcagcagcagcacccagcgctcctacaacacctgctgcagctggacccaacaccctttgatccagaagaaccgccgagtggtgctggcctccttcctgctcctgctgcctggggcctggtgctgatcctggtcggcgtgggaactggaggcgaccccctcttccaaggtgtctccagcgccagtcttcttcgtgccgggctttcctgttgttggtgcctggagtctaatcacgtgatcttcatctactgcgcggtcaagggccaccggggcttccagttcttctacctgcccctacttcgagaagtgaatcgcggcgcaacgtgtacccaacttgcggcccatggggcgtcacgtcttggcccatgttccgttcccctcatctcaagggaaaaggccctcccaggaccctcgaaaccccaagccccttagggagtttgctcaggaagttcggggcatgcaggcctggccctgggaaagccgcccgtcgcctgctctgtgccttaacttattctcgggccgtgcggctgctaggttgctgttattttgtgctaataaaagagtaattaattcccccaaaaaaaaaaaaaaaa

SEQ ID NO: 1975 - DNA, 992 bp, Homo sapiens
atttgctgagtgaagataaaaatccagtgaatgtgatgcctgaggcttacttcttatgcttatgtgtctattggaaatggtaacggcacaactttctatcttttctagtgaggctggcttgccggccaggctctccccttcctttgagatggcctccctgctccaggtcagtacaaaccagaagcttaaagcggaggcttttcctttatgtggcttatcaccagcatcaaataatttgaaattaatctttccccaaatgcccttttctaattctccagagcataaaatgctaattgtgaatattaaatttatgtgggtggcacatatcctgtttaacataattttattatttaattatttcttgagacggagtcttgctttgttgcccaggctggagcacggtgggcagtcataactcactgcagcctcaagctcctggaccatgcaaccctcccatctcagccttgtgagtagctaggaccacaggcatgagccaccacaccgagccttaaaatatgttttttaaataagcagaaccatgttttttcaagaagtagcatgcacaaagacaaagagacaattttagatgtcacacacagtaagtcaagctaatgattcagatagcctgttgtagtctcacctttccaatattataaatgatagtctgatccagaatttctcttttattcccaggcaaaaattaacttattcattttttattcaacaaatattttggggctaatatttattcaacagatgtttgttgggagcctaccatgtacctgatactgttctaggtactaaagaacccacaaatgaacaaaatagtccatcactgctctcagggagcttatgttctagtgggggaagtggacagaaaacaattacacatcatacttcacagactcttaagttgccgtcaactgtaagttgtgctttcacgtcccaccaagagaggaagaaatgcacgaaatcgtcgacgcgggaattca

SEQ ID NO: 1976 - DNA, 2551 bp, Homo sapiens
  SIMILAR (2307)..(2155): 981254mologous to Homo sapiens Human secreted protein, SEQ ID NO: 7508,accession number AAG03427,Smith-Waterman Score=267.
  misc_feature (1)...(2551): n = a,t,c or g
tgttccattatgttcccccccccaagtaagggtcctttcccaaaattcccaggtagcagattttcccgttcccccggtgttaaaccccgggccgggcccagcctttaaaacgcccccccataaggaaaaaaataataccttgcctgcccccgtaaaatttggcccccccaagggtcctttaaaaaggcccccccnnnnnnnnnnnnnnggttgaaatccatattacctatttattcaacaaaaaactgagtatcttctatggtccaggccatgtccttggcactgcgaacagagataagtcctggccctcaaggagctcacagtctagtgggggaaaaaagacacaagaataaataaatataatgtatttggagtttgcaaagggggccactatgggagacaaagaaacagagggaacctaaatatcctatagttaggcatcccacagggaaaggaaagacctggggcaatgtacatttttgttaaagaatacgataaggcagtgggttcttcaaagtgtgggctgggctaatttacctacattcagattcatttgggaggcacatattaaccaagtaagattcccagttacctttcttgcacatattcttgatttagtacgtgtgtggggggggtgggtgtacggtttgaggcctgagaatctggcattttaaaagcacctttaggtgatgctcctgcatcttaaagtttcagaactgatgagataaagtttgttcttcttatctggaataaagaatgatctccacatctgaaatgctaactagtattagtctttaatgagggccaaggcaagtagagaaaaggatggtagttgatattttctactatagtgaagcttattttaattctcacaataatcctatgaggtagatattattatccctattttagatggaaaaaaaaaccccaaaattagatagtttaagcaatttgttcaacagtatagagctaatgaatagcaacactaacatatgaacccagattcacttaactttaaagcctggccacgttctatatctccatgctagcaccaggggacaaattaactgattaaatggtacaattttctgtgagttctgtgccagatcgttctaggtaaataaatataaagaacagctacgtggtactttagtcatgccccccacatttatccatgcacacatcctacttggcagttggggactgaggacaaatccaggaggaatgattaaaacgaatggccacttcttactcctttttccatcatttcctcacccgctggtggaggtgtatcaatgtactatgtatggctaataactgggcccatctggaaagacaagcaaacataactggataccaataaaaacaaccccatctgatgtcaaaaattcttgggacccaaaacattcagaaggtcagaaggcatttaatgaaaatggcagggcagataagactcaagtttctcaaaagataaactgccaggaccagaagcaggtccagaatttacattagttaacagctcacccttttagagaaatagtgaaaggatagcagcttcccccagtttaaaaaaatactatctgtctctctcaatacatagactcaaaggtgcaacaaaatagacacggctcagagaatagtgggatgtccaccctatttaaagagcttagggacaggcccaacctataaaaattcttctggaaggaagaaaacacacacacacaaactgcgaaatactgcttaaattcccactcaccacattcagtgtcatataaccagatcttaggcaggagcagcagagtggagcatgttagatcaataaagaaatgtcaggccaggcacggtggctcacacctgtaatcccagcactttgggaggtcaaggtggtggatcacttgaggccaggagttcgagaccagccagcctggccaacaaagtgaaacccctgtctctacaacaatacaaaaataagccaggtatggtggcatgtgcctgtaatcctagctcctcaggaggctgacgcagcagaatcacttgaaccagggaggtagaggttgcagcgagctgagatcacgctactgtactccagcctgggcaagacagagcaagacttcatctcaggaaaaaaagaaagagaaagaaatgccatggtaaaggcagctgacaacaatactgggggccttgggttcagaaggctggtgtgtaaccaccgtcctttcctatcactgagcttggagccacaacagtgacactacaaacgaaagatgggtttccagctctggagaacaactttcttatttctggcattccaaacaatttttcagtcccaagatgagttttgataaaatcagcccatagccctgacacaatggacagtacataactcagatttcattattttgtataacaaacattgtaagccagacttaaaaaaaaaattattgctatattttccccacatccaatctgggaacatttgctttcatccactttttcgtatcatgtttagagttgtttttaaaaaaatcatgcaaaccaggattaatcttct

SEQ ID NO: 1977 - DNA, 517 bp, Homo sapiens
  SIMILAR (517)..(407): 941254mologous to Homo sapiens low-Mr GTP-binding protein Rab31,accession number U59877,Smith-Waterman Score=188.
tttagcaaaaatgcaactacatcccctccatgtgcatttcatacactaaaggccattttgtggtggtgtggtgggttttcccagggttttctaaaatccttttcaggtacatttcctgccccgccccctgcaggtcttccaggatgcaaagccagtgtgctcactcttctcaaagtgaggtgccaggccaccgagcgtagggtccttcagcagtgcacaggatgtgggctctggcttcttcaagtaccgtggaccacggcccttgggtcaacagcaccggcggctggcttgcatggttggcttctcaactttgattgttccattgtttccattttcatgggggtccaagggtgggatctggcggcccgttcctgaccagcagtgtcccagatgaggaacttgtgaagtcatttccacaaagcacagttttggtcataaaagatgccccaatagtagggctgatgttgtggtcaaagtgatcctggacaaatcgacacacgatgcttgatttcccaac

SEQ ID NO: 1978 - DNA, 1845 bp, Homo sapiens
  SIMILAR (1675)..(1845): 941254mologous to Homo sapiens Human vesicular binding protein,accession number AAW86813,Smith-Waterman Score=284.
atgtgggaaagtttggaacttcctagagacttgttgaacggctttgcccaaaatgctgatagcaatatggacaataaagtccaggcggaggtggtcttagatggagatggggaacttgttggcaactggagcaaaggtcttccaggatgcaaagccagtgtgctcactcttctcaaagtgaggtgccaggccaccgagcgtagggtccttcagcagtgcacaggatgtgggctctggcttcttcaagtaccgtggaccacggcccttgggtcaacagcaccggcggctggcttgcatggttggcttctcaactttgattgttccattgtttccattttcatgggggtccaagggtgggatctggcggcctgcaacaaaaaggaggccaaggttctgctgcatgaagcccaattcatgggcttaggaagttcagtaatgctacagccctttgactatgatccgaatgaaaagagtaaacacaagtttatggtacagacaatttttgctccaccaaacacttcagatatggaagctgtgaggtgcccctcacagagcccagccaagctccacgggtggtcccacagagccagagcaagacgatcactcactccctctaaacactgcacttttattaacacggccacagctcgtattcttggcagccacaatacaccagtgctgaatattaactttattctcaaccaaactttaacccgttttactcctgctcccgctaaatctcagggccacacctcagacatctgcagttcgttttctgaacccaagagctgggccttttgtttgccagctctgtggagcacaacgggggggcgggataagtgtaggggccacggcacacacggtgggggctcacagacagaggccaagtacatctgtgatctcctcacaccacccaatgcatctgtaagctccctgccagtgagggcaccccccacccccaccacagattccaccagccaagagtgtccgcaccggcactggcttctctcgccgcaagaagtactgagcttccttcttttccctcttgattttgagagtctctacaccgccatggtaggaagtgagaaggaaacgggggaaggcacaccttctgtaggaaagcatgcttatgaaagagcccatgccgacggacctcctggcttgggagagggaatcaactctccccttccaacatgcactggcgtacgtgggctgacccaggacatccaagacactggccaggaatcagacaccctgagcacattagggagtgaagatgatgagaagactgctaagcctcagggtgacacctcagaggtcctgccagctgtaaagaactcaccacggactttccaagaggatggtgacattcccagactaccactgggagctgccaaaaactcagctcaaaaaccccagcgactagggcggtcgttgtgtgtgtggctagccaagtcacacagaggagacttagatggccccacattttattttttgaggaagggaggagccccagccgccccctttgcccctggagttcagcccacatggatctctcctttccagagcccctgctctcttgagctcagccctgcacagcctgatttctctcataactatgccctgagtgttcacttcactgttcccaaacagactttcgattctttgaagaatgatatggaacctagcaaagctgttccactgaatgcatctaagcaagatggacctatgccaaaaccacacagtgtttcacttaatgataccgaaacaaggaaactaatggaagagtgtaaaagacttcagggagaaatgatgaagctatcagaagaaaatcggcacctgaga

SEQ ID NO: 1979 - DNA, 377 bp, Homo sapiens
ctaattcatgataaaccctcctaaccaagtgggaagatatagaaatatcattaatctgacaactaatatctcccaaaaacctctagcgcctgtcatattactggtgaaatattcaagatatttcttactggaattggagttacccaaagatatccattatccccacttccattcaaagtcttcttggcagccctagacagaaaataaagggaaggggctggggaggaagtcaatggaattgaaaacaaaagaataaaactgtcatttgtaagtgacatgattgtgtatgtagaaaattcaaaagaaaaaaatggccccctattagaattaatgagaggattaagcaaaaatgctacaaaattacagaaattaatcgt

SEQ ID NO: 1980 - DNA, 897 bp, Homo sapiens
  SIMILAR (163)..(116): 751254mologous to Homo sapiens Human secreted protein, SEQ ID NO: 7420,accession number AAG03339,Smith-Waterman Score=60.
atggaacttcctaaagacttgtttaatggctttgcccaaaatgctgatagcaatatggacaataaaatccaggctgaggtggtctcagatagagatggggaacttgttgggaactggagcaaaggtgactcttgttatgttttagcaaagagactggtggcatcttgcctctgccctagaaatctgtggagctttgaactggagagagacgatttagggtatctggcagaagaaatttctaagcagcaaagcattcaaaagttgacttgggtgctgttaaaagcattctgttttaaaagggaaacagagcataaaagttcagaaaatgtgcagcctgatgatgcagaagaaaagaaaaacccattttttgagaagaaattcaagccagctgcagaaatttgcataagtagcaaggagcctaatgttaatccccaagaccatggggaaaatgtctccaggccatatcagagatcttcacagcagcccctcccatcacaggcccagaagcccaggaggaaaaagtggttttgtgggccgggcccagggtccctgtgctatgtgcagcccagggacttggtgctctgtgtcccagctgctccaaccgtggctgaaaggggccaatgtacagcttgggctgtggcttcacagggtggaatccccaagccttggcagcttccacgtggtattgagcctgtgggtgcacggaagtcaagaactgaggtttgggaacctccacccagatttcagaagagcttgtaccgtgaacctggaaaagcctcagacactcaacgccagcctgtgaaagcagccaggagggagcctgtaccctgcaaagccacagaggcagagctgcccaagaccatgggaacctaccttttgcgtcagcatgacctagat

SEQ ID NO: 1981 - DNA, 1134 bp, Homo sapiens
  SIMILAR (943)..(1059): 841254mologous to Homo sapiens Human secreted protein, SEQ ID NO: 7420,accession number AAG03339,Smith-Waterman Score=156.
ttaagcttcaaagcaatctcctttgacttcaggtctcacatccaagtcacactgatgcaaaaggtgggttcccatggtcttgggcagctccactcctgtggctttgcagggtatagtctccctcctggctgatttccctggctggcattgagtgtctgtgacttttccaggtgcacaatgcaagctgtcagtggatctacaattctggggtctggagaaaggtggccctctactcacagctccactaggcaaagtcccagtagagactctgtgtgggggttctgatcccacattttcctcctccatttccctaacagaggttctccatgatgaccctgcccctgcagcaaaattttgcctgggaatccaggcgtttccatacatcttctgaaatctaggcagaggttcccaaacctcagttcttgacttctgtgcacctgcaggctcaacaccacatagaagctgccaaggcttgggtcttgcaccctctgaagccacagcctgagctgtagattgtcgcctttcaaccacagctggagcagctccaggcctgtgatgggaggggctgctgtgaaggtctttgacatggcctggagatgatttcccatggtcttggggattaacattaggctcctcgtcacttatgcaaatttctgcagctggcttgaatttctccccagaaaatgggtttttcttttctatcacattgtcaggctgcaaattttccaaactcttattctctgtttcccttttaaaactaaatgcttttaacagcacccaagtcacttcttgagtgctttgctgcttaggatttttttccatcggataccctaaatcatctctctcaagtttaaaattccacaaatctctagggcaggagcaaaatgccaccagtctctttgctaaaatataacaagagtcacttttgctccagttcacaaaaagttcctcatgtccatctgagaccacctcagcccggactttattgtccatattactatcagcattttgggcaaagccattcaacaagtctctaggaagttccaaactttcccacattttcctgtcttcttctgatccctccaaactgttccaacctctgcctattacccagttccaaagtcgcttccacat

SEQ ID NO: 1982 - DNA, 450 bp, Homo sapiens
  SIMILAR (153)..(1): 781254mologous to Homo sapiens Human secreted protein, SEQ ID NO: 7420,accession number AAG03339,Smith-Waterman Score=179.
atgtgggaaagtttggaacttcctagagacttgttgaatggctttgtccaaaatgctgatagcaatatagacaataaagtccaggctgaggtggtctcagatggagatgaggaacttgttgggaactggagcaaagctgctccagccgtggctgaaatgcgccaatgtaaagctcaggccatggtttcagagggtgcaagcctcaagccttggcaacttccatgtggtgttgagcctgagaatgcacagacgtcaagaattgaagtttgggaacctctgcctagatttcagaagatgtacggaagtgcctggatgtccaggcagaggtttactgctgggctggggctcttatggagaacctctgctagggcagtgtgggagggaaacatgaggtcagaacccccacacagagtccctactggggcaccacctaatggagctgtgagatga

SEQ ID NO: 1983 - DNA, 1113 bp, Homo sapiens
  SIMILAR (939)..(986): 811254mologous to Homo sapiens Human secreted protein, SEQ ID NO: 7420,accession number AAG03339,Smith-Waterman Score=67.
tcaacagagttccaaggtgatcaccttggtacagaaagccatggccattttccaaaaccatgcctttgtgtaagtgccttgaaccttccggtaaattctgaataccttaggccctaagatcggggtttgcgttcggcgtttgctttcttgttttgcgttctggtttcctggtgcaggctcccttctccttttaaaggtgccggcctcattgttatgatctggcttttctctttctctgcgtggaagcatttccttctccctgtgtttaaggttggcatgtgtgtgacttatcccaggtgttactgttgaagtcacggtaccatgaaagccgctcattaaaccaggatgggtctctgaacttcctaagcccatgaattgggcttcatgcagcagaaccttggcctcctttttgttgcaggccgccagatcccacccttggacccccatgaaaatggaaacaatggaacaatcaaagttgagaagccaaccatgcaagccagccgccggtgctgttgacccaagggccgtggtccacggtacttgaagaagccagagcccacatcctgtgcactgctgaaggaccctacgctcggtggcctggcacctcactttgagaagagtgagcacactggctttgcatcctggaagacctgggagatactgggtgggagtgtgaacatttggctccacattacttatgcaaatttctgcagccagcttggatttctcctcagaaaatgggattttcttttctatcacattgccagactgcaaattttctaaacttttatgctctgcttcccttataaaaccaaatgcctttaacagcacccaagtcacctcttgaatgcttctctgcttagaaatttcttccgccaggtaccctaaatcatctctctcaagttgaaaattccagaaatctctagggcaagggcaaaatgctgccagtctctttgctaaaacataacaagagtcacctttgctccagttgccaacaagttccccatctccatctaagaccacctccgcctggactttattgtccatattgctatcagcattttgggcaaagccgttcaacaagtctctaggaagttccaaactttcccacat

SEQ ID NO: 1984 - DNA, 1149 bp, Homo sapiens
  SIMILAR (693)..(571): 851254mologous to Homo sapiens Human secreted protein, SEQ ID NO: 7420,accession number AAG03339,Smith-Waterman Score=173.
atgtgctcaccagtgtttctcttcttcctgggcacactgcaggactcatttctcagagtctttgcaggctggttaagaaccattgttggggagctagtggactcgtttggaggtgctctgggccgtggggctcccttaaggaaaggctacagcagggagatatgccacagcctttctggaatggtccttcagaaggaagctcaccccacttccaccctggcccaagaacctgtgcatctcacctgttgcagtgcttttaagatgggggctccttccctgctcaggaagatcctccagacaattcataagtccatgggggatgtggggtcccctgtagcaaggatcccagaggttcatgacaagtgtgagtcatccttcattcacttctttcccaggaaccattcaggttcaggagctagctctagcattcaggttcacaacagacttgattttaatgtaactaatgtgtccgtatccaaggttcttctcccatccttaattcaaagcaattttgataaaagtaaaggcagaggttggaacagtttggagggctcagaagaagacagaaaaatgtgggaaagtttggaacttcctggagacttgttgaatggctttgaccaaaagcctgatagcaatatggacaatcaggtccaggctgaggtggtctcagatggagatgaggaacttgttgggaactggagcaaaggtgacttttgttatgttttagcaaaaagactggcagcattttgcccctgccctagggatttgtggaaatttgaacttaagagagatgatttagggtatctggcagaagaaatttctaagcaacaaagcattccagaggtgacttgggtgctgctaaaggcgttcagttttaaaagggaagcagagcataaaagttcagaaaatttacagcctgacaatgcgatagaaaagaaaatcccattttctgaggagaaattcaagctggctgcaggaatttgcataagtaacaaggagtcaaatgttaatccccaaggcaatggggaaaatgtctccagagtatgtcagagacctttgtggcagcctctcccatcacagacctggaggccgaggaggaaagtggtttcatgggaagggcctagggtccccgtgctgtgtgcagtttag

SEQ ID NO: 1985 - DNA, 537 bp, Homo sapiens
  SIMILAR (210)..(76): 771254mologous to Homo sapiens Human secreted protein, SEQ ID NO: 7420,accession number AAG03339,Smith-Waterman Score=170.
atgtggaagcgactttggaaccaggtaacagacacgggttggaacagtttggagggctcagaagaagacaggaaaatgtgggaaagtttggaacttcctagagacttattgaatggctttgcccaaaatgctgatagcaatatggacaacaaagtccaggctgaggtggtctcagatggagatgagaaacttgttgggaattggagcaaaggcctcctgctcctggaggaaggcatggaccctgaagcagtgggcttccaagccctgcctccagactgtagaggcccttggacaaaccctgtgggctctgtggacaatcccagagggcttgtcaacatgaaggttccatttgtcaggcccctgcatgaggaccccaaccccctgaagatcttcatgttaagtgctgctggcaacaaaagtagatggatccctggaagtctctgtctgcacgtgacagctactccaaccactgctgagcttccaggagcttcccgtgatggcaaggtaccagctgtgtgccgagtaccagctgtgtga

SEQ ID NO: 1986 - DNA, 828 bp, Homo sapiens
  SIMILAR (706)..(828): 851254mologous to Homo sapiens Human secreted protein, SEQ ID NO: 7420,accession number AAG03339,Smith-Waterman Score=166.
ttaaaaggctcctgattggcaggacatgagggcagacaggagaagaggatgagcccttggtggttgtagcaaccgcaaagggagacttgagcttgaaaggtgggtgttgagcttgaacgctttcttaattggtggctgcttgggctgacaggcaggagttggggctgccaaggatgacgagtcctggaaaagactgattaaagtgtggaaaacagtggagtgatccgataacaagcccacagaccgagtctcaattacttgggtcttctcaacagcagcttcatcaacagcgtcaccttcagggaccatgaaaataaaaccgtgatagccctctctgcttctctctttcctcttgcccaatacccaaaacatacacaaatcgccacattttgcttccttttcctccaaaagtttatgcaaatttctgtagccagcttgaatttctccccagaaaatgggtttttcttttctgtcacagtcagtttgcaaattttccaaacttttatgctctgcttcccttataaaactgaaagcctttaacagcatccaagtcacctcttgaatgctgagctgcttggaaatttcttccaccagataccgtatattatctctctcaagtttaaagttccacagatctctaaggcaggggcaaaatgctgccattctctttgccaaaacataataagagtcacctttgctccagttcccaacaagttcctcatctccaactgagatcacctcagcctggattttattgtctatatcactatcagcattttgggcaaagccattcaacaagtctctaggaagttccaaactttcccacat

SEQ ID NO: 1987 - DNA, 1642 bp, Homo sapiens
agctgggaccgttcatgtgcacagcagtccagtgcccctttctcgtatctgtagcctttcaactctcttaaccaagacatccatgccctcccctgcttcccctgtgtctcgagcatggtcccggaggtgcccctcacagagcccagccaagctccacgggtggtcccacagagccagagcaagacgatcactcactccctctaaacactgcacttttattaacacggccacagctcgtattcttggcagccacaatacaccagtgctgaatattaactttattctcaaccaaactttaacccgttttactcctgctcccgctaaatctcagggccacacctcagacgtctgcagttcgttttctgaacccaagagctgggccttttgtttgccagctctgtggagcacaacgggggggcgggataagtgtaggggccacggcacacacggtgggggctcacagacagaggccaagtacatctgtgatctcctcacaccacccaatgcatctgtaagctccctgccagtgagggcaccccccacccccaccacagattccaccagccaagagtgtccgcaccggcactggcttctctcgccgcaagaagtactgagcttccttcttttccctcttgattttgagagtctctacaccgccatggtaggaagtgagaaggaaacgggggaaggcacaccttctgtaggaaagcatgcttatgaaagagcccatgccgacggacctcctggcttgggagagggaatcaactctccccttccaacatgcactggcgtacgtgggctgacccaggacatccaagacactggccaggaatcagacaccctgagcacattagggagtgaagatgatgagaagactgctaagcctcagggtgacacctcagaggtcctgccagctgtaaagaactcaccacggactttccaagaggatggtgacattcccagactaccactgggagctgccaaaaactcagctcaaaaaccccagcgactagggcggtcgttgtgtgtgtggctagccaagtcacacagaggagacttagatggccccacattttattttttgaggaagacagaaacagaaaggagcataggtgtgagaagctggagccccactgtggacctgctgagtctgaggcatccacgcacatccagggggagccgcaggtgtgcggcgctcagggagacaaccggtaggacacttagacctgagttgtcagaggacatagcggggttccaagccctgggaagagatcccaccgatcacggggcagagaggctgagaagggaagagaagccgggaccaaagaagctccggcagagccgaagaagcctggcaaagggaggagccccagccgccccctttgcccctggagttcagcccacatggatctctcctttccagagcccctgctctcttgagctcagccctgcacagcctgatttctcccataactatgccctgagtgttcacttcactgttcccaaacagactttcgattctttgaagtggggctggaagagaatgctttcttacttgtgtgtcagtcattcagaatgtcggaaaggcgatgatgctgaagctataacagcacctaaggacgtgcaaactgtcatggcctaa

SEQ ID NO: 1988 - DNA, 1048 bp, Homo sapiens
  SIMILAR (508)..(473): 751254mologous to Homo sapiens Human secreted protein, SEQ ID NO: 7420,accession number AAG03339,Smith-Waterman Score=47.
actgatggtattataggggcttcccccttcagtgggcactcattcttctccttcccgccattatgtgaagaaggacatgttgcttccccttctgccatgattgtaagtttcctgaggcctccccagccatgctgaactgtgagttaattacacctctttcgtttataaattgttcagtctcaggtatgtcttatttagcagtgtaagaacagactaatatagtaaattggtgctgcagagagtggggtgctactgtaaaaatacctgaaaatgtggaagcgactttggaactgggtaacaggcagaggttggaacagtttgtaggactcagaagaagacaggaagatgtgggaaagtttggaacttcctagagacttgttgaatggctttgaccaaaagcctgatagcaatatggacaataaaatccaggctaaggtggtctcagatggagatgaggaacttgttgggaactggagcaaaggtgactcttgttatgttttagcaaagagaactggtggcattttgcccctgccctagagatttgtggaactttgaacttgagggagatgagttagggtatctggcagaaaaaatttctaagcagtaaagcattcaagaaatgacttcggtattgtcaaaagcattcagtgttatgtattcactacaatatggttttgaacttatggaatttatgtttaaaaggaaggcagagcatgaaagtttggaaaaattgcagtctgacaatgtgattgaaaagagaaagccattttctgaggagaaattcaagctgactgcaaaagtttgcataggaaacaaggagccaaatatcaatcgagaagacaatgggaaaatgactccaggacattttggggacttgatgacctacatcccagccatggctgaaagtgtccgatgtagagctcaggctgttgcttcagagggtggaagccccaagccttggtggcttatacgtggtgttgggcatgagggtgaacagaagtcaagaactgaggtttgggaacctccaccaagatttcagaggatgtag

SEQ ID NO: 1989 - DNA, 976 bp, Homo sapiens
  SIMILAR (61)..(225): 671254mologous to Mus musculus putative,accession number AK014407,Smith-Waterman Score=177.
ccctcggacggccccggaggatgctgctgagccccggcactgcctggctgcgagcacatgatggcgatacgggagctcaaagtgtgccttctcggggacactggggttgggaaatcaagcatcgtgtgtcgatttgtccaggatcactttgaccacaacatcagccctactattgggggcatcttttatgaccaaaactgtgccttgtgaaaatgacttcacaaagttcctcatctgggacactgctggtcaggaacgtttttattcattggctcccatgtactatcgaggctcaggtgcagctgttatcgtgtatgattttaccgaggccggattccattttcatcccttgaagaaatgggtccaagcggctgaaagaacttggtccggaaaaacattgtaatggccatcgctggaaacaagtgcgacctctcagatatttagggaggttcccctgaagggatgctaaaggaatacggctgaatccataggtgccatcgtggttgagacaagtgcaaaaaatgcctattaatatcgaaagagctctttcaaggaaatcagccgcccagatccccacccttggaccccccatgaaaatggaaacaatgggaccatcaaaagttgagaagccaacccatgcaagccagtccgccggtgctgttgacccaagggcccgtggtccacgggtactttgaagaagccagagccccacatcctgtgcactgctgaaggaccctacgctcggtggcctggcacctcactttgagaagagtgagcacactggctttgcatcctggaagacctgcagggggcggggcaggaaatgtacctgaaaaggattttagaaaaccctgggaaaacccaccacaccaccaccacaaaatggcctttagtgtatgaaatgcacatggaggggatgtagttgcatttttgctaaaaaaaaaaaaaaaaacctttaaaaattgttggatgtgta

SEQ ID NO: 1990 - DNA, 489 bp, Homo sapiens
tttcaaagtacacaaatgtcaacttcattaaggatgtctggcatagctgagttcagtcatgtaacatacaaagtcagcttgatcaaaaggttgcaggctgcccactgctaaaatggaggagaaaaggaaaccatgggcttccctgaagtgtgaatgagtgcataggccactgccgacgtgtgtatttatactgaagacatgctgggctgacaagggagattaggaaacataaatccccaccactacactgctctatcttcacctttgaacctctggagcagcactttctctctttcctatttcttctgttgtgcccagtgaaggagttactatatagctttatagcaactgcaagccatggctatttttgaatatttaaaaaaaacatttttgcggccaggcactgtgcctcactcttgtaatcccagcactttaaggaggtcgaggcgggtggatcacctgaggtcaggagctcgaggccagccctgc

SEQ ID NO: 1991 - DNA, 2378 bp, Homo sapiens
  SIMILAR (1060)..(1689): 601254mologous to Homo sapiens 33 kDa Vamp-associated protein,accession number AF154847,Smith-Waterman Score=551.
atggatgaagctggaagccatcatcctcagcaaactaacacaggaacagaaaaccaaacactgcatgttctcactcgtaagtgggagttgaacaatgagaacacatggacacaccagtctgatgattgcaatgatctgatcgtagaataccacaagcctaaccaagctgcggccctgctacagctgccaaacagagcagtattgttgctaaagcagattattaaaacctcagtggaagtggatcatcgtaaaggtcttcatcctcatggtctttacgttgagtgggctgaggaggaagataagggaggagttggtcttgctgtctcaggggtggcagagatgggagaaaattcccctctttacaattcttcaaaatccacaattctattgatctttgaccagattacaaataggaacaatgagagttgccgtggccatgggctcagtttgtttgtcccatttgtgtatgatcgccttcccctgcggggaactgggcaaggggcaagcctggtggttcagtcctctggagtcctgatgcttgttgggctttttctttttgccagcatgctctggcactggcaaacaagtcatttagagggagctgaggagagatcaacagaatctgagaaaagtaggcaatgtgcacgcagaggccgtcacgtgggtcgccgaggctcgcaagtgcgcgtggccgtggcggctggtgtggggttgagtcagttgtgggacccggagctgctgacccagcgggtggcccaccgaaccggtgacacagcggcaggcgttagggctcgggagccgcgagcctggcctcgtcctagagctcggccgagccgtcgccgccgtcgtcccccgcccccagtcagcaaaccgccgccgcgggcgcgcccccgctctgcgctgtctctccgatggcgtccgcctcaggggccatggcgaagcacgagcagatcctggtcctcgatccgcccacagacctcaaattcaaaggtgatggatgagtatttatacgaccagaacaatactacactgtatgaaaatggtgtaaaagaagtaaaagacatggtcccttccggccccttcacagatgtagtcactacaaatcttaaattgcgaaatcccatcggatagaaaagtgtgtttcaaagtgaagactaccgtgccttcacccggtactgtgtgaggccccaacagtggaatttattgacccagggtcaactgtgactgtttcagtaatgctacagccctttgactatgatccgaatggaaaggagtaaacacaagtttatggtacagacaatttttgctccaccaaacacttcagatatggaagctgtggtgggaaagaggcaaaacctgatgaattaatggattccaaattgagatgccgtatttgaaatgcccaatgaaaatgataaattgaatgatatggaacctagcaaagctgttccactgaatgcatctaagcaagattggacctatgccgaaaccacacagtgtttcactttaatgataccgaaacaaggaaactaatggaagagtgtaaaagacttcaggggagaaatgatgaagctatcagaagaaaatcggcacctgagagatgaaggtttaaggctcagaaaggtagcacattcggataaacctggatcaacctcaactgcatccttcagagataatgtcaccagtccctcttccttcacttctttgttgtaattgcagccattttcattggattctttctagggaaattcatcttgtagagtgaagcatgcagagtgctgtttcttttttttttttttctcttgaccagaaaaagatttgtttacctaccatttcattggtagtatggcccacggtgaccatttttttgtgtgtacagcgtcatataggctttgcctttaaaggacctttaccggtaaaaaaccccattaaaaccaactggtccgcttacggaccgggtggtttttacccaaaccttccttaccaaatgtacgtggcacttggagccctttataaaattcataaataaagaattgttctttctttgtggttttaataagagttcaagaattgttcagagtcttgtaaatgttattttaataatccctttaaattttatctgttgctgttacctcttgaaatatgatttatttagattgctaatcccactcattcaggaaatgccaagaggtattccttggggaaatggtgcctcttacagtgtaaatttttcctcctttacctttgctaatatcatggcagaatttttcttatcccttgtgaggcagttgttgactgagtttttcatccttacaatcctgtcccatggtatttaacataaaaaaaaataaaactgttaacagattcttgctcgataa

SEQ ID NO: 1992 - DNA, 417 bp, Homo sapiens
  SIMILAR (118)..(417): 1001254mologous to Homo sapiens signal transducer and activator of transcription Stat5B,accession number U47686,Smith- Waterman Score=512.
tttcgtagctcagcagctccaaggagattcccttcattttatgcaagcgttatatggccagcattttcccattgaggtgcggcattatttatcgcagtggattgaaagccaagcatgaacacgtatgaccgctgccccatggagctggtccgctgcatccgccatatattgtacaatgaacagaggttggtccgagaagccaacaatggtagctctccagctggaagccttgctgatgccatgtcccagaaacacctccagatcaaccagacgtttgaggagctgcgactggtcacgcaggacacagagaatgagttaaaaaagctgcagcagactcaggagtacttcatcatccagtaccaggagagcctgaggatccaagctcagtttggcccgctggcccagctgagcccccag

SEQ ID NO: 1993 - DNA, 858 bp, Homo sapiens
  SIMILAR (64)..(543): 911254mologous to Homo sapiens signal transducer and activator of transcription Stat5B,accession number U47686,Smith- Waterman Score=786.
atggccatttaccctcaaatacttgacagtgtatctactcccagcaagggcattcttctacgcaacctgaatgccattgtcactctcaagaaatttagcagtgataaaggcagggtgccatttgccgtgcctgacaaagtgctgtggccacagctgtgtgaggcgctcaacatgaaattcaaggccgaagtgcagagcaaccggggcctgaccaaggagaacctcgtgttcctggcgcagaaactgttcaacaacagcagcagccacctggaggactacagtggcctgtctgtgtcctggtcccagttcaacagggagaatttaccaggacggaattacactttctggcaatggtttgacggtgtgatggaagtgttaaaaaaacatctcaagcctcattggaatgatggggccattttggggtttgtaaacaagcaacaggcccatgacctactcattaacaagccagatgggaccttcctcctgagattcagtgactcagaaattggcggcatcaccattgcttggaagtttgattctcggggcgcctgggagcggggccttggcagttcaggcctcctgctgaatcggaatgaaggggcctcagctgtgctgccagagtcctcaatgccatccactatcctgggaacaggcagtgctcatcagcccatgggggaggcaactttgctggtccaggaaggtctagctctagctggctctagcaacagtcacagtaatcttgcagtttctgagtgccctcaacagtgggaggagccgcccagagccaggcagggcgacagcaacagagggaaaaccacagtggaattacaagttggttattaccatgaatccacgtga

SEQ ID NO: 1994 - DNA, 813 bp, Homo sapiens
  SIMILAR (484)..(744): 731254mologous to Homo sapiens signal transducer and activator of transcription Stat5B,accession number U47686,Smith- Waterman Score=335.
atgctgctgtggccactgctgctgctgctgctgctgctgccaacattggccctgctcaggcagcagcggtcccaggatgccaggctgtcctggcttgctggcctccagcaccgagtggcatggggggccctggtctgggcagccacctggcagcggcggaggctggagcagagcacgctccatgtgcaccagagccagcagcaggccctgagggactcagtagatcttgataatccacaggagaacattaaggccacccagctcctggagggcctggtgcaggagctgcagaagaaggcagagcaccaggtgggggaagatgggtttttactgaagatcaagctggggcactatgccacacagctccagagaatcccctgtgatgatttaccaaagaacaaactacttcccttgtctgagcatcacgcactgaaattggagctgcccgtaaataagcagaagatggcgggtactggggacagagctaaagctgttgatggatacgtgaagccacagatcaagcaagtggtccctgagtttgtgaacgcatctgcagatgccgggggcgcagcgccacgactgagtggagttgtgatgtgtctggacagccggtgtgagagccctgactcagtccttgacaccgatggggacttcgatctggaggacacaatggacgtagcgcggcgtgtggaggagctcctgggccggccaatggacagtcagtggatcccgcacgcacaatcggtaacccgggacctctccatcgtcaacttcttcatcttcaccagaagaatcactcttgtggatgtttaa

SEQ ID NO: 1995 - DNA, 5226 bp, Homo sapiens
  SIMILAR (227)..(2599): 901254mologous to Homo sapiens signal transducer and activator of transcription Stat5B,accession number U47686,Smith- Waterman Score=3641.
gcggcgcgcgtccctgggcctccgcgcgtgagcggcgcgcgcgcccccgcgggccccggcgggaggagagtcggcggccggagccgtcaccccgggcggggacccagcgcaggcaactccgcgcggcggcccggccgagggagggagcgagcgggcgggcgggcaagccagacagctgggccggagcagccgcgggcgcccgaggggccgagcgagattgtaaaccatggctgtgtggatacaagctcagcagctccaaggagaagcccttcatcagatgcaagcgttatatggccagcattttcccattgaggtgcggcattatttatcccagtggattgaaagccaagcatgggactcagtagatcttgataatccacaggagaacattaaggccacccagctcctggagggcctggtgcaggagctgcagaagaaggcagagcaccaggtgggggaagatgggtttttactgaagatcaagctggggcactatgccacacagctccagaacacgtatgaccgctgccccatggagctggtccgctgcatccgccatatattgtacaatgaacagaggttggtccgagaagccaacaatggtagctctccagctggaagccttgctgatgccatgtcccagaaacacctccagatcaaccagacgtttgaggagctgcgactggtcacgcaggacacagagaatgagttaaaaaagctgcagcagactcaggagtacttcatcatccagtaccaggagagcctgaggatccaagctcagtttggcccgctggcccagctgagcccccaggagcgtctgagccgggagacggccctccagcagaagcaggtgtctctggaggcctggttgcagcgtgaggcacagacactgcagcagtaccgcgtggagctgcccgagaagcaccagaagaccctgcagctgctgcggaagcagcagaccatcatcctggatgacgagctgatccagtggaagcggcggcagcagctggccgggaacggcgggccccccgagggcagcctggacgtgctacagtcctggtgtgagaagttggcggagatcatctggcagaaccggcagcagatccgcagggctgagcacctctgccagcagctgcccatccccggcccagtggaggagatgctggccgaggtcaacgccaccatcacggacattatctcagccctggtgaccagcacgttcatcattgagaagcagcctcctcaggtcctgaagacccagaccaagtttgcagccactgtgcgcctgctggtgggcgggaagctgaacgtgcacatgaaccccccccaggtgaaggccaccatcatcagtgagcagcaggccaagtctctgctcaagaacgagaacacccgcaatgattacagtggcgagatcttgaacaactgctgcgtcatggagtaccaccaagccacaggcacccttagtgcccacttcaggaatatgtccctgaaacgaattaagaggtcagaccgtcgtggggcagagtcggtgacagaagaaaaatttacaatccctgtttgaatcccagttcagtgttggtggaaatgagctggtttttcaagtcaagaccctgtccctgccagtggtggtgatcgttcatgggcagccagggacaacaatgcgacggccactgttctcctgggacaagtgcctttctgcaagagcctgggcagggtgccatttgccgtgcctgacaaagtgctgtggccacagctgtgtgaggcgctcaacatgaaattcaaggccgaagtgcagagcaaccggggcctgaccaaggagaacctcgtgttcctggcgcagaaactgttcaacaacagcagcagccacctggaggactacagtggcctgtctgtgtcctggtcccagttcaacagggagaatttaccaggacggaattacactttctggcaatggtttgacggtgtgatggaagtgttaaaaaaacatctcaagcctcattggaatgatggacccattttggggtttgtaaccaagcaacaggcccatgacctactcattaacaagccagatgggaccttcctcctgagattcagtgactcagaaattggcggcatcaccattgcttggaagtttgattctcaggaaagaatgttttggaatctgatgccttttaccaccagagacttctccattcggtccctagccgaccgcttgggagacttgaattaccttatctacgtgtttcctgatcggccaaaagatgtagtatactccaaatactacacaccagttccctgcgagtctgctactgctaaaagctgttggatggatacgtgaaggccacagatcaagcaagtggtccctgagtttgtgaacgcatctgcagatgccgggggcggcagcgccacgtacatggaccaggccccctccccagctgtgtgtccccccaggctcactataacatgtaccccacagaaccctgactaagtccttgacaccgatggggacttcgatctggaggacacaatggacgtagcgcggcgtgtggaggagctccctgggccggccaatggacagtcagtggatcccgcacgcacaatcgtgaccccgcgacctctccatcttcagcttcttcatcttcaccagaggaatcactcttgtggatgttttaattccatgaatcgcttctcttttgaaaacaatactcataatgtgaagtgttaatactagttgtgaccttagtgtttctgtgcatggtggcaccagcgaaggggagtgcgagtatgtgtttgtgtgtgtgtgtgtgtgtgtgtgtgtgtgcgtgtttgcacgttatggtgtttctccctctcactgtctgagagtttagttgtagcagaggggccacagacagaagctgtggtggtttttactttgtgcaaaaaggcagtgagtttcgtgaagcctggaagttggccatgtgtcttaagagtggctggactttgacatgtggctgtttgaataagagaaggacaaagggaggagaaagcacatgtgctccagtgagtcttcgtcactctgtctgccaagcaattgatatataaccgtgattgtctctgcttttcttctgaaatgtagataactgctttttgacaaagagaagccttccctctcccccacccctgtgttcttggggtagggaatggggaaaaggggcaaccttacaaagattgttgggggcaaggggaagttcacaagcttttcgggatggggcggtggcttttttcaccaaaacattaagctcatcttaattctctctttggcctctctcccctcctgcccgcccgcaccctgggaattgccactcagttcctctgggtgtgcacatatgtttggagaaatagaggagagaaaagagggccacgtaactgagagcttacagtgcccaatgcccgtttgtgttcctggccagagtggagtgcgcacccctggactccccaggccgctgaagattgttgcctgggttacccaggaagctgctgtttccggttgcccagcctttctctgagccagcggatgcacagtccgtggccttcttcaggcttattgatgatgctttttgcaaatgttgaatcatggttctgtttctaagttggatcttttttgttttctccttgccaccctaatttgacatcaaaattctctcttgtgcattgggccctgggtcattcaaacccaggtcccttcatttcccgttttctgttcacacctaatgtcttgaagagtaggtagcagcagtgtgggatgaacctaggccagcttgcttagcgggtcaccctgctgtgaagtcctgggcaggtgttggtaatgtgtgggaaatgcagtcagcaagtttgctgggggagtttgataaaagtataaaacaaaacaaaaaaagcctcgggtattaattttgttcccacgactttctttctgtagcctttacacccagaagggaagggaatgggctacagcaggtagttggaaggaagaggggggtgagccaggtgtattaaaatagcttacgggtaaggcctaaaaggtcacccctcggccccctctccaaaagaagggcatgggcacccccaggagaggatggccccaaaaaccttatttttatacatgagagtaaataaacatattttttttacaaaaataacttctgaatttatcagtgttttgccgttaaaaatattcctctatagtaaattatttattggaagatgacttttttaaagctgccgtttgccttggcttggtttcatacactgatttatttttctatgccaggcagttaggagtctctctgcctcttgaggagcaggcttacccgcatcccacttcagcccctacctacccctcaagatttgatgaaaattccaaccatgaagatgggtgcatcggggaagggtgagaaggagagcctgcctgctcatggatccaggctcgtagagtcactccctgcccgtctcccagagatgcttcaccagcacctgcctctgagacctcgctctctgttccagcaaccctggttggggggtcagacttgatacactttcaggttgggagtggacccaccccagggcctgctgaggacagagcagccaggccgtcctggctcactttgcagttggcactgggttggggaggaagagagctgatgagtgtggcttccctgagctggggtttccctgcttgtccagttgtgagctgtcctcggtgttaccgaggctgtgcctagagagtggagatttttgatgaaaggtgtgctcgctctctgcgttctatcttctctctcctccttgttcctgcaaaccacaagataaaggtagtggtgtgtctcgaccccatcagcctctcacccactcccagacacacacaagtcctcaaaagtttcagctccgtgtgtgagatgtgcaggttttttctagggggtagggggagactaaaatcgaatataacttaaaatgaaagtatactttttataatttttctttttaaaacttggtgaaattatttcagatacatattttagtgtcaaggcagattagttatttagccaccaaaaaaaagtattgtgtacaatttggggcctcaaatttgactctgcctcaaaaaaaagaaatatatcctatgcagagttacagtcacaaagttgtgtattttatgttacaataaagccttcctctggaagggaaaaaaaaaaa

SEQ ID NO: 1996 - DNA, 501 bp, Homo sapiens
  SIMILAR (136)..(360): 611254mologous to Mus musculus putative,accession number AK002632,Smith-Waterman Score=196.
  misc_feature (1)...(501): n = a,t,c or g
tcccgccgccgccgccgctgcagccactgcaggcaccgctgccgccgcctgagtagtgggcttaggaaggaagaggtcatctcgctcggagcttcgcncggaagggtctttgttccctgcagccctcccacgggaatgacaatggataaaagtgagctggtacagaaagccaaactcgctgagcaggctgagcgctatgatgatatggctgcagcatgaaggcagtcacagaacaggggcatgaactctccaaccgaagaagagaaatctgctctctgttgcctacaagaatgtggtaggcnccccgcgcgtcttccttggcgtgtcatctccagcattgagcagaaaacagagaggaattgagaagaagccagcagaacttgccaggacatcttgcaatgatgttctgggagctggtttggacaaatatcttattccccaattgcttacacaaccangaaagtnaaggtgttctacttttgaaaatgaaaggagattatt

SEQ ID NO: 1997 - DNA, 1818 bp, Homo sapiens
  SIMILAR (709)..(1011): 961254mologous to Escherichia coli, strain TK121, Peptide, 140 aa blasticidin S deaminase {EC 3.5.4.23},accession number S81409,Smith-Waterman Score=484.
atgacaagtcgatcacccacactccccagccctcttccctatgctgccaagcaggaaatggttgtcagaggttattgtgcaggcggagcagggtttatctcctcagacaaaggtggaaaggctgatggcagtgtgggtcagggagggggtgttgccattactggggatggggaagctgtttcttctggcaaaaaagtttcatcagagtttacaaactcagtgtccccagctctatcagggtcctcccatacgtccccattccaagttgcagggtcccattcttttccaatcaatgccctcactttaacagtagacacctggttatcgctaatgctggtaagggcgatcggtgcgtgcctcttcggttattaccccagctggagaatggagggatgtgctgctaggcgatcaggttgggcatcgtcaggtatttcacggtctcgacgttgtaaagagacggccagtgccaagcttgcatgccagcagtggctccaagtagcgaagcgagcaggactgggcggcggccaaagcggtcggacagtgctccgagaacgggtgcgcatagaaattgcatcaacgcatatagcgctagctgtggaatgtgtgtcagttagggtgtggaaagtccccaggctccccagcaggcagaagtatgcaaagcatgcatctcaattagtcagcaaccagaaatcggaggaagaagaatatatgaaaacatttaacatttctcaacaagatctagaattagtagaagtagcgacagagaagattacaatgctttatgaggataataaacatcatgtgggagcggcaattcgtacgaaaacaggagaaatcatttcggcagtacatattgaagcgtatataggacgagtaactgtttgtgcagaagccattgcgattggtagtgcagtttcgaatggacaaaaggattttgacacgattgtagctgttagacacccttattctgacgaagtagatagaagtattcgagtgattccaacctatggaactgatgaatgggagcagtggtggaatgcctttaatgaggaaaacctgttttgctcagaagaaatgccatctagtgatgatgaggctactgctgactctcaacattctactcctccaaaaaagaagagaaagggaatgacaatggataaaagtgagctggtacagaaagccaaactcgctgagcaggctgagcgatatgatgatatggctgcagccatgaaggcagtcacagaacaggggcatgaactctccaacgaagagagaaatctgctctctgttgcctacaagaatgtgaaaacagagaggaatgagaagaagcagcagatgggcaaagagtaccgtgagaagatagaggcagaactgcaggacatctgcaatgatgttctgtactctcccccttttccaatggatgtggcttcctgtgagcagactgctgtgattgttgtgtctcttctggggtctagctgctcagcgagtctacctggctctgggctggtactgggggttgtctgcacagagtcctgtgatgtgaaccatctatgggtctctcagccagcaataccagcgcctgtttcagtggcgatatcggagggtgcaatggactctgtgaaggtccttagctttggtggtttaatgttctttgtgctgattggcctcttgccaggaggtggagctttccagaaagcatcagctgtagtagtgtggagaggaattggtggtgggcagggtcctagaactcccttgtcttccactaccagggtggataggaaaggaccaccaggtgggggtggggctaggagtgtctga

SEQ ID NO: 1998 - DNA, 513 bp, Homo sapiens
  SIMILAR (1)..(93): 1001254mologous to Mus musculus putative,accession number AK002632,Smith-Waterman Score=160.
aaaacagagaggaatgagaagaagcagcagatgggcaaagagtaccgtgagaagatagaggcagaactgcaggacatctgcaatgatgttctgtactctcccccttttccaatggatgtggcttcctgtgagcagactgctgtgattgttgtgtctcttctggggtctagctgctcagcgagtctacctggctctgggctggtactgggggttgtctgcacagagtcctgtgatgtgaaccatctatgggtctctcagccagcaataccagcgcctgtttcagtggcgatatcggagggtgcaatggactctgtgaaggtccttagctttggtggtttaatgttctttgtgctgattggcctcttgccaggaggtggagctttccagaaagcatcagctgtagtagtgtggagaggaattggtggtgggcagggtcctagaactcccttgtcttccactaccagggtggataggaaaggaccaccaggtgggggtggggctaggagtgtctga

SEQ ID NO: 1999 - DNA, 962 bp, Homo sapiens
  SIMILAR (191)..(451): 621254mologous to Homo sapiens HS1,accession number X57346,Smith-Waterman Score=207.
ggaagtggagcataccgccaccgccgccgccgattccggagccggggtagtcgccgccgccgccgccgccgctgcagccactgcaggcaccgctgccgccgcctgagtagtgggcttaggaaggaagaggtcatctcgctcaggagcttctctcggaagggtctttgttccctgcagccctcccacgggaatgacaatggataaaagtgagctggtacagaaagccaaactcgctgagcaggctgagcgatatgatgatatggcttgcagcagtgaaaggcatgtcacagaacaaggggcatgaacgtctccaaccgaagaagagaaatctgctctcttgttgcctacaagaatgttggtaggcgcccgccgcttccttcctggccgtgtcatctccagcattgagcatgaaaacagagaaggaatgaagaagaagcagcagatgggcaaaagagtacccgtgagaagatagaaggcagaacttgcaggacatctgcaaatgatgtttctgggagctgttgggacaaatatcttattcccaatgcgttacacaaccagaaagttaaggtgttctactttgaaaattgaaaggaggttattttaggtatctttctgaagtggcatcttgagacaacaaacaaaccactgtgtcgaactcccagccaggctttaccagggagcattttgaaattagtaagaaagaaatgcagcctacacacccaattcgtcttggtctggcactaaatttctcagtcttttactatgagattctaaactctcctgaaaaggcctgtagcctggcaaaaacggcatttgatgaagcaattgctgaattggatacgctgaatgaagagtcttataaagacagcactctgatcatgcagttacttagggacaatctcactctgtggacatcggaaaaccagggagacgaaggagacgctggggagggagagaactaa

SEQ ID NO: 2000 - DNA, 1603 bp, Homo sapiens
  SIMILAR (373)..(972): 471254mologous to Homo sapiens HS1,accession number X57346,Smith-Waterman Score=326.
  misc_feature (1)...(1603): n = a,t,c or g
taccgccaccgccgccgccgattccggagccggggtagtcgccgccgccgccgccgccgctgcagccactgcaggcaccgctgccgccgcctgagtagtgtaccgccaccgccgccgccgattccggagccggggtagtcgccgccgccgccgccgccgctgcagccactgcaggcaccgctgccgccgcctgagtagtgggcttaggaaggaagaggtcatctcgctcggagcttcgctcggaagggtctttgttccctgcagccctcccacggcagagtctccagagatttgggccgctacaaaaagtgcattttgcccattcggctgtggatagagaagcaggaagagcactggacttggagtcagggaatgacaatggataaaagtgagctggtacagaaagccaaactcgctgagcaggctgagcgctatgatgatatggctgcagccatgaaggcagtcacagaacaggggcatgaactctccaacgaagagagaaatctgctctctgttgcctacaagaatgtggtaaggcgcccgccgctcttcctggcgtgtcatctccagcattgagcagaaaacagagaggaatgagaagaagcagcagaatgggcaaagagtaccgtgagaagatagaggcagaactgcaggacatctgccaatgatgtttttgaagctgttggaacaaatatctttattccccaatgctacacaacccagaaaagtaaaggtgttcctacttgaaaaatgaaaaggagattatttttaggtatcttttctgaaagtggcaatcgtgaagacaacaaacccaaccaacttgtgtcgaaactccccagcagggnttacccaggaagcaatttgaaattagtaagaaagaaatgcagccctacacacccaattcggtcttggtgctggcacctaaatttcctcagtctttttactatgagattcctaaactccccctgaaaaaggcctggtaagcctgggcaaaaacggctctttgttttaggcattttgattgaagcaatttgctgaatttggatacgctggaatggaagagtcttattaaagacagcacttctgattcatggcagttacttaggggacaatcctcactctgtgggacatccggaaaaccaggggagacgaaggagacgctggggagggagagaactaatgtttctcggtgctttggtgatccgtttcagtgtcactctgtaccctcaacatatatcccttgtgcgataaaaaaaaaaaaaaaaaaaaaaaggaaatttgcccggcaattttgattttttcaaaccctcaccctagaaaaaagggtcctggggaaaaccggcgggttttggtttttaaaacccaaatgggccccataagtgcccgggttttccaaatttttgattttgattaactttgccgggattacggggggttaaatttttaaaaaacggaacactgtgattatggggttttgtaatttagcagaactcttactggtagaaaaaatagacctgaattatgtgtaactttttggaaggtttaatctgatatcaaaataatcattgaaatacaattccattgtaaagttgtacagaaagtt

SEQ ID NO: 2001 - DNA, 172 bp, Homo sapiens
  misc_feature (1)...(172): n = a,t,c or g
ccaacctcaatccccgcaaactaaagcaaagctaattgcaaatagtattaggctcactggaaaatntggctggnaagantgtttcancctctgggggtagaacagaaccaagtgctggaccccaggtagcctcttggagatgaccgttgcnttgaggacaaatggggacttt

SEQ ID NO: 2002 - DNA, 459 bp, Homo sapiens
  SIMILAR (55)..(252): 1001254mologous to Homo sapiens glutathione S-transferase theta 2,accession number L38503,Smith-Waterman Score=330.
atcgagatccatattaagtgcggtggaattcccgctgtccttgccgcccccgccatgggcctagagctgtttcttgacctggtgtcccagcccagccgcgccgtctacatcttcgccaagaagaatggcatccccttagagctgcgcaccgtggatttggtcaaagggcagcacaagagcaaggagttcttgcagatcaacagcctggggaaactgccgacgctcaaggatggtgatttcatcttgaccgaaaggctaacaggagtgtctacctccagggcggctgctggcatatcacagagatgaggttctcaaaatgcaaagcagaaggtccagccaagagtcgctcggccatcctgatttacctgagctgtaagtaccagacgccggaccactggtatccatctgacctgcaggctcgtgcccgtgttcatgagtacctgggctggcatgccgact

SEQ ID NO: 2003 - DNA, 310 bp, Homo sapiens
  SIMILAR (8)..(310): 871254mologous to Homo sapiens glutathione S-transferase theta 2,accession number L38503,Smith-Waterman Score=523.
gcacgagcagacgccggaccactggtatccatctgacctgcaggctcgtgcccgtgttcatgagtacctgggctggcatgccgactgcatccgtggcacctttggtatacccctgtgggtccaggtgttggggccactcattggggtccaggtgcccgaggagaaggtggaacgcaacaggactgccatggaccaggccctgcaatggctggaggacaagttcctgggggacaggcccttcctcgctggccagcagccggtggctctcggctacgaactgtttgagggacggccacgactggcagcatgg

SEQ ID NO: 2004 - DNA, 454 bp, Homo sapiens
  SIMILAR (15)..(107): 451254mologous to Rattus norvegicus glutathione S-transferase Yrs-Yrs,accession number D10026,Smith-Waterman Score=78.
  misc_feature (1)...(454): n = a,t,c or g
atagagcccatagtagacattaggccangcggaggaattcgatcaacagcctgcggaaactgccgacgctcaaggatggtgatttcattttgaccgaaagggcggctgctggcatatcacagagatgaggttctcaaaatgcaaagcagaaggtccagccaagagtcggtgcccaaggcaacaaagacaggaggagactcgtaggaggagggggtggtgttggggagctggagatggagggcgaggctggagggcagtccttcaaatgcagagaagcccccgggccccactggcagatgggagcagttaggggtaaatgcctggagccagtgtccttatagccactgcccatttgttcccagctcggccatcctgatttacctgagctgtaagtaccagacgccggaccactggtatccatctgacctgcaagctcgtgcccgtgttcatgagt

SEQ ID NO: 2005 - DNA, 619 bp, Homo sapiens
  SIMILAR (71)..(298): 681254mologous to Homo sapiens glutathione S-transferase theta 2,accession number L38503,Smith-Waterman Score=268.
  misc_feature (1)...(619): n = a,t,c or g
ctgagcccaggaaagtcgagactgcggtgaccatgatcgtgctactgcactccagccagggcaacagagtgagatcctcctcctgcagcgtctgccaccagagaatgctgtggactgagtggccttggagggatcacagcctctctgaaccttagcttgccttctgagctgtaagtaccagacgccggaccactggtatccatctgacctgcaggctcgtgcccgtgttcatgagtacctgggctggcatgccgactgcatccgtggcacctttggtatacccctgtgggtccaggtgaggagagccaatttgccctttttatctttccctcttgccccagtgccttctctccagcttcatgtgaagctctgcacagacaagacactcagtgtccttggcagtgcttctatccttaggtgcagcatacataccagttagaagactaatctctcagccaaggtggaagtcccatccttcaaggccggcactttctcagggggttcacatgggcaaagcgatgctgtgctgctgggctgcaatatctccaccacggccacaggttagcaagtgagatttggtttccgtgatgaacatcttatctgcagaaaactcgtgncg

SEQ ID NO: 2006 - DNA, 510 bp, Homo sapiens
  SIMILAR (305)..(508): 971254mologous to Homo sapiens glutathione S-transferase theta 2,accession number AF240786,Smith-Waterman Score=366.
  misc_feature (1)...(510): n = a,t,c or g
tgcgcntnccgccgaatgaacccctcgcanactgagaccatagtccagtgtcgtggaattccacagagatgaggttctcaaaatgcaaagcagaaggtccagccaagagtcggtgcccaaggcaacaaagacaggaggagactcgtaggaggagggggtggtgttggggagctggagatggagggcgaggctggagggcagtccttcaaatgcagagaagcccccgggccccactggcagatgggagcagttaggggtaaatgcctggtgccagtgtccttatagccactgcccatttgttcccagctcggccatcctgatttacctgagctgtaagtaccagacgccggaccactggtatccatctgacctgcaggctcgtgcccgtgttcatgagtacctgggctggcatgccgactgcatccgtggcacctttggtatacccctgtgggtccagatgttggggccactcattgnggtccaggtgcccaaggagaaggtggaacgcac

SEQ ID NO: 2007 - DNA, 384 bp, Homo sapiens
  SIMILAR (53)..(166): 1001254mologous to Homo sapiens glutathione S-transferase theta 2,accession number L38503,Smith-Waterman Score=187.
caccgcgctcagcgccttcactgccatccccgctgtccttgccgcccccgccatgggcctagagctgtttcttgacctggtgtcccagcccagccgcgccgtctacatcttcgccaagaagaatggcatccccttagagctgcgcaccgtggatttggtcaaaggtgggcccagcccgtttccccgcgtgtccacaaacccagtgcacccccaggcccccgccctgctctgccctgagcgtctcgccgcccgcacagccccctcacctcctcctgcagcgtctgccaccagagaatgctgtggactgagtggccttggagggatcacagcctctctgaaccttagcttgccttctgaaaaggaggataatgttaccttctgctc

SEQ ID NO: 2008 - DNA, 1411 bp, Homo sapiens
  SIMILAR (335)..(580): 671254mologous to Rattus norvegicus glutathione S-transferase Yrs-Yrs,accession number D10026,Smith-Waterman Score=277.
atgccagggctgggattcagggagaagaaaggaggttcccggacagtcattcctgcctcccgcggctgcgggctccctgcccccatcctgtgcacgaagtgggagctcccgctgtctggcagctcccgctgtctggcagcagctgctctgcaggggacagtctggacggcagaaagttcatccttgaccccagccttccagtcaagggggtggggcctgatcccctatttcccggcgcgccgggatcctgccacagctgctgcccacaccgcgctcagcgccttcactgccatccccgctgtccttgccgcccccgccatgggcctagagctgtttcttgagcctggtgtcccagcccagccgcgccgtctacatcttcgccaagaagaatggcatccccttagagctgcgcaccgtggatttggtcaaagggcagcacaagagcaaggagttcttgcagatcaacagcctggggaaactgccgacgctcaaggatggtgatttcatcttgaccgaaagcttggccatcctgatttacctgagctgtaatgtaccagacagccggaccacttggtatccaatctgacctgcaaggcttcggtgcccgtgttcatgaagtaccctgggcctgggcatgccgacttgcatcccgtgggcaccttttggtattacccctggggggtccaaggtgtttgggggcactcattgggggtccaggtgcccgaggagaaggttggaacgcaaacaaggactgccatggaccaggccctgcaatggctggaggacaagttcctgggggacaggcccttcctcgctggccagcaggtgacactggctgatctcatggccctggaaggaagctgatgcaagccggtggctctcggctatgaactgtttgagggacggccacgactcggcagcatggcgtcggacgagtggaggctttcctgggttgctgaactatgccaggaggccccacaagcatcatcttgagcatcctggaacaggcggcccaagaaaaccctcccaacacccttcaccaggaggcctatcaggctatgctgcttcggaatcgcccaggatcccctgaagggtctgggatgggggccaaggagattagcaacaaggattcattctgttacttacttgcccctttttatctttccctcttgccccagtcccttctctccaagcttcaatgtgaagctctgcacagacaaagacactcaagtgtcctttggcaagtgctgctactcctcaggtgcaagcatacataaccagtaagagactaaatctgcaatatataaagagctcctacaaatcagtaacatgaagaacactcaaaaattggcaaatgtcatcagtgttttaaacagaataaagattccaaacactttgaatagaaaaaaaa

SEQ ID NO: 2009 - DNA, 456 bp, Homo sapiens
  SIMILAR (394)..(347): 931254mologous to Homo sapiens Human secreted protein, SEQ ID NO: 4484,accession number AAG00403,Smith-Waterman Score=98.
acaaataagtaaagatttgatggtgaaaagtgctctggataaaagtcaagcaggcacaggggaaatggcaagctgagatttggctgagggagtaagtggtcatggtgggcctaaagaataactggggaaaggtgacattttagcaaataagtgagggactgagccctgtagaagtaaaggaaagatcagtcttggtagagagaatatccccaaggcccttgttaagtttcattttattgacaagattttcttgatcagactatgcatgtctatactgagacatgttatagaagatgaaatatatatcagttggaataaaaatagtttaaaaatggccaagtgtggctgggtgcggtggttcgcgcctgtaatcccagcactttgggaggccgaggattccttggggccaggagtttgggaccagcctggccaacatggtgaaaccccgtctctact

SEQ ID NO: 2010 - DNA, 486 bp, Homo sapiens
  SIMILAR (4)..(48): 531254mologous to Mus musculus follistatin-like protein,accession number L75822,Smith-Waterman Score=42.
  misc_feature (1)...(486): n = a,t,c or g
cagagggccgagacccgcgggaagaaggccatcaccaggtcagcaagggcacctcgangcaaggtccttccatagtgacgccccccaaggacatctggaatgtcactggtgcccaggtgtacttgagctgtgaggtcatcggaatcccgacacctgtcctcatctggaacaaggtatctcctctaagtaaggaagatgctggagaatatgagtgccatgcatccaattcccaaggacaggcttcagcatcagcaaaaattacagtggttgatgccttacatgaaataccagtgaaaaaaggtgaaggtgccgagctataaacctccagaatattattagtctgcatggttaaaagtagtcatggataactacattacctgttcttgcctaataagtttcttttaatccaatccactaacactttagttatattcactggttttacacagagaaatacaaaataaagatcacacatcaagactaaaa

SEQ ID NO: 2011 - DNA, 460 bp, Homo sapiens
aattgcctttcatagctaaaatcatgtaacttgagttccacagagcactccagcatatcatttatacaattactcatatatcctttatccccatattttaacatcttcatttatttggaaacactcaactacatgccaattcaaaagtcaaccacatccccatatgtaactaatttttatctttttttttttttaaacaggtgaaggtgccgagctataaacctccagaatattattagtctgcatggttaaaagtagtcatggataactacattacctgttcttgcctaataagtttcttttaatccaatccactaacactttagttatattcactggttttacacagagaaatacaaaataaagatcacacatcaagactatctacaaaaatttattatatatttacagaagaaaagcatgcatatcattaacccaataaaatactttttatcacaaa

SEQ ID NO: 2012 - DNA, 2495 bp, Homo sapiens
ctagaatgacaattttctattaaaaggggggacaagagtggctgttatagacccaaagcgattttaataaccagacacggaacaatttgtgcttacaatgagagattttgatcacagatgctctcctcccgggtcgttttccccaaacgagtcttgtttacacaagcagatcttaaacaggaggtgccatttaattttgtcgtttaaaccttgctccacggggggcagctggctgctacagtctcttggcaaagatgtctcttgatacttttcaggtgtagtcattaagaaaaagaacagctctctcccttctcctctcactcccgcctccgcccccattatgaaggcgttcagcccactctcaaccttaaaagccaaaataaaacaaaacccctaagtgcgaataacatatccagatttaaaaggggggaaaaaggtcctcattaaatgaggcttcccaatggctcaaagatggctctgttcttatgctggggaagcacgactttcccatggcagccatttgtgctgtgctcaccttatatgcttggacaataaagaacttagaaaaacgaacgtttaaattgctccaaccgtgtgaatggtaccagaaagctccaaaggactccagagagcgggggtgagtaaccatttcctggcacgagaatgtgtaatgctgtcgttttttcaccggacaggaccgaggtgtttgaagatttctttcttttcagaataccgggtccgcatgcaaccgcccccacccccaccccaggtccctagcttcattccctcccacccctcccccaggactcttacgttttctgtccacgcaatgactggaacgggattctctaaaaagcaagcacatgctctgggcagaggcggggtgcttccggggaggtcaggtgggggtggcattctggggccatgcgttttcttccccatgcgtggtaacacaaggaaatgtactaactgttaaggaaaactcgaaggcgggtcacacagggaaggccagattggccttactttccccagtgctttgcaaggatggggtggggaggggagacagcagagactagggccttgagaaatatcaaaaggtttattgaaacatactcagctcagacgtactggcttatgaagcggtcagtcctcccccggcccccaaacactaacctttttcatttttctttaaaggttaaaggcttatgggtagttttatagaaaaagcaatgtagtgattagagtatctgcagaaggacccaccctcatttatacattccatggccgtcaggttaaaaactctggctttgaatcgatgttcagaggttatggctgggccaaacagtgcagaggaacatggggggctttgaatgggccgagatgttcggaaatgcttaaataaccaaaaggaattgacttggcttcagggaccagatggaaaacccattgacaggaaaccaatggggcttgggaaaaagggcctgttttcatggaacctgccagaaaaacccaaaaacaaaaatatcccccacaccctccaaaagcaacaaagaaaccctcatgtgatccattcccatcccaggaattttcacccatagcaacggaaaggacccgaggtgtcactgcttgtgaggcagcgagaggtcatctctgcatcctagtgggaacccctgaagccctgctaggtgacatcatcgcgggaaaaaccttgcccgtggtggcctgccttcccaaccctgcccttcccggagggggcttttcaagcttgagacccccattggagcttttgaaaatgaataagggaattaaatttgggaagaggatttgggagatacacccttaagtgtaggaacagggcgagatgatcaagggaagaagggactgctgccccaagccagaatatttctatggctctacaagggaagcggcggggcctgtgttctcaccatagacactagagcaagagccccatagaaggaacagtggttgatcactttccaaatgtgatggtcacttcatcgacccagagggcctcttctttggcacatgcccagggtccctccacctcttactggcttataaagctcaccccacgattcagttgggcctcaaccttggaaatccccacccacaacctcctttaactctcctgacccccctgaaaatgtgcaaaaccacccaggcaaaccggtggcaaagtccccatttgtccctcaacgcaacggtcatctcccaagaggctacctggggttccagcacttgctggggagaggtgataagaagtgggagccccccacctccaaccaacaccagtctggcccaccagctgtgaatttggttctgttctacccccagaggatgaaacagtcttcccagccacattttccagtgagcctaatactatttgcaattagctttgctttagtttgcggggattgaggttggtctggtattacgtgtctgtgtgtgtggcaggggaggggcgggcagtcggt

(The sequence listing continues in the following parts.)
